United States Patent Application Publication US 2018/0305689 A1 - sequence listing, part 62

SEQ ID NO: 913315 - DNA, 4001 bp, Homo sapiens
ttccttggaccccgccaggcctccctgggactccagcctcctctcatagacccttccccctcgttggcagcagtaggccccaagacaggtttccctctagcagtgattcccaaccaggggcattttgcccacagggaatatttaacagtgtctgaagatatctctggttctcacagctggggagggagtgctactgtcgcctggtgtgtagagatcaaggatgctactagacatcccatagacagtcccctgcaacaaactataatcccatccaaaatgtcaataatgctgaggttgagaaaccctgttctacaggagccaaaatcatgaccatccctccagaaagtcaggttacaagaactgagtagttcactttctgtccttttaggtgagctattgtttagttgaagagaaaaatctgcaggcttctgttgtcaggatataatattccctgagcttactggataagccactgatgcgaggattagactcactgacacatgaaaatgcttaggcaaccgcctcgaaaacattggtcaaaacattctaagtgttataagggatgcttggcaaggcctcacgcttagtcttaaaaagccttctcaaaagtaatttataccaatgagccgtggcaaattcacctattctataagtacgcagtgactcaacaagccttttgatccatttatagaatggcaacaattatattttaatgagttattttcacttacttgtcagaacctgttttggtaatctaaataacttcacatcctcttaacattccttatgaggctgtctgagagaaaaacaggctcagttttcttttaagtctccaatctcagctaagtgacaaatgaagctgctatagcgaccacactcctgctggcttatggccaaactcacgttttctttttttcttttccaacatcataaatctatttttttcacagatgaaataactttctggtcccatttcttctttcatgctagtatagcacattttaaaacactttccccccaaaaaaagtctttacagtatgattcgattaataactgggtttttaggaaaactattttcaatataaaggccagaatctctagatttcttttactgcatatcaaaggtggaaagagaggcaattgtcaagctctttcaacctagagccgcaataaaacatgaataacatctaaacattttgtttccttattttcatttattgggtatttcttaaagaaaaaaaaatctcataatttacagtaatagctaaatctactcattcccacgtgccacttccaccaccaaatcccccaaacaggactcaaatgtaaatttcacagagctctacaaaccacagacaaaacaaaacaaccccaaagtctgaaaaccacagtctcctttcaatcttgcgggtagcagcctaaaaaaacataagccttgtttaaaaggtcaacgcactacacttctcagtgaaataaataaccagcctttcctgcccttcagtctagttctgtatcgatgaacaaaagctcctgtcgtttcttttgtatcatcaggaaaacaaaaagtttacataaatgtatgtcagggcaataaaagtgacttctgtcgccagcatccagccaccacatttggaggatccgagcggcctccgacctcacgaaggaagccagaaatctcacatctgccacgcaaagcaaaggacataggtcaccttgtgcaatgtccgctttacctcaggccagggttccttttcttctaattctgttccttggctgtgctgagcagagaactcctccaggcttcaagttcagaacacggccaagaggctttgtagatgccagacctcagcccgacagactgaggctcccacctgcctgggttacatatcaggcttctctccgaagctcggctaaggcaacgtgcatccctctagagacgcactccggaaaccagccccgtgtgcggcgggcaggcacgctctctcacgcctcctctcctcgctttacttactagttcaacacaccagcaaccacaatgggccagtccatgttcccaaaaaaggagggggagtagatttactttctttctttttttaaatgcaggtaggaaagtaccatttctttgcattcactcactattgtctgcatgtgaaaccgacagtgattgtccctgaggcataagcttgtactgaaacgagattcttaggctttttgagtttctttctcggatttgagatgatggaaaggtgcctagctgagcacagccatcacacagcctgcagcctcctcgcaagtccctgcttttgaggtacatgtaaggaaccccttatgcaaaagtataacaaaactgagttcaactttttattcccttttgttacttcagaatttccatattattctgcagtactgtctgagacaaatatgattggaaaacctcttatcaagctttcttgattcatatttttggtacattttgtattgtgtgtttttaattgtagcagaaaattactggctagctactggctatgttgcaggcattttatacacacagcctcattttcaacgaaaccatccctgcagaaatctcaggtgagccagtgactgaggggaagctgcaggctctctatgcatgtgaacagagaggaggaactggaagtttctccagtgatggcacagcccttttaatgtactctttcttaggatgatggaaagatttctgtaacaactcttgtcttttttttttttttttttgagatgggatctctgtcacccatgctagagtgcagtggcacgatcatagcgcaatcagctcactgcaacctccaactcctgggtccaagcgattgtcccacctcagcctcctgagtagctgggattacaggtgtgagccaccatgcctggctaatttttaaagtttttttttttttttgagacggagtctcgctctgttgcccacgctagagtgcagtggcgtgatcttggctcactgtaacctccgcctcccagtttcaagcaattctcctgcctcagcctcctgagtagctgggactacaggtatgcaccaccacacccagctaatttttgtatttttagtagagatggggtttcaccacattggccaggatggtctcgatctcttgaccttgtgatccgcccgcctcagcctcccaaagtgctgggattacaggcgtgagccactgcgcccggcaatttttaaattttttgtggagacaggatctcactatgttgcccaggctggtcttgaattcctcacctcaagtgatcctcctgcctcagcctcccaaagtgctgcaattataggtgtgagccaccctgccctgccacgtttgtcatttttaagaagactaggatgatttacgaaattttttagggagattatttgcccacaaagatcaggaaatgaaaagacccttttatatagacatgtggaatctctctaagctggtttggaagaagtcccaagcagtgctgagaaaatgtaaggttttagcaacaaagccgtgcttctaaaatgaagaggagactattggcttatacatcataataatgacaggggtctcactaaatttctagtgcatttttcttctgaggagtcagaaacctccatcaatgtgtcctcaccacacccttatagggccagatcctcaaagtggcatctgtggacttccctgtaccagaatcacccagggcagggctgcatgttcacatgcagattcccaggcctcctgaatcagaatgtctggggtgaggcctgagaatccatacttcattattttttaaaagcatgaataacttcatttttattgtggtaagaacacaacatgagatgtactgtcttcaatttttaagtgcacaatacagtattgttaatgataggcaccatgttgtgctgggaatccacacttcaaacaagatatgcaggtgattgttaggcatagtggttttagaacctcagccttagatggtaagaccatttgggg

SEQ ID NO: 913316 - DNA, 4001 bp, Homo sapiens
tcttctgaatctgcacgcagactgtagccccttaggatttgttccacacctacatgacatggggttagttgcacatagttctaacctttcctctaaaagataaacttcttggaggtagagtattttattcattattacatctggcatagcacacaatgcttcgtgcatggcagtaagagctgatatttaccgagagctgactacattccgagcactattctaagtgccttacatgaacatatgagctcatttaattttcacaacaattttggaatacgcacaattattctctccatttacagaccaggaaactgagacccaaagcataacctgtccaaggttataccactaggaagtgagagggcctgggttcagatccaagcagcctagctacagaacctacgttcttaaccactatgctacagtcgatgttcaatcaatttagctaatttatgtaaaagagcttcaaaaactataaaggactataagccacaataaaccaaaagttcaaacaaaataggtttttgatatctctaaggacggggagacagtagtatatgaaggttaagtttagaatcagaccagagttcgaataccaccagctctatccctttctatctgtgggcaagctattattctttttcagcatctgcaagattaaactacttgttaagatggttgtgagaattgagatgactcaggtagaacgagaacgtgcctaccacagagtatgcggtcaataaattttggctctaaaacagagtcaaattgtaaaaccaaagaaattttctttgctaagttattaaccaacaattataaacagtattaaacaataatcacttactgttttttattgcacttcaggcctgtaaaacagtcaaataacattaattatctctaataagaaaaagggtcagagttctgcctctgggcataagactgaagcagcagttggaaagcctaactcattaaagcaaatgcaaaggaaacattaaaagcacacgtaagcagtgggaaaattcccagtgaagtgtactgacaaatacaagtgtatccaaatgtgtatgttctgaaaagcatgctatataataggtccaaggggtgaagagcataggatgttaacacaggggctgttaacagtttgtgtgggtgcacagataagaattaagcacaacaagaggctggtttcagcttaagttcatggaagagggaccggcaccggctccggctcccctgggcggcggtgagtctatccacggaagatacccaggctccagacatgagataaggggcagagggaactctgtccctggccgggaagcccgaacaactccgaagtcccttactacctttgagcggggccgcggaaggaaggacagggagacacctgctcagaatgagactgggcctatattttaactatcttttttgggggagggggtgtgaaatgtaatcactcgggaaaggtgcgttagggcatcagggaggtgacatctgtgcaaaatgcatccagagatccagagatccagactcggtggctctcaggacgcaacggcctgcaaaggacatcttgcggacgcgaccctccgactccactcaaggtacttgctccgccaaagcagcttctagacagccccgacccccttgccaccagctgcctccaccagaggcctgaagggggtcggggtcatagactgcccgcgggtaaagagtctggggacccaggacgtggagcggggctcaggccggcgccccgaggcccgttagaaggctctgccagctgcgattccaggggccaaggtcgccctgggcccccaggacgccagcctcgaacgcactcaccagcctgctgccgcgcagcaaccgcactgccaggccctccatcctcgccgcaggcctctccgctctgcgcctctgggtctctagccagcccctgggagttacccgagcaaggccccgcccactcagtacccgccccgcacacacccccccttaatccctgccccctgctgcctacggaaccccaagagagacaaacaggcccctcctcgctttcgccctccatcctgctcacgcgagacttgagcaaggcaggggggcgggaagggagtcggagacacaacaaagatggcggcggcgactgtgacggtgacgaagacggcggcggcggcgacggcatttaacaaggcggtgtggtttactccatgcagttgtcaggaggtaagtagcaggctgccggctcggacggcggcgacgcggcaggacagggcggataagaaggagcggccggagactggagctgggttcgtggcgggccggctgatccggacggagactcagttcagtggagggtcgggcgtggtcggtaggcgggcaggtgatggcccgggacctctttagccggagggcagtggactgcggcgcctatggccgcgagaaccccgagggagcggggtctcctgctgtcattgccttcgagcaggagctcggaggctccggggcggggactgttgcttggctctgacaggtggttctgcgggaggcgtcccgaggtttgcgtcttcacggggtcccaggggctgggagtcagccgggcgcgggtctcctaggtgtttcgaatcctggcgaggatgtcgctccgaatcttggtgaggctgctgccccgacgccggtcccaggctgattgttgggagaaggacgtttaaagccttcgtattttatctaatgatcctgcccggatccgtctctactgcatgggcacccttattttaggaacatgtgagatttgagaaagacattgtagcaaataactattcaggttcattcggggtttagatctttggataaactgtgtggagcgcgagtagccaagcctagcatgctcgatgactggatctgaagctaaacaagttctagcaaacactaaccacgtggcctgcttagagtccccttgatgtgctggtcagaacccgaaagacgtgtgacaagcggaagaagacataaaggcgtcttaaattgtgtgatctgaggaaattcagttttgaaagaacagaatgtatttaaaacaacttttttttaaacgtaggaactaacaattttaaaaattcaatttaattttgatttatgtcgtgttgtcacaacagctaaaggttattattattgatgagagttcgttacagtgaattgaaatgtctggtgttattttcccctagcggtccaggatgtttcccagaaaaccgtagctgttttgtgttatgataggataagaaggatgggattcagatgtgcccttatcgggtgtgcatgttttttttgtttttgtatttaaagccctttcccatttccctacttaggactatgcgttgtttttatgcaactacagctgttcagcagtactaagcttgaccgttttggaagtgtgctgtgactaaatgaagttaatcttaatttctttaaactgaagtttaacttaaatttagacattaaaaatcttgccaaaaactaatccaccagtgagaaaacggtagtcacaccagttattctttggtgatcctatggagcttttgctgaagtgaagctactgctttgttctttgattaatctgtcagttcgttttcttttcagctaatgtaatgataagattggcataagttactagctcattcaacctgtagatgctaattaagtttttatcttaaaggttttgatttgtggtgtgctgtttgttttttatgcagacctctgtatggcttttcaattttagttgaaattctctctccatggccttttggagtcccttgctgtatctccgaagtaaatttcaattactctacatttcatcaatgttggagtggcaagaaaaaggaggaacagatttggggtgaaaaggttagattgtataatttctcttctggatttctttcaacatggttttacttatgttttatttttatgttttgatttctgatttctcagagcctcataatttctttttttgcctt

SEQ ID NO: 913317 - DNA, 4001 bp, Homo sapiens
gatttttctccggtttggaagatcaaaaggtaattaattcatattcaatagctccccttccactacatggctcctacacagaaaaaaaggctaaataaacaacactagaaccagaaagtgaaagggggctttggggctctctgcaggaggcgtctacagccggggcccagcgcacgtaccattcttcggcaaactctggatcaccttcacggccgcctcaaacctagtctcgtgcacggatctcgtgtccgccatctccagctgccagtgttggccccggtcccaaggtctgtcggcgggaatcaggcagcagcagcaccagctttcccaagagcctgcatgaaactggaacatggagcgcagccgcggatcaacatgccccaaaaggaggaggcccgggagcgaagcgggtcagttcccctttgccctgccctatccaggccacacagatcgaagcggcccggctccttcctcctcccccggggcgtgactaaggccacgaatccggcccgcgacgacagcaaaacaactcaccgagaggaagagcatgtctagcagaagacagagggggtccgggcatcggtggccgcggagccgctctcccaccctggggaccctggcggagcagccacaccccccattccgccggagtccgtctgtcagtccgtgccctccccacagccccgccccagagtcaccggaggacccactggcgccgccgccgccgcagcagcagtgcagcaaaccccacccacccgacccgccgccgcggcaaggacgcgcgcggtccgtctgtccccagaggagggtccgggaagcggggaaagggggccacagtcccggcttggtgcggggagcacactgtgcgcgcttttgttcagaagggggaaaccgaggccggaccgatgtgtccgctctggcagccgggtggacgaagtgcgcgctggggatgcgcggttgggttctgcacctgggcccaaagctgcacgcgacggcaccgctgggcaacaaaaatgactctgcggtccccagcgcctgcactctcctaagttaaggtttgaggaagttaaatggggcctaagcaaagggctttaagtcgggacaggttctgtgagaaactccagttctgccatttaaattatgtgacctagggcaagtcacttagcctttccagtggcaatcgtgacacccactctaaagggtagatggagaaaagcattggggaccttggatggaggtgctcagcagtccctggcccgcaggtcttcgacagttttcgctgccctgagccaagaacgtccgaggagcagccgaaggagagaggaggtcgccggctcctaaactgggctgggacggagggcaacttcccctacactaccctttccacccagccccagggagccaggcacctccagcgggatttaataggagactgggcatggggacggccgggcacagtggctcacgcctgtaatctcgatactttgagaggtcgagtggggaggattgcttgaggccaggagttcaagacgagcctggcaacatggcgataccctggctctatttaagaaaccaataattaaaaaaaaaaataaaaataggatactgggcgtagagggcggggccaatgaggagtctttacgggtcgtcaaccctagaaagggggtgccctgggccttcaacttactagcgcaaccccctgcgtccttaggcatttgggaagtgccccaggccgaacgttggtggtgggactgactaggttgtggggggtggagtcctgtagcccggaaatcccaaagtctcccggatggaagagtcgtttttgtcagttagggggatgggttaggagggttactaggaaaaatctaggcgcagatcgtaagttactcttccctctgagccgcggcgccggcatttaccttggtattgccggacaaggcctgtccggtaatgtccccgacgcccgcccctcgccctgccccgcgggcttatgggaaatgtagtccgccgttccgccgcgcttccggacacgtcccagcggcgtccggcgttcctgctagctcttccggttaggcgtctctgtcccgcggacgccgcagccgtgcggcggaatccctccttcctagccggttgcatttcgtgcctctttgaaatgccacattcgcttccagcttaagtgtcttgagattgtcgcggtgtctgcagctgcggcttctccagcgccctccggaggctttgcttcgggtttgtctaatacaacacagggggaaatcatttgatcgtggacgtttcacgtttctttgtcttcaaaaatgaagaggacattttgtaaaattatcacacaaagatgagaaatagattagagaaccaactttgggttgtaaatactaaagaattccaaatggtaatgtatgaatggctaaaaagcagtgacacttatctaacgcgttattactttattccataaaaggaacaaacctaaattgaaggaatattcatttcccccttattggatttaatagaacccttttcatttttaatgggaaataatcaatgtgacctatagatgtttcaattttttttttaaataaataaacctctttagggtgatttctggtgggattgaggaaaatgaacgggtttagggttatcttggcccaaagtctatcttggatttgccgctagttcactgtgtgactgcgtcaggaaacaagctctgaaaaatttcgttttctccaataaagtatgtgaaattacctagcatgtagtagccttcaagatttttgtatttcctcttttttgatacttagctgagcaataaatattggacagcagcaccagggaagaatctgaatcaggcagggaggatgagcactgcccaggaggaaaaagcgaaaaggaaagtgtgctgagcaggtgccttggcgggggagagaggaaaaggaaatgacttcacacacacacacacacacacgcgcacacacacacagagagaatgaagtttctttctgtctcttaagtgatgtgtgagtggatggacagattgccctcagctttaagggcagttcaggatgatctgtcttaagatcgatgctctgtggaatgagaaaaatgcgctctgcagggcatgcccactgcatgtgctgggaggctctcctacatccaatgggcagatgcgcagtctccacggaggcctcaggcctcggtgtgagccagggctgcttcaaacatgtcggctatctaaagtaagtcccagcaggggtcatttatttaaggaccgtggtgctttccatggctgatttgctggtaaatgacaggtgtgagtgtagtgaacatgtcttgcctccacctacttcacccaccatcctgtgcatcatggaaacctgtctcgatgatcagcagccatgtgtggtggggtggaaaggacagtctccagagacagaatcctgggaccatccctgactttgcaacttactagctttcttgccacactatttagttttttcaagctgtaatttccttaaaatggggaatatgatcaatctctatcccacagaaaatttggagcacatgagttcattcaagtaaagtataccattagcaggccataacacaggcacgaagaaggaaatacaataatttgtgcgtgtgtgtggtgggttaagtgtcacatcttcataaaattcaaccctacccccatttcagtcacttgtcagagaggaaagccaagaagccaattccaagagtttagtgtgacatcagtgtctaggtcatctaaatctggccatctttctgccatacctatctaagtcctgtggcaattaacacagtagagctatatttgcataagtaactttatagtctctgtgtatatgctgagcagagctgattcattttacaatcatttgcacttgtcatagagctccttcaatactactacccaaacatgttggacaaagaaaagaagatagacacttttgttttgttgcttgttttctact

SEQ ID NO: 913318 - DNA, 4001 bp, Homo sapiens
gtagcacctataattactttctaaatatgtttattgggccgggcgcggtggctcatgcctgtaatcccagcactttgggtggcccaggagggcagatcacctgaggtcgggagttcaataccagcctgaccaacatggagaaaccccgtctctactaaaaatacaaaattagccgggcatggtgacgcacgggtgtaatcccagctgctgggtaagctgaggcagaagaatcgcttgaacctgggaggtgggggttgaggtgagctgagattgtaccattgcacttcagcctgggcaacaagagcggaactccatctctaaagaaataaatatgtttattgtgaaatataattcatataatgtagaaagatatgaattgaaaagtacgtcttgcttctaagactctgcatttagaacagagaaaaatatttaatggccaaaaacttcacattggtctatgacataaaattacaaattcaaaaagctctgcaaatcgtgaacagggttaatatgaagaaaaaccacatctactagtcaaattgctgaaaaccgaagatagaaaagaaatctaaaaagcagccagagaaatagcacattaaatacaagaaggagatcagccactggaatgacttttttctcaccagctgcaaagaaggtccaatatgagtataaaaaagaacattatacaatggaatagcaaataaaaaggtagaaaatatatatttattaaaatagaaattacttcacaattgactatagttattctttcttttctgtcccttcatatcaaaagttttcaaaacgcttaagctggtagaccctatgagtgtgtggcattaggcatccccagcctagatttttgtttgtttgtttgtttgtttgtttgagatggagtctggctctgtcgcccaggctggagtgcagtggcacgatatcgggtcactgcaacctctgcctcccgggttcaagcaatttccctgtctcagcctcccgagtagctgggactacaggcgcacgccacgaagcctggctaattttcgtattttttagtagagacggggtttcaccatattggtcaggctggtcttgaactcctgacctcaggtgatccatccacctcggcctcccaaagtgttgggattacaggcttgagccaccgcgcccggcccggatttattttttaacacacccaaatccgcagtcattaagtgacaagacttttgttttcaacaatatgaagtacttaaaatctggatattagatttttctccggtttggaagatcaaaaggtaattaattcatattcaatagctccccttccactacatggctcctacacagaaaaaaaggctaaataaacaacactagaaccagaaagtgaaagggggctttggggctctctgcaggaggcgtctacagccggggcccagcgcacgtaccattcttcggcaaactctggatcaccttcacggccgcctcaaacctagtctcgtgcacggatctcgtgtccgccatctccagctgccagtgttggccccggtcccaaggtctgtcggcgggaatcaggcagcagcagcaccagctttcccaagagcctgcatgaaactggaacatggagcgcagccgcggatcaacatgccccaaaaggaggaggcccgggagcgaagcgggtcagttcccctttgccctgccctatccaggccacacagatcgaagcggcccggctccttcctcctcccccggggcgtgactaaggccacgaatccggcccgcgacgacagcaaaacaactcaccgagaggaagagcatgtctagcagaagacagagggggtccgggcatcggtggccgcggagccgctctcccaccctggggaccctggcggagcagccacaccccccattccgccggagtccgtctgtcagtccgtgccctccccacagccccgccccagagtcaccggaggacccactggcgccgccgccgccgcagcagcagtgcagcaaaccccacccacccgacccgccgccgcggcaaggacgcgcgcggtccgtctgtccccagaggagggtccgggaagcggggaaagggggccacagtcccggcttggtgcggggagcacactgtgcgcgcttttgttcagaagggggaaaccgaggccggaccgatgtgtccgctctggcagccgggtggacgaagtgcgcgctggggatgcgcggttgggttctgcacctgggcccaaagctgcacgcgacggcaccgctgggcaacaaaaatgactctgcggtccccagcgcctgcactctcctaagttaaggtttgaggaagttaaatggggcctaagcaaagggctttaagtcgggacaggttctgtgagaaactccagttctgccatttaaattatgtgacctagggcaagtcacttagcctttccagtggcaatcgtgacacccactctaaagggtagatggagaaaagcattggggaccttggatggaggtgctcagcagtccctggcccgcaggtcttcgacagttttcgctgccctgagccaagaacgtccgaggagcagccgaaggagagaggaggtcgccggctcctaaactgggctgggacggagggcaacttcccctacactaccctttccacccagccccagggagccaggcacctccagcgggatttaataggagactgggcatggggacggccgggcacagtggctcacgcctgtaatctcgatactttgagaggtcgagtggggaggattgcttgaggccaggagttcaagacgagcctggcaacatggcgataccctggctctatttaagaaaccaataattaaaaaaaaaaataaaaataggatactgggcgtagagggcggggccaatgaggagtctttacgggtcgtcaaccctagaaagggggtgccctgggccttcaacttactagcgcaaccccctgcgtccttaggcatttgggaagtgccccaggccgaacgttggtggtgggactgactaggttgtggggggtggagtcctgtagcccggaaatcccaaagtctcccggatggaagagtcgtttttgtcagttagggggatgggttaggagggttactaggaaaaatctaggcgcagatcgtaagttactcttccctctgagccgcggcgccggcatttaccttggtattgccggacaaggcctgtccggtaatgtccccgacgcccgcccctcgccctgccccgcgggcttatgggaaatgtagtccgccgttccgccgcgcttccggacacgtcccagcggcgtccggcgttcctgctagctcttccggttaggcgtctctgtcccgcggacgccgcagccgtgcggcggaatccctccttcctagccggttgcatttcgtgcctctttgaaatgccacattcgcttccagcttaagtgtcttgagattgtcgcggtgtctgcagctgcggcttctccagcgccctccggaggctttgcttcgggtttgtctaatacaacacagggggaaatcatttgatcgtggacgtttcacgtttctttgtcttcaaaaatgaagaggacattttgtaaaattatcacacaaagatgagaaatagattagagaaccaactttgggttgtaaatactaaagaattccaaatggtaatgtatgaatggctaaaaagcagtgacacttatctaacgcgttattactttattccataaaaggaacaaacctaaattgaaggaatattcatttcccccttattggatttaatagaacccttttcatttttaatgggaaataatcaatgtgacctatagatgtttcaattttttttttaaataaataaacctctttagggtgatttctggtgggattgaggaaaatgaacgggtttagggttatcttggcccaaagtctatcttggatttgccgctagttcactgtgtgactgcgtcaggaaacaagctctgaaaaatttcgttttctccaata

SEQ ID NO: 913319 - DNA, 4001 bp, Homo sapiens
gctgaggcgggcagatcacctgaggtcaggagtttgagaccaccctgaccaacatggagaaactccatctctactaaaaatacaaaattaattgggtgtggtggcacatgcctgtaatcccagctactcaggaggctgaggcaggagaatcggttgaacccagaaggtggaggttgcggtgagccaagattgcgccattgcactccagcctgggcaacaagagtgaaactccatctcaaaaaaaaaaaaaaaaaatagccaggtgtggtggcaggtgcctgtggtccaagctacttgggaggctgaagtggcaggatcacttgagcccaggaggtcaaggctgcagtgagctgagatcatgccattgcactccagcctgggtgacagagtgagaccctgtctcaaaacaaacaaactaaatgttccaccacaagcttatccttattggacttctaccacatgccaaacattgttttaaatgctttatacatataactcatttaatgtatctctcctgcatttttagataaagaaactgaggcacggagaggttaactatgtcacaggctaagtagaagtgaggcacacatttgaacccagatggccctgaagtatgtattacaactttacgcaggataacgtcttgcctgactgaaatggttaaagaagtgagccacgttctatgaaattttgtgcatgtaaaagattacattttagaggccgggcgtggtggctcacgcctgaaatcccagcactttgggtgtccaaggcgggtggatcacttgaggtcaggagttggagaccagtctggccaacacagcgaaaccccatctccactaaaaatagagaaaaatagccaggagtggcggcgcacgcctataatcccagctatttgggaggctgagataggagaatcacttgaacttgggaggcggaggttgcggtgagctgagattgcaccactgcactccagcctgggtgacagagtgagactccatctcaaacagcctgggtgacagaatgagactccatcttaaaaaaaaaaaaaaaaaattacaaaaatcagccgggcgtggtggcgtgcacctgtaaccccagctactgcggaggctgagacatgagaatcgcttacacctgggaggtggaggttgcagtgagcagaggttgcagtgagcagagatcgcaccaactgcgcctcaacctgggcaacagaatgagactctgtctcaaaaaagaaaaataaaattacattttagaatatttaataatgagaaaatgctcatattactgttttacgtgtaggaataaaactatatacacaataacatcataggtatgtgtgtagatatatgccacacacatacacacatggaaaataacatactaggacatactaggaattaccctagcatgtagcagtgattatcacctgggtgaaggaattatcattggattattatcagtaattattactttatatttgttgtcttttccaaagttttccacccttaacaatttttttcacatacctataaaacagtatttttaaattggagcctcacagatctcttctgctcagtatgacactaagagaggtcctggaggtcccaacgagcgaaggggcgggagcgggggatctcgactccctctcggagacggagaggaggaggcccgctccgtgctccccggcgctcctgccttgcctgcttttccgctcacccggcccctggggtccggaagggttgccctgggagccctggctcgccgtcagcaggcacaggtgcggtctacactgccatctggggcgctggggaaggagtgggcgtgtcccccgggtcaccgccgaccgctcccaggggcgccaagcccacccggagccccacttaagcactcccctcgcggagcgcccctcccgcgtggcctccccgcgccccgggtacctgcagggccatggtggcggctgccgcgttgttgctgctgctgttgtcgtccggtgctctgccccctctcgcacccaccgcttcttaaacggccgcgtctcctccggccgctgccattggccgcgctcccggcccggccgcctcccattggtcgcgggcgcgggggcgaggctgggcggtgagcggtactgcacgccgggttccccaggctgcaaatggaaaggcgaagacaggagaatttaaatgagtttctctccgctcttggctctctcttctattctttctcaagcggttctttgcaggaaacccagagaggtctccgtagggcacaggcctcccctggaatgccttcgaaagaaagaaagaaggagagagacagagagagagagagagagagaaaaaatatatatatatatagagagagagatatatatttatctagagagacccgccccaactctcttaaaatacatatgtaattttttcaatttaaaaaaatttatacatgtaaatatgtattggccgggcgcggtgcctcacgcctgtaatcccaacactttgggaggctgaggccggcagatcacctgaggtcgggagttcgagaccagcctgaccaacatggagaaaccctgtctctactaaaaatacaaaattagccgggtgtggtggcgcatacctgtaatcccagttactcgggaggctgaggcaggagaatcgcttgaacccgggaggtggaggctgtggtgagccaagattgcaccattgcactccagcctgggcaacaagtgtgaaactccgtctcaaaaaaaaaaaagaataagtaaatatgtatttaaaattttataaattaaaaatttatatatataaatttttttcagaggttggggtcttcctaggtatatatatattatatattttttctctaaaaattatatataaatttatatatatttaaaatgttaaaaattaaaaattttataaattaaaagtgcaaattaaaaaatatatatatatgtgttttttttttttttaagagaggtggtggggggggcgtctcactaggttgcccaggctggtctcgaactcctgacctcaagcgatcctcccacctcggcttcccgaagcacaggattccttctttatacatacttctctcatgtccattattcctagaaacgtggatgatggatgtgtctcctccacgctgcctccaggcgctgtttatcatgagagaaagtggcctgtggtttgcacctcttctctttataaagcaaaaccacctaaattctggacacatgctataatcagcttaacttgtttttaattatggtaaaggcacaggactaaacgcctattcaatttgactcagttttctaggggaacaaacccaatgtcactccaagtctgcagacacaccgaataggattacatttccaaaggactggaaccgaattgggtggtcacatgagaagctaatttccgacacttcgcataaatagtagcattggtggagaagggtgactgggagaaaaaagaaactcaatgtcagcaaagtgactgagcttcaacgtacaacaatgcaacaagaaacctttcagcttgcttttgcataaagctacatttttaaaatatttgcgttttcatgaaaatctttttttttctcctcacaaatattttcctggtgaaatcagtgcatttccaagtgaaggaccaaaagcaaaatgttagaaaaacctactgggcagttgtttgtgtttgaagtcctagatgatgggaaaggtcccgtgggggtactgaggctcatggcagcttcagcacagccaggcctttctctgttagcctagtcctggctgcgggcagaacccggtctgtggtgtttcagcaggaaatactgcactgagttcaggtatcagtccatatcttcagctgagacattctggaattatcgtcactgtaagaatccagaagaggagagggatggacgctacattgttctctgcttttttctctaaatccagaatgttcttttaagacctcttttgaaagtattttcttctcctg

SEQ ID NO: 913320 - DNA, 4001 bp, Homo sapiens
ataagagtacctactgtgtactggtacttccctggcttcatcttccctctctccattcatttctctctccttcctccatctccagcctccatgtagtatctgtggtctcactataggtggatggttaggtatgcaatgacacgctgatgttgttgttggtgtctttgccctcaaaaaattacaatatagcctgggagagactattttaggtcaggctaggctgaaatattctgtttggtctggattaaaaagtgttttctcttttttaataattaaatttgaatgcatttatctggggtatgcctgctctgaattttgctaaagtttccaccattagcatcttattacacaccatctactttacttctctatattacttgcctgtcctataagcatttgcacttacacttcttgttttatttaggtttttgttccttttattatgccaaatacacaaaagatggctataaaattttacaccatgcctctttcaagacatgttctgtgtttaaccttgaatactgatcaatcggaggggactaccacagagtgactccatatcagaatatgaagggagaaataaacaaaaccaattactccttttttaaaagaaaactaagtcagttttcaatgtttttttatttgtttgtttgtgtgttgtttttgagccagagtcttgctctgtcatccaaactggagtgcagtggtgccatctcggctcactgcaacctccgcctcctaggttcaagcaattgtcctgcctcctgagttgctgggattacaggcgtacgccaccacgccaagctaatttttgtattttcagtagagatggggtttcgccatgttggccaggctggtttctaactcctgacttcaggtgatccacccacctcagactcccagagttctgggattacaggtgtgagtcactgcgcccggccttaactttattttttaagactctgcctctgatatagaatactaatcacctacacattggagctatagattcaattctacctttcagaccaccaaaaaaaggctgatatctcagaaggtaccaagccccggtggtagagtccctttccagtgcttattccctgagggtctccggtggtagagtccctttccagtgcttattccctgagggtctccggtggtagagtccctttccagtgcttattccctgagggtctccagtggtagagtccctttccagtgcttactccctgagggtctttgagattcaccttaggaccctcagggagtgggcattgggaaggaagtacttaggaattaagcagcacctgagacttaacctgtggccttacttcctaaaatacactcagctccattcatctgtctctcccaccccattggtctcattcatcagtcttacccaacataaaattgagggcaaacccccagcccacctcaggggagctatgctggatgctcagacccacaaaaagaggtctctgttttggttcaccttccccaagagagtcgagagaaggaaagtgagccccatgcatgccccacatccttccttcccgttgctcctcctgacacagggtctgaaggcatgaccgagaccaggagggagacagcatgatgtgcccgtggaactcagccggcccttgattctaagtcgcttaaagaaagtcgggggtcaggatgcccccttggcctctgtcacaccctcacaagacccccttgctgaataacaccccctcgatggtccccttaccctgcgagggggccgcatctctcagtgcttctagtgaatgggggcttcccggctctgagttcttcctgccacacgagtccctgtccttcttccctcgctcgtggttcctccagagacagggtggcttcagagcgtccatgcaggcagaaggccggcccagagtgtccccagttctgccctgctctgagctgtcccgagtcaggccatgtcaggctttctaacgtgctcggggacttcacttcctggttttaattttttttttcacaactgaaagtggaagtgttctgaccaggaggggagaagctgccaaagctaccctggctccgtgtcaaagcctttcacctcagcccctaagggccgacacaaaagccagcttgcctcaacacagttgaccctgccctcctgtggcctatcatctttcaactaagatgaaaacaaacaaactaaaatgacttgaggtgccccctcagatcagaagcctcacagaggcagaggtgacgctgttccctgctggattcggaggacaggaaagtctggctagagggtacctcagccctcagacccacacaaacaccttctaccccgcctctctccagtcgccagagctgcctgccttggtctctgaagaagttctggcaaagccaagaaaataagcaagtcaggaacgacagggctgtgagtcgttcaattggcatggtttctttccctctgatacagtcacacctcaaaacttaacttaaaaatcgattctttcgccttggtcacccccagtattaccaggacctgtattagtctcatttttgatccgcctaaggctgtggctacaggggggccctggagctaccattctcagattaggaagccgaaatgacaaattttcctgccccttccccacctcacagatacctcagaatgaagcagcactttctccagcctcgatcccccacgaaggctcacaggaagttcagcatgatcctggctctttgctggagctagattagggtttgttctttctacagagcagttcttaaaagcttcctactaaggaagccagggtgagctgtgccacagtctcagagaacacaagagctgagcccttggcctctggggagccgcctttggacatggaagaaagatgaagggctgggagacgaagtggggcctgtggcattccatcctctggctcatctcacggctggaggagcacttgtcatttgcttagtttcaggaactcagctccccaagaggcaacttcctctagaggagagcagaggatggcagagtgggtgtcgaatctcagccacactaatacctctgagcccttcaccgggtgctgtcttccttcaccaaagggctcagggccaggggaagatgaggttttatttcttttttttttattgacctcctccagtaaaaatgctcaagttcaggaaggttgagtcattctaaaggcccatcagagttgtattcctatcaatcctctgtgcacatgagtgacaccctcaggatttcagggggtaactgaaagctttggcaacccacaacaattctgcattattgggcaggctgtggaaactgaccaatcaagtctcaaattctagccacaccaccttggagctatgtagcttaggccatgctgtttaacagcctggagacgcactatgcctctgtgaaatgggaaggataccacctgctttataggatgagatacaccaatgaagtaacatacataatctacccagaacagtccccagcacctaatcgaatatctgctgattcccttcctctctgtctgccaaatgggactctctgccctcagcagctgacgcacgatccttctaactacactgagacagaaatttcttaatggaagatgaaggagacccacattctggcttggtgtgctttagtacacttaccaaaatcagtgttcccttccaattccatcccctgctagcatttggatagctcatatatctccaccccttttccaactgatttttttctttgcctcccacacaagtcagctgagattactattcaactaaatgtaatttcatgttattaaagagccttaggttgagcataacaaatcccactttctttccccacaccaatcccctccctactatctcacagatatattcaatatagtgcaggtagtatcattgcagcttaccttggaagaagactctcccttcctgggtccaggaagtgctcccctcacagctggctgtattgattcagcacc

SEQ ID NO: 913321 - DNA, 4001 bp, Homo sapiens
aggaggggagaagctgccaaagctaccctggctccgtgtcaaagcctttcacctcagcccctaagggccgacacaaaagccagcttgcctcaacacagttgaccctgccctcctgtggcctatcatctttcaactaagatgaaaacaaacaaactaaaatgacttgaggtgccccctcagatcagaagcctcacagaggcagaggtgacgctgttccctgctggattcggaggacaggaaagtctggctagagggtacctcagccctcagacccacacaaacaccttctaccccgcctctctccagtcgccagagctgcctgccttggtctctgaagaagttctggcaaagccaagaaaataagcaagtcaggaacgacagggctgtgagtcgttcaattggcatggtttctttccctctgatacagtcacacctcaaaacttaacttaaaaatcgattctttcgccttggtcacccccagtattaccaggacctgtattagtctcatttttgatccgcctaaggctgtggctacaggggggccctggagctaccattctcagattaggaagccgaaatgacaaattttcctgccccttccccacctcacagatacctcagaatgaagcagcactttctccagcctcgatcccccacgaaggctcacaggaagttcagcatgatcctggctctttgctggagctagattagggtttgttctttctacagagcagttcttaaaagcttcctactaaggaagccagggtgagctgtgccacagtctcagagaacacaagagctgagcccttggcctctggggagccgcctttggacatggaagaaagatgaagggctgggagacgaagtggggcctgtggcattccatcctctggctcatctcacggctggaggagcacttgtcatttgcttagtttcaggaactcagctccccaagaggcaacttcctctagaggagagcagaggatggcagagtgggtgtcgaatctcagccacactaatacctctgagcccttcaccgggtgctgtcttccttcaccaaagggctcagggccaggggaagatgaggttttatttcttttttttttattgacctcctccagtaaaaatgctcaagttcaggaaggttgagtcattctaaaggcccatcagagttgtattcctatcaatcctctgtgcacatgagtgacaccctcaggatttcagggggtaactgaaagctttggcaacccacaacaattctgcattattgggcaggctgtggaaactgaccaatcaagtctcaaattctagccacaccaccttggagctatgtagcttaggccatgctgtttaacagcctggagacgcactatgcctctgtgaaatgggaaggataccacctgctttataggatgagatacaccaatgaagtaacatacataatctacccagaacagtccccagcacctaatcgaatatctgctgattcccttcctctctgtctgccaaatgggactctctgccctcagcagctgacgcacgatccttctaactacactgagacagaaatttcttaatggaagatgaaggagacccacattctggcttggtgtgctttagtacacttaccaaaatcagtgttcccttccaattccatcccctgctagcatttggatagctcatatatctccaccccttttccaactgatttttttctttgcctcccacacaagtcagctgagattactattcaactaaatgtaatttcatgttattaaagagccttaggttgagcataacaaatcccactttctttccccacaccaatcccctccctactatctcacagatatattcaatatagtgcaggtagtatcattgcagcttaccttggaagaagactctcccttcctgggtccaggaagtgctcccctcacagctggctgtattgattcagcaccacattcaggcacttctactctttccacagctcctaggactgactgggacacacccgaagctactgtgtactgtcctgagagtggccaacacactcccctggaacctttgaatctgtcacaacagaagttcaaaggtagaagttacctgttcaaacacttgtagtaacctctgacagtaagaaaagcagtgttgggcaaaagattaaaacaagagattgttatgcaatgggcttaagcgggaaaaaaaaaaaagacggcccttagttcagaaagctaacgtttaccaagagaaaccttcgataaagctctacctcaggggaaggagaaggggtagacagggctttgcatctgctttgggggcacaatccttgagactgtgataggaagaggaaggtctagattactagaagaaaaagggctccttgagatcagagtgagagaaaaatgagaagccactttaattggctcaagctataactttaggattcagactaagcagaggtgtgcatttgcagaccagctatcttctagaagggaccactgcccccttcagaattagaacgtctccaagacaaccaaatgagccaaatcagtctagagtctaggctgagagacaagcctaggacggttgtttttaggattcggaatcacgaacacagtctgcagcacacatagtttagcaaggcgctagaataggaagcattgcttcctggctaacacggtgaaaccccgtctctactgaatacacaaaaaattagccgggcgtggtggtgggcccctgtagtcccagctacttgggaggctgaggcaggagaatggtgtgaacccgggaggtggagcttgcagtgagccaagatcgcgccactgcactccagcctgggcgacacagcgagactctgtctcaaaaaaaaaaaaaaaaaaagaagcattgctactgcgtcatggctcagccatcctactctctccttttttttttttttttttttttttgagacggagtctcaccgcaacctccacttcctgagttcaagcaattctcctgcctcagcctctggagtggctgggattacaggcatgcaccacaatgcctggctaatttttttttttttttttgtatttttagcagagacagggtttcaccatgttggccaggctggtctcgaactcctgacttcaagtgatctgcctgcctcggcctcccgaagtgctgggattataggcatgagccaccatgcccagcctctctttccactttgaagttctctagtcaccattcttgattccaagatcattaggactgcaaggcatcattactaaacaaaaacagtgggtagaaatgaaagaaaccctggagatgatgtgcaaacttactgtataggtgaggccagtgaggccttttcaggtgaaagaaggcttctggaatcacacaaccagtcggtcaagacagcacctgactcagagtcatgagaacccctgcagtgccttggcccctatgctgccccattgatctgtgtatgtttagctaccagaatgaagccgcggaccctcgcagtgagtgttacagttcttaaaggcggtgtgtctagagtttgttccttctgatgttcagatgtgttcagagtttcttccttctggtgggtttgtggtcttgctggctcaggagtaaagctacagacctttgcagtgagcattacagctcataaaagcagcgtagacccaaagagtgagcagtagcaagatttattgcaaagagctaaagaacaaaccttccacagtgtgaaaagaaccccaggtggttgccactccgggctcggacagcctgcttttattcttttatctggccccacccacatcctactgattggtccattttacagagagccgattggtctgttttacagagagctgattggtccgttttgacagggtgctgattggtgtgtttacaatccctgagctagacacaaaagttcgccatgtccccactagattagctagatacagagtgttgacacaaaagttttccatgtccccactaga

SEQ ID NO: 913322 - DNA, 4001 bp, Homo sapiens
gcccggccttaactttattttttaagactctgcctctgatatagaatactaatcacctacacattggagctatagattcaattctacctttcagaccaccaaaaaaaggctgatatctcagaaggtaccaagccccggtggtagagtccctttccagtgcttattccctgagggtctccggtggtagagtccctttccagtgcttattccctgagggtctccggtggtagagtccctttccagtgcttattccctgagggtctccagtggtagagtccctttccagtgcttactccctgagggtctttgagattcaccttaggaccctcagggagtgggcattgggaaggaagtacttaggaattaagcagcacctgagacttaacctgtggccttacttcctaaaatacactcagctccattcatctgtctctcccaccccattggtctcattcatcagtcttacccaacataaaattgagggcaaacccccagcccacctcaggggagctatgctggatgctcagacccacaaaaagaggtctctgttttggttcaccttccccaagagagtcgagagaaggaaagtgagccccatgcatgccccacatccttccttcccgttgctcctcctgacacagggtctgaaggcatgaccgagaccaggagggagacagcatgatgtgcccgtggaactcagccggcccttgattctaagtcgcttaaagaaagtcgggggtcaggatgcccccttggcctctgtcacaccctcacaagacccccttgctgaataacaccccctcgatggtccccttaccctgcgagggggccgcatctctcagtgcttctagtgaatgggggcttcccggctctgagttcttcctgccacacgagtccctgtccttcttccctcgctcgtggttcctccagagacagggtggcttcagagcgtccatgcaggcagaaggccggcccagagtgtccccagttctgccctgctctgagctgtcccgagtcaggccatgtcaggctttctaacgtgctcggggacttcacttcctggttttaattttttttttcacaactgaaagtggaagtgttctgaccaggaggggagaagctgccaaagctaccctggctccgtgtcaaagcctttcacctcagcccctaagggccgacacaaaagccagcttgcctcaacacagttgaccctgccctcctgtggcctatcatctttcaactaagatgaaaacaaacaaactaaaatgacttgaggtgccccctcagatcagaagcctcacagaggcagaggtgacgctgttccctgctggattcggaggacaggaaagtctggctagagggtacctcagccctcagacccacacaaacaccttctaccccgcctctctccagtcgccagagctgcctgccttggtctctgaagaagttctggcaaagccaagaaaataagcaagtcaggaacgacagggctgtgagtcgttcaattggcatggtttctttccctctgatacagtcacacctcaaaacttaacttaaaaatcgattctttcgccttggtcacccccagtattaccaggacctgtattagtctcatttttgatccgcctaaggctgtggctacaggggggccctggagctaccattctcagattaggaagccgaaatgacaaattttcctgccccttccccacctcacagatacctcagaatgaagcagcactttctccagcctcgatcccccacgaaggctcacaggaagttcagcatgatcctggctctttgctggagctagattagggtttgttctttctacagagcagttcttaaaagcttcctactaaggaagccagggtgagctgtgccacagtctcagagaacacaagagctgagcccttggcctctggggagccgcctttggacatggaagaaagatgaagggctgggagacgaagtggggcctgtggcattccatcctctggctcatctcacggctggaggagcacttgtcatttgcttagtttcaggaactcagctccccaagaggcaacttcctctagaggagagcagaggatggcagagtgggtgtcgaatctcagccacactaatacctctgagcccttcaccgggtgctgtcttccttcaccaaagggctcagggccaggggaagatgaggttttatttcttttttttttattgacctcctccagtaaaaatgctcaagttcaggaaggttgagtcattctaaaggcccatcagagttgtattcctatcaatcctctgtgcacatgagtgacaccctcaggatttcagggggtaactgaaagctttggcaacccacaacaattctgcattattgggcaggctgtggaaactgaccaatcaagtctcaaattctagccacaccaccttggagctatgtagcttaggccatgctgtttaacagcctggagacgcactatgcctctgtgaaatgggaaggataccacctgctttataggatgagatacaccaatgaagtaacatacataatctacccagaacagtccccagcacctaatcgaatatctgctgattcccttcctctctgtctgccaaatgggactctctgccctcagcagctgacgcacgatccttctaactacactgagacagaaatttcttaatggaagatgaaggagacccacattctggcttggtgtgctttagtacacttaccaaaatcagtgttcccttccaattccatcccctgctagcatttggatagctcatatatctccaccccttttccaactgatttttttctttgcctcccacacaagtcagctgagattactattcaactaaatgtaatttcatgttattaaagagccttaggttgagcataacaaatcccactttctttccccacaccaatcccctccctactatctcacagatatattcaatatagtgcaggtagtatcattgcagcttaccttggaagaagactctcccttcctgggtccaggaagtgctcccctcacagctggctgtattgattcagcaccacattcaggcacttctactctttccacagctcctaggactgactgggacacacccgaagctactgtgtactgtcctgagagtggccaacacactcccctggaacctttgaatctgtcacaacagaagttcaaaggtagaagttacctgttcaaacacttgtagtaacctctgacagtaagaaaagcagtgttgggcaaaagattaaaacaagagattgttatgcaatgggcttaagcgggaaaaaaaaaaaagacggcccttagttcagaaagctaacgtttaccaagagaaaccttcgataaagctctacctcaggggaaggagaaggggtagacagggctttgcatctgctttgggggcacaatccttgagactgtgataggaagaggaaggtctagattactagaagaaaaagggctccttgagatcagagtgagagaaaaatgagaagccactttaattggctcaagctataactttaggattcagactaagcagaggtgtgcatttgcagaccagctatcttctagaagggaccactgcccccttcagaattagaacgtctccaagacaaccaaatgagccaaatcagtctagagtctaggctgagagacaagcctaggacggttgtttttaggattcggaatcacgaacacagtctgcagcacacatagtttagcaaggcgctagaataggaagcattgcttcctggctaacacggtgaaaccccgtctctactgaatacacaaaaaattagccgggcgtggtggtgggcccctgtagtcccagctacttgggaggctgaggcaggagaatggtgtgaacccgggaggtggagcttgcagtgagccaagatcgcgccactgcactccagcctgggcgacacagcgagactctgtctcaaaaaaaaaaaaaaaaaaagaagcattgct

SEQ ID NO: 913323 - DNA, 4001 bp, Homo sapiens
aagagctgagcaaaggaacaaggctctgcatggtgccagatgccatgcgggcacaaagagataaaaggcacaacgctagccctagaatcttactgggacccaggactcacacatagtgcctggtggtagaacacaagctaagaaaagcagaggagagagaaagcagcacaggctgggctgggaaggcagaatgggtggggagggcaccccaagagggggcacagctcagcaaagatgaaagcaccccaaagtccttcaggatacatgcctcaaaccttttcaaggagctttcacaatccttgctctacagaatttttgttctttggcccaaatgggtaaaaattaagtctcctaaacagaagtcttccctcttatctaaccctagatgatgcaccaaaggcagtaagtatattttgcacaaagacaatgaattactgttttgtccactttccttactcctcccaaagcgggtgatgaaggtggggagggccaggaaggggcctggggaggggaggagaatagaggggcaatcagatattacacatgcaaataactctcgctgctcactctccacacgcactggattctcctgcgggcaccaccagccccacttgacagagggaggaaatgaggctcagagagttaaaatgacttgctccagagttacctagccagagagtaagcaagtccactccacacagcagggcctttcaaaattagactgcttcctgcctgttttctcctcataactcaatactcttccctctgaccctatacctagccaaactgttcctgaatactcttccttctttccatgatgtctctattcatgtggttgttcctgcctagacagtctttcccttgtctttttgttgaaattcttctcattcttcaggatgcagtaaataccacctcctttatcaaatctttctaaattccattatccagaggcatacttatacttatttcctttggcacttctttttcagcactttgtggctatcatttgctttaaagaaaaacactacgcagtaagttcctttagtgtttggcttctaaaattttgtatgtgctagaagatgctcaaaaatgttggttaattagaatcatatctatgtgacaataatattactagtgataataaaagctaacttttattgagtgttttcagggtgttgagtcctgtgctaaacactttttattgattgtctcatttaatcttctcgacaacactgtgaaaaacacaccattaatatctcaattttactgataacaaaactaaggtcctagaaggcaaataacttgtccaagtttgcatggttatttagcagcagagccaggatttcaatgtagaaccatctggctgtcaagcctatgttcttagtcattttgctataatttcttttctctgaatttgcactttctagtgccagccatagatgggatatgaatctcatgatctttggacgctttaccaactggccttggccaaagtttccaaggtagaaaacaacaagttttaccttttccagctgggaccactgatccaacacatcctttgcaaaattaaagttctgagaaactgcttggactaggcacctggagtcagggggtctgatggtctgagtagcacatttttggtttggatagcagcaggcttcaaatcccagtctgaaactccggaccaaggagaagggttgaaatcggcctagcatttgggtcagacagggaaccacctaggtaaattgaggaaaagacagggagtaattgagcagctcagagggataatcactgagattgtagtgctgagaatgaatccataaggcaaacaatttccttatgagtacaagcaacagtcagatcattggagaagaagcccatgagcacagatacttaccaattccaagaggagtttctatggggggcttcagatgtttggaggatggtagagctgttgccttctgtctcctctgagaactgcttacctcttatagtttagttgccggctctggggaaaaaggcatttccttggtgccagcacaaactaagtcctggctcactttcattggctctcaagcctaaaaggcaatctcttttgcttctgggagataaaatctatgggctgtgagctaagttgaagcaacaggtgtgccttgctttctgatatgatgtcaggagaaataggtcacagactactgtgccaagtgtggtgaaaagatgatggacacagagtttaaataagattttgttgcttacaaaatcctgcactgcagaaagggagaagggggttgctcatcagccaggtgaggtaaccacaccctgcctctttaacccactgagatgacaggccttttttttttttttttttttttttttaaataaataggcacatcgaaggccctctagggattgcctctcgaggtagtgtaggtgaaagtctcgtactcaaggtagtgtaggtgaaagtcttgcaacaatcaggtagggagccagatctcatgatcctcagcggggggcggtgggagggtccaccttggagcctcaaattagcaaaactaaaatttgaaagggggtgtgtataacatatatttaaaagaggtcacaatatttgtttaataaaatattgaagatttattgttttgataagattttaactttatttataactgtgtgaggtgtaacttggttactggtggttgaagttcttcatcacaattcctatccatgtttccagtcgccagagggagtaaaataatgtaagctttggatgatgggttcacttattcgcattccagaaatctgagatttaatggtttcaatttgatgatattaacattgtaactatatctaatattagaactaaaatattccaataaattatctagtccaagtactgcctaaaacatcacgctgcctttaagatgaataaactccttattgtggtgcattggttagatataagtttggctgcttcaacaaagacacaaaatagtaaatttgtttcttcaattgacagtctgagcatatgcagtgaaaagctgtttgtattagtcagggttctccagaaaaacagaaccaataggaaatagagaaataaagatgaatatagatacagatatgtgagagggacttactaggggaattagctcatgtgattatggaggctgagaagtcctatggtgtaagctgaagaacaagagaagttggtagtgtggcttagtccaagtttgaaatctttagaaccagggaagccaatggcctaactctcaatttgaggctgaagggctgagaacctgaagttctgatatccaagggcaggagaataagggtgttccagttccaggagggggagaggtagatagacacacacacacacacacacacacacggaaagagagagaaattttccctttctcagcttttcattgcatctaggccctcagccaataagatggcgcctaccacattgagggtggatctttcccactcaatccacctactcacacaccaatatccttcagaagcaccctcacaggcacatcaagaaatgaatactttaccagatatctaggtatctctgaatccagtcaagttgacacctaaaatcatccatcacactggtttagtatcttcaccctttcagggacccagattctttctgtaacgttgctccaccatctttagggcatttctgaaacaacttgccatcacgtccatattccatccagtgggacgggagagtggtgaggggaagaacattccccttgcctaggtgaataactagaaatttttacacattacctctgctcatattccattggcgcagacttaagttatgtggcttcagaaagagtctgggaactgtgatctttattctgagtgcctatatgctcaactaagaactggagattccatatgcatgagagagatgtgggcatgaatactgagagacaactagcattttccatcacagtctattcattgactatccatgaacacaa

SEQ ID NO: 913324 - DNA, 4001 bp, Homo sapiens
ttcaaaaaatttgcagagataatacagagaatgcccatataccatcctccttatcccacttctttttgtgtctattagatgctcagagtgtgtgcacaaggctggcacgcccagggtcttcctcatggcactaacagtctactgaaaggtggaacagagacaagcctatcaacacctacaagactggtggtaagtgcagtgacagatgcaaaacacagggtgatggaaagccctcaggagggtaacctaacctagatttgagggcccaaacaggctccagaagaaaatgtcaactgagaggaagcctgaaggatgaacagtgggctaagcaaagggttattaatgtgttattaatgggttgaatctaattgggaagggagagaggttgcagagtgaggtgcagagcttggtggacgatgccaaaggaatactgaaacctttagtgtgtccagtctggaactgcatccaaattcaggttcagtaatgatgtcattatccaaacataccttctgtaaaattcatgctaaactacctaagagctatctaccgttccaaagcaatagtgactttgaacagtgttcaccagagcacgaaagaattacaagatttttttttaaagaaaattggccaggaaataatgagtaacgaaggacaggaagtaattgtgaatgtttaatatagctggggctatgcgatttggcttaagttgttagctttgttttcctcttgagaaataaaaactaaggggccctcccttttcagagccctatggcgcaacatctgtactttttcatatggttaactgtccattccagaaacgtctgtgagcctctcatgttgcagccacaacatggacagcccagtcaaatgccccgcaagtctttctctgagtgactccagcaattagccaaggctcctgtacccaggcaggacctctgcgctctgagctccattctccttcaagacctccccaacttcccaggttgaactacagcagaagcctttagaaagggcaggaggccggctctcgaggtcctcacctgaagtgagcatgccagccactgcaggaacgccccgggacaggaatgcccatttgtgcaacgaaccctgactccttcctcaccctgacttctccccctccctacccgcgcgcaggccaagttgctgaatcaatggagccctccccaacccgggcgttccccagcgaggcttccttcccatcctcctgaccaccggggcttttcgtgagctcgtctctgatctcgcgcaagagtgacacacaggtgttcaaagacgcttctggggagtgagggaagcggtttacgagtgacttggctggagcctcaggggcgggcactggcacggaacacaccctgaggccagccctggctgcccaggcggagctgcctcttctcccgcgggttggtggacccgctcagtacggagttggggaagctctttcacttcggaggattgctcaacaaccatgctgggcatctggaccctcctacctctggtgagccctctcctgcccgggtggaggcttaccccgtcttagtcccggggataggcaaagtggggcgggcgcgggacgcgtgcgggattgcggcggcagcggcgcacgcgggcacctgggagcggcgggctgctgcgggaggcgttggagactggctcccgggggctgttaggaccttccctcaggcccgggtgctcagaacgctggaggacttgcttttcttgggccttgatgcgaagtgctgaccccgctgggcaggcggggcagctccggcgctcctcggagaccactgcgctccacgttgaggtgggcgtggggtgcggacaggaattgaagcggaagtctgggaagctttagggtcgctggagggggaccccggttggagagaggagcggaactcctggacaagccctgacaagccaagccaaaggtccgctccggcgcgggtgggtgagtgcgcgccgccccgcgggggcggggagagagcctgcagccttcagaacagatattgctcattttctggcagttctcagacgtaggaaataagtcagcaccgaagcagtggttaagccggagggctcggaagaacggcaccttttctttctcgaaaaagttatatgggggctgaatgagcttctggaggcttgtttaccgttttttattgtcacacagaaaaagaaactgccttgtctcccttccgggaattctctctttaagactgtaagtcgctgcctgagtggtttcattttgttttgtttttctgcccttctctttcttcttttgccctttcttagcttgcactcccatggtgatttctgcttggtctcctgctggggttggtggtactcgttcccaccgcacagaacccggcgcctattattggccaagaaacttgagcagcctgttttgaaaagtccctcgctcagaaatgccagcttgcagatggctaatcaaagagacgtggatccaggaggctcatttgagtaccggagcctctgagagtccatggatttttattttattgggccccaacaaagtgccaggcatagcgagagaagtgtttacaaatgtgatctccgcggattctcacgagagccatgtagtggggaagataaccacatccccattttacagatggcgaaatgaggttcagagagcttcagtaattcagccaagatcacacagctagtaaatgggagatatgggattgaactcagatctaattccaaaactcaggctgttcgctgattgcatctgatatccagattacaccaagaggctgagatgtctgggtccattttatgattagaaaaaaaaatcctgttcctttcagaaatagtgtgcactatttgggattctttagaaacttccttggagaaaattaatgattcaagattgagaaaacatttatacaacctcaggccacactcttctctctcttgttattaaccattgcaccactgcaatgttggctgctttgaaaatctcatagtttttggacagcagtattagtaaagtgtaagaaaattgtcaaagcttggagctatgcttgttgaacttttgtaccaatagcacctttaccagaggctgcgtgtttaaagcccgaagaaaactttgcttttctgaaagaatacacacacacacgcatatgtaaatattcatacatttatgtatatatacatattataatacctataagttaggtataacttatatttgtatatgatatatggcctaggaaattaaggcttattaaataaaatttataaatgcagatgagtcaaatacaaagatcagacataactctatcacctaagtaatcattgtttacgttttgcagtttatcttccatttctcccctctaatatgactcttttaaatttagttacacagaaattggttttgcgctcacgacatgcctaacatcaggcctttatccttaaagaagtttcaacactcttgtgtcacctcatgtgtctacagaaaatgtttgcttttatgccttcacggttatgttttcttagtagtagcaataaataaaatagatgcaaagtgctaattacttggaatacagaagcaaattttaattctattaatgggctggacatagatgggtggggagctgttttctgcttttcccctcttcccctagtcctctgactctggtgataactatagtcaacaagtatccccatccttaaccccttttgcttctctttctctttccttctctcaaccttcctggtgttagttttctctttcctatttctgagtgtttttactccgacacttacaataaaaaagtttgaaatcccaaaaagttgacaaatttctaaaggagacagaaaaagagtcaaacttactttacaaattaatttgagaaatagctgtgggttgcattttttttttttattgtgcatgaccctgttattggccaagaaacttgagcagcctgttttggaaagtccctcgctcagaaatgcca

SEQ ID NO: 913325 - DNA, 4001 bp, Homo sapiens
tatagagattgggttttttaaagtgtttaaaataatttatagtggcagagatactctaagttctcaataaatactaatttcatcatcattattattactatcactgtgtgattattttcattatccagaactctttgtttctaacctttgctttctttccacactgctccaggcttagaataaaaataatcaacgtgtggattccacttgcaagaatggacatgggactcatgaatggcttgccctttcctttcccacccttcttttccctttccagatgctgaattattttggcattcctgtgatttggcttccctcagagcagattaagaagctttagaaaagaggcgagaactataaaggagaaaaaagggaagaagcctaagagcctggggtatctgtcagaagcagccagccccaggggataagcaggcactctatggatgtgctaagtgcattttccaaaccaaaagtaagggctgaaaagaggataaaacatttcaaattaggatggtctctgaaaatgggaaggtatggttaccatgaatgctgggatatttttaataactgttttgttgggcagtgatggcttgggaggaggggttgactatactcagaaaaaggagactggccctcagcatcagcaagaatgcagaaaaatgttttttacttggccaaaaaaaaaagaaaaagaaaaagaaaatctaggaagaatgttataatgtccaaaaggagcactgtcattgaagaagtcactgtgtccccggaaagagtcagctcagtggtttacagctcctctctaacctgaatgagcagttcggtttggagcaaagcatttcctaattaggtaaaacacgctcgagtgtctgcttttggaactgcacccgggtcaggggatttgctccaactgactagagtgcgtcttgtgccaaaaatgagttgatgggaggggaaagaacagtacagttcccagctcattggtcttgaaacacaaaccatatttagtcatgaaacacaaaatgctaggaaaatctcagcatgaaaactccagtctgggctgaagctgccaaaccttgatttgcagtgaaactcagcctgggttggcagggctggctgcacagtcacacttgcctcaccaggctgaagggagctttaagctgagggagatgcaaaccagatatccggccgggaggcacacacagctgtcagatgcaggctctgctccctccctctttctttccagagaaaaattcagcaggtcacctgctgcgctctgctgcaaatgaccaatgatgtagatccaaacttgtaaggtcacacatacacatttccaacaaaaaagagatatacatttccaacaaaagacactaccagttagagccagggaaacccagaagggaatacacaaattcaggcacaatcaaagactaggcaactattcttctgttcacttccaaaatccacttccagacacctaagctgcaccaaaaatacagcccagtgaaagaaaacccctacaacaaatcagaaccagaaagaaatctgagtttccagtgcctaaatacaaataaatgtataacttactgcacacagctaacctgcatacctgtattgtgctgcaagatctgggctgtttgtttaggatgaacattttacagaagacatgcattaataaaattttcatattcttctctaccccttccatcataccaaactacatattagccctgtctttaacgttagatcattaaagccaaaagctacaatcattttagtagtacaatcttcattcagaaatatcagtgcatgaacccagccaaatccctgcagatgatgtcttattataccgggtaattaaaagagccactggaatctataagtcacatccttggcctggcgccacttaccctgacagtgcttggctgggctgctccacactgggtggtgttcagggaagctgaaagctgaagggttatatagccccttggcctgctctcctcccacttgcttcccaaacaaggagcaaagacagacttgagcctgtcgttcagtctaacacaaccatatagggacctcagcacaaaactctctaatctgggtggccggaggcctgggtctcttccactgcattccactggtctgctcatgaaacgggaggcggttcagccgcctgtgggagataaacacgccaagccttcagaacaactgcagaaatgcccagagacactgagctagggtaatgggcagatgcaggcatggtttgcacattccacagaggatgccagcttgctatcatgctggaatttcaggccatttcctaataaactgagaacagaaaggggcagaaagggctgcctctgcctagcacggacttttaaaacccttctaccacggtagcatgcaaagaagaaagatattccttcagtcgtctataaatacatagagggagtgatgattttatggtaggcacactgtttataaatcaagttcttgagggaggtgagtggaaataggaattgaagtatggagacaaggttgacaggcctatgtcttacaaagaggaatttggatgttagcattactataactacattcatttttttggtgcattagctttgtctactaatttgtcaccgagcaatttagcagcataagtagggaccatcctttgaccagagagtctacccagcagcctgtcaaagaagtagtttggaaaagaaaggagattgttcaaaggaagcctctgtagccctcctctctgcccactaacctccttgacaggaagtagagagaccaggtgatatggtttggttctacgtccccacccaaatctcgtctcgaattctaatctccataatcccatgtccagagaaaggctaggtgggaggtgactggatcatgggggcgttttctcccatgctgttctcatgaaagtgagtgagttctcacgatatctgatggttttataaggcagttttccctgctcttgcttgctctctctcgcctgctgccatgtaagacacgcctcttccccttttgccatgagtttaagtttcttgaggcctccccagccatgcagaactgtgagtaaattaaacctcttttctttataaattacccagtcttgggtatgtctttatagcaatgtgaaaatggactaagataccaggtgaccctctcatttctcaaagatataagccctcatctcaagcatcaatgaatagcttcagtgattttatatttgtctactaggttctcactaaactcataaagaaatatttttgtgggtactgtgagtatttctggactgtggacatgtgagaaaaatcccaaaatgagtggctttattttacagccatgaccagctgttcactcatgttactatgtcagatctgtttgattaatggtgcccacacatatacatacatatatatctttgaagaattgcactattgattagaaaattttaaatagcttaagactaaatcataacaggatttctctatactgctcgggatttgtctagcttttaccaaccagaaaacacggccattagaatgttaaaatataaaatctacacagtacaacataaagttgggcatttggggttaattcattaattttcatcacaggaatcatgtgaagcaaaatttccatattttcttgagtaggagggcaatttgagtagaggaaggattccccttcctcctgcttttgactcacgcagtgtctgtgtagtccttgcgatctttatgaagtgactgttcatctaaacaccaaagagaagagtttttgcattcacttttatgattcttacatcatttctaccattagtgtacatccaaagctctgataataatcagactatgatgaaataaagagacatattggaagaggactcaaggtttagtttttcttgcaagattttttttcaaataatctatgacactaaccaggaaagacttataattgaaaataaatttctaaacaagtgattaaat

SEQ ID NO: 913326 - DNA, 4001 bp, Homo sapiens
cctccacccccccacaccaaaaaaagaggcgtctctgccaggcacggtggctcaggcctataatcccagcactttgggaggccaaggtaggagaatcgcaacagcccaggagtttgagaccagcctggacaacatggtgaaacccttcctacaaaaaatacaaaaattagccaggggtggtggcgcgtgcctgcagccccagctactcgggaggcttaagcgggaggatcacttgagcccaggaggttgaggctgcagtgagctgtgatcgcgccactgcatttcagactcagcaacagagcgagaccctgtctccaaaaaaaaaaaagaaaaaaaaaatgagctgtctcattgagctcaatcctgcccctttctaagggggaataataaaaacaaaatacccatggagagaaggaaaatttaatgaaaacaacaacaaaaatatattggaaaaagcaagcaacttggaactggatcttagtctgatgactggctcctcaattcctaaactggatggtttgaaatctgttatttaacatccctgcatacactggggatagtaattcctatctacctaacagagctgaagcttaaacgagaacattgtaatatgcctaaggtcccaagagctgaatcaacaaagggaatctgacagagtcagcttacaacagagggaactggtagttttgcctcaatggagggacctacaagggacacagacagggatcaatctctgtgggaccaaagctttgaatcgaaggcagaaatgcagtcgttttacaattttctcctttccccccaaaataagagcagtatttagattctttctattggtcaatattgatgcttctgcatggtggtgctggcaaaagggatgacggataaagtactggatttagggcacctctgctatgtgaccttgggctcacgttacgtcttcgcgcttcagttttctcatcggtaacacgaagatcaaagttccttttaaactatgcgtccagtttttgtgaggatccaactcgaatgtatgtgaaaacgccctggaagcgctagagcgccaggcaaatattaagtttggtaattttttccccgtaagaactaggcgttccaaagaggaggacaacctctctgcttcctttgtcactctcctttcttctcgacctttaccaactttgtaatttataatcacagtaatagctgacatcctacagcggtttctggcaccagattctcgggccccacccagatccacaccaccaagccgcagcgccggctgagaccgaaggaaaacttagccgttctccacccgcgggcgggcactcgcctctaggccccaccacccagagtcccggaagccaatccccacagccctggagcactgccccgccccttcaagagggaaaacaatatggcggcaaggaagaatggcaggggcgtgagccaatcaccgcagaggcctagcctcatccggcaaggctaagaggcggtatcattggctaagatggacagccagagcaaccaatagagcgatcggaaatgggggagagggcgggcgacgggaatctcacacagcggttaaggcccctagagccaagggcccaaggactggcttggactataactctttcctttatccactccagagttctccatcccacttttgctggctggccgccttgcctgcggactatgtgataaggggaggaaggaggcggcggtggctgaacgcgcctgacaggccgggccagtgacaaagagccggcggctcaggctgaaccccgggaagcgatcctttcgaggaggagagcccaagtccccttatagataggaaagacgcaactcacgttgtcgatcacgacaggctggttggcgatcacatcgtaggactccatggcagaggaatctctccttctggggaaggaactgcccagccgggtccgccgctagcgccactgacacgcatgcgcagtctagccgccggttcagggcggcgagggagcggcccgacctcgcctctgaagaactacaatccccagcaagctttgcgcctgggttagcgatctagcttgctttgttgcccgcctagtttaagattgggagtcgcatttccaatgcgcagtaccctgggatttgtggtctccctagattaaacagccagagacacaggttgatggtcatgttgcatgcctggatctgtagtccctttgaaggagttcgcagtgcatgctgaggtatgtagtcttctcgagtacttgtctgtagttcggtttggattggtcgtaattcatggatgtttggattttgcagatcagccctgccactccccccgacgttcccttagacaatataaggttctcatgtttttatttgggtctgtaagactttaataaacatctcctagcacctcacactctaacaaaaaggaaatgttaacacacgtacgcgagaggacatattcctacaacaaaggaaaacaatttaaattgcataaaattagctttaagtttaaaaacctgtacattgtcgttgccttttgcattttctttttttctgcataacaggctaacattgatccgaagattggcaattggaactactggtataggtaatcttttggtcattaaaacatcatctaagggtttcagaaactgctcgagtatctctttaattttcataacgagctagaattgacactgatggttgagaaaatggaggtgaagagaggttatgtgtcactgctttcaaatgagcccagtgcatttttttctctggattatgttctcccccagcccccttgaaatttcagggacctttttgtcaatagccctagaaaacattagatttattatcatctattaatactaacgccccatggatgaatgaatcaatccattgtcagatttatgtttaaatcctagttagcagcgcgtcagcaaaacagtaacaaatcctttgttggcgcacttctcgctgctttcgtgggaccttagcacctcagagggtgctcagcatctctaaacttgggttcctcctaacactagggggagaccaagagccttgggacactcccaacacagggaggggaggcggggcctattgtcaagtcacaccttccctgcctgtgactggcacagacattagccaatgggtgcttggatagggtgcgccggcgccccgccccccttagcgccccgccgccccgaggcaccctctggcagactcggcggcggcgacagcctgggcggacagtgcgccgtgcgcaggcgcggagctagacctcgctgcagcccccatcgcctcggggagtctcacccaccgagtccgcccgctggcccgtcagtgctctccccgtcgtttgccctctccagttcccccagtgcctgccctacgcaccccgatggcggagctgcggcctagcggcgcccccggccccaccgcgcccccggcccctggcccgactgcccccccggccttcgcttcgctctttcccccgggactgcacgccatctacggagagtgccgccgcctttaccctgaccagccgaacccgctccaggttaccgctatcgtcaagtactggtatgctctgggccgcggggagacggacaggcgcgggctggaaagggttaaagcgccgagggcgaagtaatttgtgggaggtgggaggaggggtagagaatggttaaagcactcagaaggagggcttcttgctgcgagggaaggagttaaggctcaagttgggaatggggacaaaggggttaacggagcccgtgggtactgaggggttaaccgggattaggagaatagagtgaggactgggggtgtgtgtaggagcagaggggggaacggcaggagcgagggaactgtaaacgtggtgaaaagagggggcgcctgtagggggtcattagtgggcgaggggaagccaagcgggggcggccgaagtgggatgggagaggcgaggcggggcctggggagcatttgagagggctttggaggagcga

SEQ ID NO: 913327 - DNA, 4001 bp, Homo sapiens
aaggaaacactctctctaccaaagctgaactcataaaatagtaaaagtcctcccccgcccacacacacaagaaataatttcccattattagctggatttaataaacattttcttccaaaaaaaaaatttgtccctgctcagtagacttctctttatgtgtacaaagcacgtgccaagttaaagaccatgtcaggcacactttgagacactttccgttttttaaaaagttctttcttaataaacattcaaaaggaccaatttgtttaaaagtctttcaaagcacaattcactacaggtcgtagagttctttaaaccctcagcaggattctttcttgactttctcattgctttgtgcaatctttgtatttaatcatttatccccgaattggtcttcgcagtgtggcttttaacaagaactgggttttagccacattacagtagacgcggtgggggcggagggcagcagtggcaatcgcaaaataaaacgtatcataaagtggtaacggttcgtgatttaggccagttgttgaaaaataaatgcctgttatatagaatcacagaacttgagagcttgcggccaagggaagtcgttcatcggtggaccgacagcgccccgggcggcagaaagaaggcggcggcggcggagacccggggaagttgccggatttttaaaaaggcacctgctgggtgagtcctcactgtgcaaacgggagccacaggtgcccgattttaaggggctacaactcgggaaaacctaagtctgtaaaactaagtacgttaaactaagtaagttctcgctgtgcaccaagttgatgggggcgattatttacggcggagaaactgagtggaggaaggagggagaattccgctaaagtttgcctgcgactgacagctagggagtgacctggaagccaggaagaggggcagagaggaaactaaagaagtaggtaagagagtcagtttatgaaaatagagcctgctgtggagagcagcaggcacacctgcggaggagggggctgcctcacctgcggggccgctgcgcgcccccctaagtgtgttagcgggggaggcggggctggaaaggaaacctggtgaagggctggcccggagcctggggtggggatattcactgcgggatagggccagcaagaggacccgacacgcatcgtcccgagtgacacgtgtaaatgtcaagatacagagacatctgcaaatgtcacccaagagggtgaggacgggggagcggtcccgaggctgtgccctccggggcaggtactggctcctgtggggctgcgggccaagtgtcgcccttccccaaggaattggcacctggggggggggggtcggtctcgccgcgctggaagcgcaagccccggggctccggagatgcgccggggcgcgtcgcccctcggggcagccctggacctcggcgcgcccaggcgcagcgtgcggtgccctcggcggggcgggcagcgagccgccctagttcggcgacttacctcgggcctcgcagggcgcgagcagagcaccggccagggcgagcaggagggcgcgggcgggggacacgggcagcgggcgcgctgccatcgtcgccggccttcagtgcagcagctctcgggcccggcggcgagcgctgcaccatcccacgcgggcgccgagccggggccgggcgtcgcgaccggagggatttcctgcctcggcgagtcagctccggagccctcgcgcagcgcccgcgccgccgctgagctcttctagcctttcatttttaaaaaagtttccccccgtgtgtgtgcgtgcgtgcgcgcgcgcgcgccgttctggcacaagccagccttgaccgttgcaataaatgagcaaactgtccgagttggcccggggactaggaagagcgttagtgagagaaggcaggcctgtgaaatggatccacggccagcagtcaccgttcttattaccgcggaacaaattattgtctcccccgcacccccgccagttggcggcgtcccgcgggtcctagagaccgctcgggtccccccgccagggtcccgccccgagccgcggctcgctcacccccgagggtgggcggctcagacgtggctcagtggcgtccgggcgcccggagcgcacacgtccccgccccaggatgatgtggccgcagggcccggggcgcccggctgccaagcgcacatgcggcggcacggtccagcttttcaggctgaagctggaaacgatgactctgctactcgctccccggctctctgggaaccctcggagtgcgggtcaggtctccaccgcggcccacagcccggcgcgcgaccccgcccggccctaagcgcccaaaggggcatctctcgcccgagaaacaagcttggactcgcaggcacaagacacctgggcgttacttttgatcaacagtgttaggttttacgttgatagattggctcacgtttccattccatgacctggacccagaaaagggtgtacagtgacgttccccaaactttcctgattgtaagaagcacctgggttggcttgttaaaaagattcccgggcgccctcctacgctttcagaatgagactctccaggctgtgaggccaggggagcccagggtgtttggagaaacaccaatgaaagaatggtgcgccttgccttctcatccttgttccgggctgaccccacctcttcagcctcgctcggccctcagggagaccatgaaaagcagcagcgagggggcccgcacagacagaaatggctggagctatggaggatggctgatgcccaccctgcgggttaccatgattcccaaccttggggacttattagaatagtaagagttaaagacattgccagccccagacaccagttaactcagtttcccacaatgcgtggagctcaatagttttcaaagcctcaggtgattctactgtgctgctcagacctaggaccacctgcagaaattccatcctggtcctgcgacctcgcaccgattcctgacggagcacccactcctaggaggcggttatccagcatttgaggaagctgccttccataccatctcttcccactgcagaggagttttctcaggagttccctcccacggcaggttttgcagtgttcccaaaacccaggtcgatcctcctaacaaggtgcaggactttctttttaaaaaaccttagtgggaagcacaggctctccagcccccttcccaatgctgccatatctcagtaccagatctggaaaccaggcctggttcaagccctgtgtcatatctaaccgtactaccaaccagcgttgcagtgtacttcttttgttcattcattcagtcaatctacatgagcaaccctatgttagaacttgggaaactaaacgagaaagcctcttgccttcaaagacttttctttctgatcaaactgataaatcatcattattggacagtgtgagctagttacttaacctagttaataatgattaggcttgtttactgatatggtttggctgtgtccccacccaaatctcatcttgaattcccatgtgttgtgggagggacctggtgggaggtaattgaatcatgggggcaggtctttcctgtgctgttctcatggtagtggataagtctcaaaagatctgatggttttaaaaagaggagttcccctccacaagctctctctcactttctgcctgctaccatccatgtaagacatgacttgccccttcatgtcttctgccctagccatgtggaaatgtaggtccattaaacgtttttcctgtataattttacccagtcttgtgtatgtctttatcagcagcacgaaaacagactatttactacttcataattcattacatacctcgtataatcggagtattgtgctaacgtctttcacctgcattatttcattttttaagtcctgaatatacagatgaggaaactgcagcatagagatgtagctttcccaccaccacacagtgaagtaggtcagagcccaacctcagatctgttaaa

SEQ ID NO: 913328 - DNA, 4001 bp, Homo sapiens
ctggatgagcccagggcagcgggcaggtcggtagtaggttccccggatgctgaggtaaggacagggctggggccggaactgccctccctggaaacaggtgcacacatgcatatgccgtgcacatgtgtgcacacccacccactcaggcttcaggaatcaccctcgggcagccccagtcggggaggggggcattctcagtttctagccctgggaaacccccgccaggccccccccccaacacaggaaggtgtgtcaactctgcggtgagccagcgtcacttctcaaagaggaatttggcttatcagcctcgccaagtgaaactggggaggggcccggggccagcacaacctgcccctgctcccttccaggggtccatagagctcctgaaggaacgaggaggctgggagccctcaggcagtgctggagggaggaacggagatgggccccagggggctagagctgtacagggcagccccagacacccactggcctctcaccactttctgtaagctaaagctcctttcacaaaaataggctcaggggccagccagggaccctccccaggccagcttagactcaccaagtgggagggcagagctcggcggactcgggggcctggcagacgccacggcaacacgacctcatactgctccatgagggcccagggccggctgggggcaatcgctgcaggagggagggtcagcaggcatgaggggccggggggcaggtttccttcccagaggcctcctgggccctcagattctgtctcttgctgggcttgaccctcccctggggaactcaccagatagctctgggacaaagactcaagtgagggttctgtgcctaaaagaccccaggagcgcccccaggcatggccggtgggcctgtgtcctgcagcacccacacacagtgctcagagacgctgtgggtgccagcgggtgccagtgactccacaggtctccaggctgtctcagatctctggaggggcccgagggcaaggatgaaccttccccccagggaggaggactcgggccgccgacctgcccgtttccattctcctcctccattcttctgatcatctgatcgcatctaactggggagcaggaagtgcctcccggaggctgttcacctcccaagaactggaaactccctggtatccgagagcagagggcagggtcccagcatgcaatgggcagggtttcggagaccaccaaccccaggaccctttgctcccattaaaacacaatagtggacgtgtctccatgaccacatctccaacctggagaggcagcaggggagcagccagcccctatctgcccaggaaactggcgggaagcaacccggcctccagcctgaagctcctcagcacaccccagcccaagtcactccaggagcaggggtgggatccagggtcagcagccccatgtcctcccccaggcaggagacgggtcccctcagcccacacccctgcactccaggcctcagcttgtctgccctcccttccctcctcggctaaatagtgggggtgggtagccccacaggtgaatcccaggaacccagggcgcctcgcgcagcaggtgaagcgtcctgcttggcccggccccgaccccactaacaagctcagaggcgggacttccctctcacagttcacctttgaaggttccctccgacctccccggcctccccggcccggggctctccacccagagaccactgtgcacctgatggcccgctcccagggaccagcccgaagccgggccagggtgcggggtgcgagcaggccaggggctcggggtccgcgtcgcgtcctgcggggagagccaccctgccccgcgctgcgcccgggacggttccctggaaccactcaccaggcagcatcatcgcgcccagcagccagagcccgaggccgcgcatggccgggtcggggagcagaggcggaggtgacagccccgcgggacacggtctggttcctgcgctcctggcccgaggctcttttccgcgcgccccgccccggcgccccgcagccaatgggcccctcggccggtgggaggggcggggcgcgcggcacctgggggcggggtccgtttcccctctccccacaatccagcatcctcccttgcacaggtgaggaaactcaggcacagcctgtcccaagtccggccagagccccgagagggggcctctcgaaggacccggcggctggaaggaggtggcgccaggcaggtcctggaggggaagggacttgtgagggccgcctggcggtttcaggagagggggtctctgatttcctggggaacagaaagcctcaggcaggggcaagtcatggctttgtgggcataggttcagccctgtgggaagctctgccaccctcccccccaagcctgcgccccctccaccaggctgaggcctcaccggagtgggataggcatgggcccgcaggcgtccaagtggggagggggagccctaggtgggggtcccagcccaggtgatggcaggtgcaggggccgtccctagcctaagatccccagacagcagctgacgctggccgacgtggaccaaagcctgcagcagcccaccgtggcctggctccggcgtctccaggcctgcggccaagcgtgcttgcccttggtgaccacattccccgtggtgggctcagcctcgagggtgcaggtttgggctgacaccacagctccccagacggtccacccaggacccctccctggggctttcacagccaggccgccctcctggagtgggaacagtggtggtggcaggaaaggcagctcagatgaccacacagggcgctgctgacagatcacatggggggggggggcctcagggcctccctggggagaggcagggcagggccagcaaggggctggagggagtcctgcctggagagagggcaccagggcagggcgagtcagggaactgcacgggcctaggggcagaggacagaggtcaaggggcagtggcaagaagaggccggggcctcggacgttatcctgggaggacagggaacccggaggatctaagctggcgtgagtgatgctgtcacattttgtctcaaagccattcttaccctaatgtgaatggcatgaaaagcaagaaagcaagggctggcactgggccgcaggtgacttctgctgcctgggggtgtgtccgcttgcctgtgtggcacaggacgaggtcccccaggctgccgagaggctcccaggtagggctggggatactggcctgtgcctgagctcatgcaggtgaccctgttattatagaacaatggccagctggcaatcacacttcccttccttgacctcatggtgcaagttactcaacagcaaagtgcaaaggcggcacgctggccacatcagaggcacagcaaggcccctgccgacgctgagctaccagggatttattcctaaaaagacaggaccagcttgggccagaacaggctcctcccgcgctgaggaagttccacccaatcccacagaacacagctctcctcttcagcaggtgccggggggtctgggagcctgaaccccacagccctggaggcttccctcccctcctcctatcaccacctgcaaaccccacttctcaaggcccagggcttcccagaccccaggacacaagatcaggggtttctgggcctcggggccaggcaggaaagctagcaggctcctctgctcaccagtccggcatttgcacaacactgagactgacagcttgggttgctgataaatgtgtttactcacaggccagacctgcacagcctgcagacaaggaggaagcggtttgtggctggagagttggacacccccacccccactcggcggtgctctcagtgaggcagccccgggtgagagctgcccacaacccttgttccccgcaggatcctgttctagctatcctttctcccaacctcgcctccagggcccttcctcactgcccaagggggccgaggtgctgagagctgaaggtgacaacaatacacatgcagg

SEQ ID NO: 913329 - DNA, 4001 bp, Homo sapiens
gacattgaagtagagggagtggcgccccaccctgccaggccacagggtccctcctgggtgcagagggctgcgagccacccggaggtgactggagtgtcgtggtagtgtgggtggcgtgtccactaccatgctccctgcagaggctgctgctgggccagacaccacgtgggagaggaagcgtccccgaaagtctgtgctgcagggcactgtcacaccatagtcactgagctttccagagaggtgcagctctgttggaggtaaacaaagagtcacttcaatgcagtcggttcagaggtaaggggaagtcagaaatcccacgcgggcagggagggataggaactctcagtgtcacccttaggtgggccccttagcctgagttcacccattttccatccattgcttcctgagctccaggattcctacacttggatgaagggtgttcgggtaccttgtggcactccctgtagcccccaggtcctttttaaacttagcagaagaaagcaaatgataccagacagagcccggtcactagcaacaagacttccgaccttgggctctgcccagaaaaggactaaaattccccaaaagccaacagggcaaataaagggaagggcagatctgcccaaactccccagtgtgctgaagtcaccagcccaggctggggtagtgccctcctccccaaacttccaagaacgcagctggcaaaacaaacacacctagaaacccaggggaccatgggcacgtgtcaaggagaaggtggggctgcagaggggagcggttctctatttttccaaggttagaaagaaaactttttacaggaggacagtggccgctgagatctctgtatggccgagccccaagctggataaatatagatcttcaaaaataaaaggatatacagggggtgacctgcccacttgggctgaattaactgtgaggtcatggccccatgctccaggccacatgccagcaggcccatcctcacgcagctctccttgagcccagccaggctgggcaggaatgacagctccctggcttccaggcctggtgattcatgaatgcgagtttgggaggaattttcatttccacacagctctacctctcgtctccccagttcacgtcactgatgaaacatagaaagtggtgtttcctgaaaatcccccatgcccacagctctagtttcatccccattatagcagaggacccctaagactgctgcaagaggggacccactctggcacatgaacaaggctcacaaacaaggagggaccctgcctggaaatgaccggtgactcctccccatgttcagagccaccaggagggtaccccatgctgcagggcgggagtggagtgtatctggtctgtatgcaagagacctgtgtccacagcgtttgacagtgctacgttgggggcagtggaaggatgtgtgtttctgtgcaggagcgtgagtgccccgcatgctctgctgtaggaggcaatcacctgttagccttatgctgggtatgtaacagccacacacagacacacacacacacacaccccttgcacccatgctcacacaagttggagacagaaaagacattgaaagagaaagacacacaggacagagaaacagattggggaagaggggaaagaagaaacacagagagacaaagagacagatgcgctgctcccgagaagagactcgatgctcccaaattctctcctggggtctctgtctacttctagtaccagaaagggagagaaatcacgggacagtgccgtggcacagtggaagaaaagacagcaaatcagcccagagtgtgcatactgcctcccacccgcgggaaccctgcccgggtggctggggcaaccttgggccaccctgaccgcgtgcaccccggaccccacgggcccccgcgcgcccaacccgcacgcacctggggtccggctgcccgcggcggcgcagagcgcacagtgcaaaggcagcaggtaggacagcagcgcgcggagtggagccatgtggccgcgctgggacgcgggctgggcaagcgcccgatccccaagtcccaggctgagggcggcgaggctagggtgcgccccgggctgtcggagcaccggctggctgccgccgctgccgcctcagccgcctccccgcctagctgcttccctcccgcctgctccgggtcccctgcgcggcgccgccgcctggaccgctggctccgggcgcgcgaggctgccggctggagagcggggccactgacgcgccagcgcacccggtgccaactgccggctggtcggtcagcccgcccgcgcagtgacgctccgggactccgcgggagccgggcgacggggcggcgggacgggccgggggtgggcacactgggcggggcggggccgggcgcgggtcggagctggggcgccgggcgcccgggggcggggcgcgcggctggggagtgcagctgcctgcggccggggatcggaagtgccacgcggagacagagcaggggttcctggcgcacggaccgattgtcccctcagacgcctgggatccccggagtggtggcccaaagccgctttctatggctgctccgccccctttcttggccgcagggcctgctctctgtttctgttccagagccaggagcccaaggggtgtccggctgcatttgggagtgtggtggacagtgaacctcccggtagagggagactccctctttctttcactatggtcttgatgccctcactaaccatcgaccccttggatctacccattttccagactccagcccagggtgcacgactgacctgtgtcctagccaagagcagggctgagccggtgaggagagagccctggcttcagagtcagacagccctgattgaaatcctagctctgagcctcagttgtcttatctgtgaaatgggtgttaactacagcacataatagatgctcaataagtgataactgccctccacttccatccctgacaccagtagcaactgtggcatcccaaggtggaaagaaccaagagtctgagagatgagcacttgatgctagtcttgcaatggtgttgagaccaggtcaggagtcagtacaaacaacccaacagaagatccatgctcttgctttactctgtaaatatgtaactaataacttgcaaataaactatatttcaagcaatccaggggtgggagttgtggaaaggagatttttttgtaataaccatggaataaagaatcttggaaatgatgccaaggttttggaggaccagtgcatttaagaagcaggttcagaaagctaaagtatattatattccaagcattccaagctacatcagagcatccagttatttggaaatgccacaaccaaattgatctatattaaattcaggaagaatagagttcctctttctcctctttctggtcttttaagatgtgtgttggctgcgtgcagtggctcacgcctatagtcccaacactttgggaggctgaggcggaagggttgctttagcctgagaggctgaagctgcagtgagctgagcttcagctcacaccactgtacccagcctgggtgacagagcaataccctgtctcaaaaaaaaaaaaaaatgatgtgcaaagtcaaggtccagacaggattctgtgtgtgagggatgacagagcaagaaagttagagggtgtgtgtgtgtgtgtgtgtgtgtgtgtgtgtgtgtgtgagagagagagagagagagagaggaaagagagagagagataggaaagagagagagagaaagagagagagagagaaagagagagagagagagaaggctgggagatgaccaggctggagcttcacagctctggccctctgcaaacccaagcccaccaaatgatctctggataaaatggcttcccttctcagggtctcagttttccaagctgcagagtgggaaccctgcgggacagaaggaaaaagtcatggcgtaaggattgccccttttctgctgtggggccatctcagaaagactcccctagaaaac

SEQ ID NO: 913330 - DNA, 4001 bp, Homo sapiens
aatagactaatcaaaaaatattgggaaatgtgaacatttcaagtgtaaagatgatgcttcctttttcctcttttaaaagtcatattcattattcaatccggtgactttctcaatatcaatgccactttgtgttggcattatctttggaggacactaacaggtctgtttcaaaatgataatttcaaacaacaaagtgaatcgcaagcgcacacttagcagctgagaggtaaatgagaaccacaacatcacctcccttctgaaaccaaaggctccaaaaccttttgaggaagttgtgggggccaatccctcccagtggtcctgacgttcggtcataatgaatgactgtttgctattgacatttatgcctgctgactgtctggataatttctattattggaagaggcaataaaggacctggtgacggttcgagggcacacaggaaacggtctggtagaaacttatcttaggccaatgcaaagatgaaaattcttcaggaaagatggacaaccccaaacacacctaacgttgcctcctgctttcaaacaactggcaaagctgatcaattctagctgtgtttttccaaccgttctttatacttctacctcacttaaaaaaaatcagcacatttcaaatcatgattagaactgaactttctcctgcaggctcactaggaactgacaataacacaggttcctctaggagagaagggtcggcatgagaagaatcttttaattcttcctggcatgcacacaggctacgatggcactgggggcattgctctcatattggagcgattgctaattttgcaaaatccccagtgtgaaagccctcccttgctgtagcattgactaacttcagcgcggcccagccccaggaatatcagtaacaaggcacagctgagtttgtcagtggccgctgtcagccggctgcttttcctgctttcctggtttgcggtttttttctaccactaacaaaatatgatgcttctttctgttttcctgtattcatttctgcttatttctccaaggacgagccctgtgttctctttacgacccaatgtttacaaatcgacgggcaccacattgagtaaaaactgccagccaatttggagaggcgatcgcagggcttcgcctatcccttcctccgggacagtttggatgggagtagctggcgcgagggctcgttcccccgtttttgggtaattcctttggcactgggagacgagatggcctccggagggtggaaggcagtgccagcccggccggccactggggactgcggggcccggagacgcgcggggtccccggggagctcctcgccgccctcgccccacttcgtccgggtccctcaaacatgtcgcagcgtggctgctcactgtcccctctgggcaagaggaggccccagacatttccacgggatctgaactcccgagcgccctgcacggagcagccatcccgccagcaccccaaagtgaagctgctcacaacggacaagcccggagaccccatgagaggccggggtggagaagccgggggtgaaggggggcaggggccggcgcgccacgcggtccttacctttccgcttggacctccgcctcctcctcctcttggacttgcatttgagttgactgctcagccctccagaccctctgccgctccccaggaccgaggccatggccgagacccaggcgcggagcccagagccgcctccctcctgcacctgcacctgcctccttcccggcagccgccgccgccgctgctgcgaagcttgaggttgcaaacccgggagcggctcacttttcaggactgagcaggaaagcgcgctccgtctctctgtctctcgaattgttctctatgacttgctcccactgggctgggggcctcggctgggcgcctggagcgagctgctccctggtcagggagggcggggaagggcgcgcggcgtcctgagtgctccgagcttcccgcgggctctgcctcctgctctgggctcccagcgcagggaggctacttttgcgcctctgctagttgtttggcaccagccactttgaagccaatcacgcagggagcttgtctatttgctgcagcagcgtctaattagatccaatcacaactgctttctggctctgacatcagcagcagcaccagccgcaccgccgcctggccgcttgcaaactcagctcccgtttggacggtgaagctcccaggaccggcggctggagggaggctgctcccggggaacaaggacgcggcgcgggtgcgtctgggagagaccgggggagcctccaggagggaccctgcccgggaggacgaggcctcctgccgcagcctcgcggacagctcagctcgccctgctcagaaagacacagggacgggtttttccaaccaacagtttttaactagtcaattcattaccatgctccttgtgtcaagggggggaaatacctctttcagaaatgcagagaccgcacttcctcagaaacggactgaggtttgcaattccccaggagacagcgtcctgaggggcatttattcctcagagcctgcatgcttgtctgtttgcctcttctttcccctcttcatattccttggccgtttccaatgcaaaagataaatcttgcataaagacagaggttttgggatctgagtctgatttttgccgtcaggaatttcatgtgttgctttatttagggaacaatgacacaaaaggaagagaaagctctcagcggagagttttgttgccaaatgtaatatttggatggaagaaagtaacatttacaaagaggtggattgcacactgaaatagttttaagcaatttttttttccaggaatgtcctatgtttcaagattatacttatggaaccctggaagtcttatgtaaaatataaagaggaatagaatctggtaatcatcattgcatcttgtatttaaatcacataagcttttaattacaatagtcatgtttttaaaaaaatccactctaaaattcattagcacacattaacatgttgatataaaaatggcacacaaatatttctgctattcattgcctcacatgcaaccttttcagctgcttatgtgcctagaaatttccagataatttttatcataagaaaaaagaatcactctgggggacattggaaataattaggatgatcctgtgttgttatgtgctgagctgatagatcgtagctcagttttcattgatgagagagagtaagacatttgatttcaaatcttaactctactgctatgacctcgggtaagttaaaccgtgcctcagtttcctcatctgtaaactggggataacaacgtcacccacctcataagttcattcatactcgttgaatcagtatcaaccagtatagacaggaactggaacatgttaattactctatgattatttattaaattttttccagcaaataatttggaaggaatgagcgtatgttgcagacaagcctcagaaagacagggcttctgcgttttccttttagaatgttgaaccttctagtccaactcagactgaggaccacaatcaaaccaacatccctcttcagggctggcttcaacaaccctgttcccatgacagcacagctcagctctgctgataattcccagcgagggttgagaaggcacatagctctctcacttcctctctgcaatacccgagatatttgagtgcttaaactatatcgagaaacacagctctaggactctgcctgtgaaacttctgagcttcacacaatgtgctgcactaatccagagttgccctatttctgtatctgcagaaaacccatcagggggtggagtcaccgaaggaaggtgcttcagaagagcttcacacacacacacagcccccacaaggtggtcagcatttattaatggccccaatagctccatcatcacacggagcaaccgtgctgtctgggagactcgtatacatgaacccttgtttcactccaagggcaggtatggtggccggaaagtaacgtgtctgt

SEQ ID NO: 913331 - DNA, 4001 bp, Homo sapiens
ttcccaagtgtcatatgatcaactatgtcaaatgttcaccaaacatttcctgatatcatatatgtaaaatgtagcaatacattgaatgtctcataaccaactatctcaagaactccttcaaattatgtttaacattcaaaatagatacacccgtttcttctttaaaaactattaccaacatgccagcacttctgggcaccttaagtgttatcacagactgaactcttcagaaagatgaagagttaaatgtagctgcctttattttatcctggtcctccttccataaagttaatctgctccatttaagcaaaggaaaataagttataatgcaagtacaatataatggagacttcgatataaaaactttctacaaatgctccatttataatgttccagttatttatagggttaagtaacttaaccctataaatgggttggtcccataacttaattacacaaatatttttaacagtcaagtatttaacttgaaaacgacaaattgcactgtactcttattttttcaatctttaaaaacactctcactaggagtcttctaaagccaaaattaggaacgtaccctgcactatgtagtcagaagccattccaagaaaagcaaccatttaatactgctaaatctaaaatgctacataatttaacgtaaacttgcacgcacgtgtatgtagctagtcccataccccagaatcttatcaattccttccccaaacttgcatataatcctccctcaaagcctcttggctaagttaaattccttaacactctaccaggttaattgcaacagcacatgtgccaaggaaattagtggttttccttgcgctcccattttcaaccggcacctacttgcaattaaatctctgcaacaaaaaagttcacctgaagccgttcttgccattttaaaagaggcccagattatgctacctgtctgtggtcttgcctaagctataatagcctacctccaaagaggctggacgtgccccaaacaccagcacaccagacctgctgccaacttcgcttgtcacccctagcaggaagctcaacctaacatgtatacgtttgtaggggcggtgtgtttgtgtgtgtctgtgttggggggtggggaagcggattataggagaaaggtgactgaacactttcaacttgtaacaaaaaaaattttttttaaatgaggagaaaaacaactaaaaccaacattcgctccctttcctccaccttttctaagcgcaggaacctctcactcccctggagcgcaccttcagggcttaaggtccccggggtcacctaagcttcagccagtaactgattttggtactccccgccttcctagggaaaaccagcagacgcgcgaagcgtcgggcccacccggcggcgccgcaggccgtgcaccgccacccccggaccctcccccgcaggtacgctcccctctggcctggccgtggtccccactcccgccccggaaaagggttcacctgaggccgcagggacagccaatgagaagtccccttggccccgccagccgccgctccctacccccgcgcgacccccagtagcgtccccagtgctagcccccgcgcgggtgcccgcgtcccggcccggaagagaggcgggacgacggcgcgtcctctccccgcaagattacctcgcagcgcgtagccggctttgtgtttcccctccctccttctcggcagccgcccgggctgcagcagccgccggatccgccgctgcggccgcctcttaagcgccgcagagccccagagggtagggcgggagaaggggagggggcttgaggagggagggacctgtacgccgagccctgtgcagcaggaagcggcgacacctgggatgccgacgcctctggcgcttgctctgtgttttaaaaaatctaatttaaacccctcttctttccctcccgcccctcacactggcgaccgttacgggctggcggctcgcgctctggcgggactagccgagcgcccctcgagcgtcccttggtcccgccccctaacgccccgcccctaggtccccaagcgccccccccggtcacgcccccaaggtccgcccctcgcagccccctacgcctctggccccgcctcttgggctccgaagcctcccggccccgcctcctcaagacctcgcctctggcagccccgagctctctctggccccgccccgagcgcccctcgggagtcctggtcccgcccccgcagccccctccgcgccctcaagctctaagtccgtgaagccgcagcggtgggggcctgcaggcccggcagccgggagggcctggttcggggcggctgcctggcgccttttcaacgtcctcttctgactgtgcagctcgaatccgcggcgtccccggagggccagagggggaaacgaccccgatagaaacccgaccgcgaaggggaggaggggcgcctcggaaatgtctcccgccctaaatgagcgagccccctactcctactcccgaggctgagccgccgctttgagtcagcctcggccgcccacgctggctgctggggctgtaggaggccactgcaaaggttcaacctccgcacgccccccgtggggcctggactttgctctcagcacagctgccttcgcgggcgcctagtccccacaacccctgcttcacctccacatagggggaggacaggggctctcgcttctgcttcatttggacccctcgagagtcttcactcccgctttggctcccggcctctgaaccttatgagagctcacttctttgaggcgaaaagtcgaggcatcgccaagaaccttcaaaatgaatgcggggccgggcaaactttgcaacacgcaattgcagggctgtggatccatccacaggtgacaccgggcctcccacccccctcgcccagacatgtttctcatcccaacctattcttgaaatagacctcccagcggtgcacacttttctctgccacccacgacttccacgtccctcctgcaccagtacacttgcaagcacacccctccgagcgccattctaatgattcatggtcccttgggccaaccccaccctaacacacacaacaaacttcgttccccacccttatcccccttcgtttccaaggcactggcgacaatccacttcatttcctttcctcatctgcagactcgtccccctcaaatacctcacgccatccgcctcatcttcatcccccccctcctccctaaaaatgtgctaattaaaatgtagtttcctcttcccacatatgaagtgtggaaaatgaatcttgtcttgacacaaactgtgatgcatttatcgttttctctctccactggactaaggctgtagaaattttagtctaccaccatctcccatttgctcaaaaaatccaaccatgccttattatttttaaatactcttaacgaatcgtggggaaggctgcctagtttgaggaagaaaattgtttagaaaatgctcagcctgacattttatttggtatttaaaaatatctgcagtatttgagagagatattgggagtggctggatattttcttgcatttaaaaagcaaaaaaatgaaaagctttgcatgcatcaaggttagcctttttatgaatagcaaaaaaagtatcctaagggcacctatcagaatatagtcctcactatattttgctagtcgcaaatctggacacccccaccaccaccaaaggaagacaaattaacataatccattttaagcatgtctgatgaacagtcttttccatgatcattccttttctcacagtttctggacaaaatagctagatagatctccttacccaccgaagatccaaagcttccttctaacaagggtagtagacgtacgtgtctgtgtcttctgttctctaggtgtggattctgcaatgctgcacagaaacctactgcagcctcagaccaacagcagcagcagcagcggcggcggcggcagcagcagcagcagcattagcagcagcagcttctctcaatgctgagtagtaa

SEQ ID NO: 913332 - DNA, 4001 bp, Homo sapiens
gcgcccctcgagcgtcccttggtcccgccccctaacgccccgcccctaggtccccaagcgccccccccggtcacgcccccaaggtccgcccctcgcagccccctacgcctctggccccgcctcttgggctccgaagcctcccggccccgcctcctcaagacctcgcctctggcagccccgagctctctctggccccgccccgagcgcccctcgggagtcctggtcccgcccccgcagccccctccgcgccctcaagctctaagtccgtgaagccgcagcggtgggggcctgcaggcccggcagccgggagggcctggttcggggcggctgcctggcgccttttcaacgtcctcttctgactgtgcagctcgaatccgcggcgtccccggagggccagagggggaaacgaccccgatagaaacccgaccgcgaaggggaggaggggcgcctcggaaatgtctcccgccctaaatgagcgagccccctactcctactcccgaggctgagccgccgctttgagtcagcctcggccgcccacgctggctgctggggctgtaggaggccactgcaaaggttcaacctccgcacgccccccgtggggcctggactttgctctcagcacagctgccttcgcgggcgcctagtccccacaacccctgcttcacctccacatagggggaggacaggggctctcgcttctgcttcatttggacccctcgagagtcttcactcccgctttggctcccggcctctgaaccttatgagagctcacttctttgaggcgaaaagtcgaggcatcgccaagaaccttcaaaatgaatgcggggccgggcaaactttgcaacacgcaattgcagggctgtggatccatccacaggtgacaccgggcctcccacccccctcgcccagacatgtttctcatcccaacctattcttgaaatagacctcccagcggtgcacacttttctctgccacccacgacttccacgtccctcctgcaccagtacacttgcaagcacacccctccgagcgccattctaatgattcatggtcccttgggccaaccccaccctaacacacacaacaaacttcgttccccacccttatcccccttcgtttccaaggcactggcgacaatccacttcatttcctttcctcatctgcagactcgtccccctcaaatacctcacgccatccgcctcatcttcatcccccccctcctccctaaaaatgtgctaattaaaatgtagtttcctcttcccacatatgaagtgtggaaaatgaatcttgtcttgacacaaactgtgatgcatttatcgttttctctctccactggactaaggctgtagaaattttagtctaccaccatctcccatttgctcaaaaaatccaaccatgccttattatttttaaatactcttaacgaatcgtggggaaggctgcctagtttgaggaagaaaattgtttagaaaatgctcagcctgacattttatttggtatttaaaaatatctgcagtatttgagagagatattgggagtggctggatattttcttgcatttaaaaagcaaaaaaatgaaaagctttgcatgcatcaaggttagcctttttatgaatagcaaaaaaagtatcctaagggcacctatcagaatatagtcctcactatattttgctagtcgcaaatctggacacccccaccaccaccaaaggaagacaaattaacataatccattttaagcatgtctgatgaacagtcttttccatgatcattccttttctcacagtttctggacaaaatagctagatagatctccttacccaccgaagatccaaagcttccttctaacaagggtagtagacgtacgtgtctgtgtcttctgttctctaggtgtggattctgcaatgctgcacagaaacctactgcagcctcagaccaacagcagcagcagcagcggcggcggcggcagcagcagcagcagcattagcagcagcagcttctctcaatgctgagtagtaagtgtttgacttagtaaactctacaattaccattaggcgcttgcttatgagaggaggcggaatctttcttaaaggaatgggttttgtttttcctctctagtattgcttcataagaggcagagaggatggaatcagggagttttgtggactgagtaaatgagtacagctgtgggaggtcaaggttaaaattaactgggtggttgaggaatggaggcaatgattttagtgtaagtcaatgaaatgctagaagcaccagttttaaagagccctgctaatttcaaacattggggtaatggcaaaataaagttgtatgccttgaaactgattagtaatttgtgctaatatttaatttaatttaatatttgtgctaatattcaacatcgtactaaaataataactatataaaggaaagctatttagtatttaatataagaataaaaagaaaaatgaattaaaactcgtttatgtgactagaagcaatggattcaagtcctacctataagcatacttggaacttcagtgaataccagtattagaaaatatattgttgacaggtttcaatgtgtgctcatgtgatataaaaaatcacaatattgccgggcgtggtggctcacgcctgtaatcccagcactttgggaggctgaggcaggtagatcacgaggtcaggagttcaagaccagcctggccaagatggtgaaatcccgtctctactaaaaatacaaaaattagccgggcgtggtggcaggcgcctgtaatcccagctacttaggaggctgaggcagagaattgcttgaacccgggaggcggagcttgcagtgagccaagatcgcgccactgcactccagcctgggtgacagagcaagactccatctcaaaaaaaaataaaataaaattacagtattatgtatagaaaaaacaaaatatatctaaaataatttttggataatagcacagtattaatgctatttcagtggcaattcaaaggtcagcaaaattaagaaacacaagtggattgactgactctaagtgcatatgaatctgctatttacactattaaaatgtgtcgtgtccacctgagaatctgcattataaccttacattttatctttatattacttgatttaagcacttaccagttatgtttttttctctataagtaaatgaagaggtgtgatctcaaaatatgaatagaaagaaataaaggaaatattctgcctttaattttctttgcacagcttttgttaatgatgtacctgtgtgatcttgaacaagtaaataaccttatttggttcttagttccctattttgtaaagtgaggaagttggattgaaatttcccagggtctggccggtcatggtggctcatgcctgtaatcccagcactttgggaggctgaggcaggcaggtcacgaggtcaagagatcaagaccatcctggccaacatggtgaaaccctgtctctactaaaaatacaaaaattagtcgactcactgcaatctctgcctgccaggttcaggcgattctcctgcctcagcctgggactacaggcgcatgccaccacacccagctaattttatgtatttttagtagagacagggtttcacagtgttagccaggatggtctcgatctcctgaccttgtgatccgcctgtctcggcctcccaaagtgctgggattacaggcgtgagccaccgcacccggcctcaatttttttttttaatgcctcctacagggagagaattaaaagaaattagttgcccagtttccttcatctgtttttgttttccttgcttctctgcaaggagggctttttatttcatctaccaggtagtattgaacaatgaataaaatggtgattatttgtataattcaaagcattcccccacatcccctccccgcaaattgaatgcatttctttacctcttcccaaagtgctcagcacagtctcttatataaaggcacttaacggatactttaaaaaatgaata

SEQ ID NO: 913333 - DNA, 4001 bp, Homo sapiens
accacagtgcctgtaggcttagcctggcctgggtctcccgggggacctgcttggggcattgtggacagagggctctgcagaggagaggatgtgcctgggccccagccgggatggggcggggagtgggaggtgtgctggggttgcccgcctccctccagccccaccagacctttctgccccgcctctgtggcctggtccaccacttgctgagctgccgctccggccgctgacactggaacagagagatgtggcttttagcccctgttgaggcaccaccgactacaggtgccccaccattgccatgcctctgtgtcctccagagtattcggtggtacaggtccaagggatggatgccatggagataaagtccctggcccagggccccccagcccgaggggcaggagacctttccatgcctctgggatgtttttgtttatttctaactctgagctccttctctgtgggggaggagcttccctttccatctccagggctactgagaaaatgttggacagaggaaggaaggcagggcagggccaggctgcagctagcatctggactgttggctaatgctggtgatggcgcagaagacccttgcccccttttacagcttctcccctagaagcctggcccagatgcctgaattcccacctttcatgcacttagccctggggcttgcagttttgccaggtccttactgcctcctccctcctgtggcctgcccggaggggcacacaagcaaagccagtgcctctgtggacaggcagcttaagacattaggagacaaatgaaggaaggaggcaaaacttccaaggccggactatctcctctggaccagagtttcggcctgctgggaatggagtcaccagccccgggggggctgacaggtggctcccgcctacagagctgtaactcatccctgctgctgaacaggaaagggcctgccttacccagatcccatcctccggaaagggttagtcaggcaagtgtgctgagaggcccctgggaacctcgtctcgattaacccatcagaaagcagcccatcctttgcacccagctctcagatggaaaagtgaagcccagaaggaagggacctgacacggaggcttccttggtagcatttcagtctcaagggaagaactgtgggcctcccctggagcactggtgaagtaaggggttggtttggatattgtctcctgactgggatatgggcaggactgacagggagctggagtcctaacgaagcctgggctaggtgcaggaagaaccaacccagtggtctcctgacatctcccacgcccccaccgcagctgggtcacctccagaatacggaggagagagctggaggtggaggaactaaggaccttctttgccaggtggggacttaaaggtaaggcgacgattacttttcggcgatgggggtgggatggaaacaaagccctttgaggtctggggcagcctctggtggcgcgcgcgggtttaagtggtggcgggccgcgcccgatccctgtcctggaccttcaccctctcctgagggcctgggcgggccgcccagcgccagcatggcctccttggaggggctcccgcagtgcccgcagcgcagctccggctcctccggagcctctgttccgctgcctccctgcgggcaccatctgtctgctcgccggggtgggcgttctgcctgccccctgcgtctcagtggaggaccgagccttccgagccaagctgccggtccaggaacttgcggaccgcgccgacccgctgcttctgcctgcgcatccacgcaggtgcccctgcctgagccctaggtcgcgcgctatcctcaccggcttcctgggcggtcccctccacctgttgcttcaggtcctgcaagcccttgcttgccatggcttcggggtatctgtggagtcgtcaagagcagctggagcgacgttggatcctgcccagagtggcgatgccaagcgccagctccggtttttaaggcgccccagggctggcctgccccgcgtaggggagagggcgcggggcggttcccgtcatacaggctccggggagtggccgggccctgctccagagtccgcagggcagggagcacatcctggcctaagacgggccgcggtgggaaaggggcagaccgaaccagggaccgaagaggtgccaggacaggggtccagagaggagctggaggcaggagaagggcgcacaccacctcccagctcatcagccccagccctccctttctgatcctgggcgtgagcgctgggtcagctccagggcaggagctcagggctggtgttgaccttaatgacagcagtggtcttttactgagcatttgtcttgtgccaggtgctgcctaacgctctgcagtctcttgtataatctttacaaccacctcctgaagtgggtatttttgttgatagcatcagtgtataggaggaaactgaggcagtgaggtcggtctcacccaaacgcatgtggcagggacttggatcctcgaatctgcctaggtgcctgtaaaccctagggctctggcatcatcggagcccccagccccaaacagctgcaggggcactgctgactggctctctgcctgtagccagagacccagtggatgcagccggagagggcctggtaaatctttcccctgagagggcgagatacaggtgtgtgcacttgcagaccatgcaaccccaagggggagagggcagtgtgcctgtgcagcccaggcaaggagattgccgtctgtcaccgaagccttaggaagttgggcaggaagcatggctcagggagggcaggaataagcttgggcctctcaggtcacctttcctgagatggggcaggcaaggcgctagagagtatgacttgtggctgttaggaggggacttagggacctgggcctgagtggagaagatcatccttgggtgcagcaaaacagcttgcaagatacattcccctggcacacaaggggtgtaggtcaggccccacccagctgggtatactcccactccagagtaggccttcaggacctggaggccagtgcacacccaccctgcctttctgggtctctctaccgcttcctgtccggggctgtttcttgcacctctgctggtgtctcccctattctggagcgctgggaagcccctgccacacaggcttggtctgctggcacataccctgcttctagtgctgcggggtcagcccctagagggagttgtttggaagtgcacctgtacacacacacacacacacacacacacacacacacacacacacacacacacggtatggattaatggagatgaggtcaaccctgggcaaagggaagaggcaggtgatgagattaggtggaggaagggggagggagcaggtctcaggcaaaacaaagcggcagcaacagtcctcccagccccccgcccctcctctcccagagcgaggccttgccctgggagcggccatatggatgccttggggactctggggagcccatctcagccatgccctgcctggctggccacagccctgccagccctcctgaaatcccaccggtagtgcccaatagccaggcaggccttcgagtgttccagtttatcacaggctggtggtgccactgggctccaggccccatgggcaatgagctgtgagctggacaggaagggagcagcctctgtgggaagagacagccagcccccagcagatggtggtagagagagctccacgtggccctagcggcaggcactacagtcaaacctcttgggttcagatattcttagagcaagcccctcacttctctgagcctcaacatccccatcacatcacagcgtctccccaaagtgtgtgtgtgaagattaaattggctgaagggtgcccaggactcagcagtggaccttgtgagagcgtgcagggcaccagggcttctcagacaaggagaggcagaaggagggagcgcattaccgcattaccgtttcccccacccccgccccagtttgctgtggtgtcacttt

SEQ ID NO: 913334 - DNA, 4001 bp, Homo sapiens
tacacctaattagtagcattctgtgataataagagtgggaatgggaagaaggggaattaactctgggtataatagcctaattctaattcatcctaaaatactgttagctttaaaagctagatttatatgccccaatataatttactgtgaaatccttccatgtgggtctccatgtttcagcacctgaatctccttctgcataatgagataagtactttgtctatgttagtacagaatgaagcaatttagaccagtagcggtggctcactcctgtaatcccaacactttgggaggctaaggcaggtggatcacttgaggtcaggagttcgagaccagcctggccaatatggtgaaacccccatctctactaaaactacaaaattagctgggtgtggtggctggcgcctataattccagctacttggatggctgaggcaggagaatcgtttgaacccgggaggcggagattgcagtgagcagagagcgcgccattgcactccagcctgggcaacaagagcgaaactctgtctcaaaaaaaaaaaaatatatatatatatatatatataattatgcaatttaagagacagactatgtccgagttcagcacagttagatcttactgagggttaggttcccaagctgtctcttaaacacaatgtagtaaaaattggcattgagaagccctcaaatcaccaggacgggtggagcctggaaagctcatagaccaaaaatgagcttattttatttctcttcacatttttgtgctggggcctccctttctctgggacaacaaagcccaagttctgcttttaaaaaggccagtcagaacactgggtatataaggcaatttatctctttttataaatagttgaactagcgtaaattaaacattcagtcaaggctactgggagaaagtggacaagcccattatcctgtcctcattaacaaaaaaagaaccttccaaactggaagagcaattgggggaaagtctccagtttcatggatttcgctacatgcccagtatctctcaactcatttcacttgtgactctgagataaaaggagtaaagaaacaagatggtaccttcgggaaccagggtcctaattccagtcatgagcaaacattttagagacacacaatttcacaacttgagggcaatatacctgcatcagagaagggccaactttgcaggtctgctcccggccaacaatgaagttctgtcagagggcatgacacgcaggcatgacacacactgtgcacgccacgctccctccggccctgggccgcccccgggggcgcgggtggggcacatttttcatgggaaatccactacacacccaagaacgcttgcaaccctggaatttgggcgagggtcacctcgaccaagcagcgacacacagaactccgcaatgtgccacagacccgaaaacttctgaggaaagcagaaatgcccaaatgaaaagtgcggagggaacccccaacacgagggggaccagaggcggaggcaggctccagaccacccgcgagaaggagcgacagtgctcacgcgctcgggaggctaacgcccagctcggagcagtcaaggcagccgcccgctcgttacctgactgacgtcatggcttcgccctcctgcccagcgccacggcgcccgcgtccgatgctctacgtccgctcgggcagcagcaggtaccacagcaactgcttcccggctcaggcactcagcgactgggagcgcgtcctcacacaccccgcgcgcgggcggcccctggctagccggcccggcgtgctgattggagggaaggcgggcgctccgccccgtgcgaagggctggagatcgtccccagacgccgtgggccaccgcgtgtctcgtgccagctcactggcgcgcgggctagcgagatgactagcgggcgcggtggccatcttgagtcctagtaacagcgtcccgtcaccccgcagtttacagggcgagagattgggtgcccgccccaaaaatggccgcgcctctggcaaccggtttagcagtcacgtggccactgtctacctcggcaagctcagctccctgtaacagcacttaggaaagaggcgctgtcagggcaggtcttcgggagtgggatttaacagcctgcaaaatccatctgcaaaggtggggggaaaaaaagcaacagcctgggaagcctcagcctaggaaaatataaaatgcctggcaacggcagcacgacgtactaattccagtccgcagcctttgagagtcaattgctggatctgatggtcccaaacgttcctgaacttcagaaacacttagagcagcttatttaatatggaaagtgtcactttatgtatccgaatctagaaaggtaggcctggacatcggtatttttagcaagttaccaggtgaatcaggtacagacataaaattttacaacctctgggccccactcaaggctatcctatttgacacaattacctcactttccaaagaagcatgcgggctataaaaaaaaaagaatctaagaccatagaggggaaaagtggatggcaccctaactcctggctctaatcttacagtttaatgcagttgaagagttaagaaattgtgaaccaataaaaggaaaattaactccaactatgaaaaggggggaatcagtaaatgctttatgatccaaattgcttttattcctttattctctgtgcaataatttttttaattttcatttttttatttttgtagagacagggtctcactatgttgcccaggctggtcttgaactcctagcctcaagcaaccctcccaccttggcctcccaaagcactgggaatataggtgtgaacgactgggccctgttctacaatgttattaatagactacaatatcctgtggcattaacttactgaccatctaggatggtgatcaatttcatatgtctgaaatcagttatatcagaagcaaccaataccatccgatattgaaatgtggctgatgggactgaagaacttaatttttaatttatttaattttaattcatttaaattttataactgaagcaatatatttttccactaaacacaattgtattgttttagttggactacatttcactttttttttttttttgagctggagtcttgttctgtcgcccaggttggagtgcagtggtgcgatctccaacctctgcctcctgggttcaagcgattcttgtgcctcaggctcccgagtagctgggactacaggcatgcgccaccgtacctggctaaatttttttgtatttttggtagaaacggagtttcaccatgttggccaggctggtctcaaactcctggcctcaagcgatctgcccgcctcagccttccaggcgtgagccaacactcctggcctcttttttaccttttttaatgtggctactagaaaatttaaaattacaggaatcttgcattatatttctacagaacagtgctgctctagtctaagttagctttacctatcactgtccctgtgatagaataattaagttcacaaaatgaaattagtaaggaagccagtttatacaaatctgttttcttgctagccataaaacacatcaaatattccagaagatttcaagtttctttagaaaatgctatttttagcactgttctctttaacctgggaaatgcctatccagaatgaagccatggtctataaaactgatgtgttcagtccatgagtaaaagctgttaaaacactgagctatacttggcgtggttaagactttgaccgaaggtccacaagcagaattagtcaattgttcctctggattaaacaggatctgaagcaaagcagcagctggattagcaattcacagtggtggagacactggctagagttacccaccttctcttgtggaaaatgttgatagataatccacatttcacaccatcagtgcttttcaaactttaacatgcatacaaatctcgtggatcttgttaaaatgcaggtttggcactgcaggtatcagtgacca

SEQ ID NO: 913335 - DNA, 4001 bp, Homo sapiens
tatttttcctgacatctacaaatatatctcattatttgttcccactgatgctgcacattaaattatgcaaagtctttataatccattctccttaaccaaaaccagtagcaatcccctgtcaagcaagtcatcataaattcagtgtaaatactcaatgcattatcacactttgagtctgaaagcaaattaatataataaaagtaataatagccgatcctaaaatgtctccccacaaaattagagatttgtcccagtactcaagtgtctaatcttttaacttcatgtctacaggtggcactaaattcatattgtataaagtgaattttagttgcctaaggaatgctctcaccacagcctcacaaagcaccaggactgcaggtataagaaaacatgctcagctagttcctatttctgttcctgtactaattgttttatttgggcttcaatatcttcaattgtaaaataggcataattcttgccttcctttgatcacagaactgtccaacaagataataaataggaaaacacagtgaaaatggatcagcattatatataataatttttattaaggaaaaatctaaggaaatctaagggttatatgttcagtaggatggtagggaaaagttgcatctgtcttccagtttggcgaaggaggtgccttataaggaaatactctaataaagggcagagtagggaaagcacatgccttgaactcaggtaggtctgattcaaaagccgttgctttttattctgcatatagttggaatatttaaaataaaaatagaatatcctgagggtttttattttaaagtttatgttcttggtataaggtaggcacactaaccctttgagggtagtaggaatacattaaaggaactggcaaggatttgttcaccctccattcaaagcagcatgaacacaccaccaggcccctaagtgtccttttcttttcaattgtgagtgattccttcctttggaggtgaagaagagtgatactggaagaaatgggatatgtcctgtttaatcaggagtgtcctaatagttttaaatcagtttgatatgtctattttaagatggaaaaaaaaatcgctgcctttcagcgaacatttccaaatcatcaaagactgcctgcttcactttatacttattaggaagggatattttaacaaatgactcttcataagtaaaagttgcaacatcaatcacatgtgaggcaggtgttaggggcagcactgtccccgttgctgccaaaaagtgtaaataaaaaagagaaatcaacctttcctatccattcatccaaatgctgcccctgcaaagcatcggaggggtctgggtccctggtagagggtcctcaaaggtacgggctttcagaatgtgcacgaaaaggaaggtcaacgtgcccttccgcaacactctgaaaaatccccaagaattctgactttgccccagtgtacagcagttgccgagcctctttcccgccatcccccgggaagagaaggcggccgcctacagacgctgctccggtccgaccctccggggtcgcaccagcccagcctgggcttgctcgcaggtggcgcggtcagccagctcggtccccctgcgggccacgactggcgaagggctgctggagccggagctgcaccagacaggcggggactcagccaaacggagagaacgtctggcaaggggtcgcggccaagcgggcagctgggggaggtcctgcgtgttggccccaagctggcagtgagagacaccacccagcgtcggggccgtgcaaccccacgtgggccctggcttgcttgcagcgccgtcaccctcctccccaagtccggcagcgctcacctcagcgcttgcggcgcctccaccttcagctttttgggcttcggctcctcctcagcagctgccatcttcgcgctcccaccccactttggctctacagcccacctctgccatccactctctggtcccgccccctcttcgcatcaccgctttctcttctccaaatcccgcccctccagactccgcccattctgtgccgctgtcatccacaatcattggctctatccgtcggcaccaacagcgaatgccccgcccattcctgaccccgcctcccctaccatgagggaccccagactgcgttaggcagcagatgaccgcctgaatctagatggagagaaacccaccatttttctaggccctggattatgtagaagatttagatactaagcctcaagagacgtctttcctctcatttacggtcttcctgcatatttaaaatttctaatacggtagacagagtcggtgtctttgaagctgttaatcaggcaatttcctgggcactccagctgcgggtcctcgcggccttctcggcttctccagcttcggtaggagaggatccggcgccgaatcactgactggcacaggtgttggggtgagtgtgaggggcgggaaatctgtggactggggacagctccaaaacccgggagtaggctgaatagctggggcccccgactccgatctgggctctaggagcgtctttggtgctgttggcccgggcctcgcttcccccccactcccggccttccgggctttctcgccagcaaggccagaagggagcggtccacctgcagcccagtgttctcaggcgcctgagccccggaggtcaagcttactgggttccccctctatagtgagctggagtacagacggcaggaatctcagtcccaggtttctgctttggaggacaaaaccccaaacggacctgagcagacgtcctgttagcgggtggtgcctggaagagcctggggtgaggaatgcagtgagaagggtgttgcagttcttcaggagagaggtaacggggttctaagctgagcaggtggcagtgagtgtggaagagtgacgggcgatgtggctgtttgtatttggtagatttgtttgaacctgaaacttacagccttatgtgtgattaagaagatggtgccagtgacaggaggaggtattttatggagtttgagttttatcgaatttgaaacagtggtttacatggagattgtagaaagactttaaaaaaaattatgagaattaagcccgaaagactttcaaggtgagacccaaaacagatgaagtttcatataaaagggtaagaagtatttttgtttaggagaaagttatcaatgacataaaatgctgcaatggtcagaggaggaagctgaaatcagaataggtcgttggattttataattagaaagtcattgagctgtttgagagagatgctttaatagtaactgaggaaagactgcaagtgtagaccaatccttcatcatttggggcatgaagcaagattattgagagtggcaaggtgggggaaagtttggggtttgttttaaagaatacaagatatctatttgggggcaggaagcaagcaactatttgaagattcaagaaaaagtcttgtctcccagaagagaaggaaaggaatgggatcaagttacaagtgaaaggattaatttgggaaagacagagggacactttcaattgacactataggagaagtgaagtgaatgaggttaatgaagaattatcttaatttacgaatcttggccaggcgcggtggctcacgcctgtaatctcagcactttggcaggctgaagcgggcggatcacaaagtcaggagttcgagaccaacctggccaacatagtgaaaccctgtctctactaaaaatacaaaaattagccaggtgtggtggcacacgcctgtagtcccagctacttggtaggctgaggcaggagaatcccttgaacccgggaggcggaagttgcagtaagctgagacctcaccactgcactccaccctgagcgacagagcgagactctgcctcgaaaaaaaaaaaaaaaaaaaaaaaaaaaaaaaaaaaaaaaccttacgtatctttaggaaagctctctttgcaacaagattatattttcttacttaatcttatgatttttatttctaaccattt

SEQ ID NO: 913336 - DNA, 4001 bp, Homo sapiens
ttgaatcttcccgttagaaaatacagaattactctatcaccttttaaggtacagtaagacaagaaaaaaagtcatgtgaggataatacagtctttgcattaaaggtgaatctgcaacatgaaatctgctcgactcacagatctggagattcatagggaagataagctctaagtgaccatgtcacagagatatgcaggtgctgaatttcttagtagatgctgcctgagtaaaccagatgtggctactgggcaaagggaggaaagaaaataaatcttgtcctctacatgcatagttatgttgtgagaatgatccccaaactgaaaaaatcatttagttttcacaaggaattaattaggcaggccagctcactttaaacagtagctcatctccttaaacctagtttttaccaatgacttgaactaaaaacaattcaaaccactgggtcatgcacagtcaataagttaaaaaactataagaaaaaaaggcataagggcatgagtggaaaataaaccctatttaactaaggggtagggagtgggagcaagaaaaccacttagtattttgtatagaatggggaagagaggaagatattttcattatggctttaggatggaagcgcttcagatagtcccctgccccattcctccaaatcaaagccccagtggcagtgacagtaccaggaaacaatctagcctccccgcccaccccgcccccataaccgtgcccggcggctgctgtccagtcgcccgtgcttcccaaggctgccgaggaagcggctgctgctcattccagtagatccaacgcccaggctagggggtagagacacagcccttgtggtagggtagggcacgtcttcggcccaccgctcctgggcgccagtggcttcaagggaagaccttgggacctggatagggttctccctcgcaccagaagtcatcggcctgtggggtctccaggagccacacctctcgaggcaggtcacaggccgagctggaggcctccttgggcctgaccggctccagcacccggtaatagtggcagtcccggccatcgtccgggtcgtagggcggggccaggatgtccaggaaggcggcaggcccttccacggcgtcgatctggtgcaggttgtcccggtgcggtgtgaggatgcaggggccgctggcctcggtgtactcggcccgcgaacgcagcacgcccggccgcacggcttctcgctcccggggctgcagcggcggctcgaactgctgctcgggcggcaaggcccgcggccgttgcccgccgcccgcgtctagcttgtccatgcagctgatgcgcacggtgccgtacagcaccttgagcatgccgtgcatgcccgggtggtcgtgcagcgggatggacgtgccgctcttgagcaggaacacgcccaggctgaagccgtccgtctcgtagatgtgcatgtaggtgactggcggcaggttgggcggcagcggctgcagtgtggccttgcgcggggcgatgttcaagtcctcggcgcggagctgggtcaggaggctcttcagcttgctcaggttctcggggaagcccggctgcatcggcgcctccgggccagaagccgcgtcgcgatcggaagcgccgcggccgcccccgctgccccggaaggtgaggcaagcctggcgggcgatccgttggatcaaggaggccatgttgtctcggggcatggtcggctgctcctctgcgtgccgggaccggccccctcctttcctccgccccttgcggtccccggcggccgccacggctgcccccagcccgggtcgaggcgggaggccccgcaaccaccggcccgtcgggcgcgcggcaccgccgccaacctcagcagccacgcgcccgcaactgcccggcgcgctcgccttgagccccctctgagcgcgcacgcgcacgccccacaccccgcactcacgctccgggagcagatagcggccgcgcagacggtgccaggctttgccttacgcccggcgctccattcatgcggcccgcacctacgacggtggccgggcgcccggggaccctgcggagcatgccgggacttgtagtccggccttccgcttgagctctgagatagttcagtttgttgattggaaaatagaggaactattacacatgttgggcataaagcgatctttttcaggatgcagaggtgtttttcttgttttagaaaagatgaatcggggtggaagattagtagccacttgactacaactcccggcactccccgcagggtggagtgacgcacttccgtcagctggcccccggagtagtggaggctcttggccttcataaggaaaggggcagggagggtcgttaaccttctggcgccgcgctggggcctggttagccatgcagggtcgccttcctttggccttgcccctgggaaggaggctgttgagtcagccttagctcctcgtagcggcctaggcagcactgtctcccacgggaattgcaggagggcgcttttataattttgtgtttcctaggaggggagggggtccaggccgtcctctgtgatcatcaaggttactcggcccagctgggcccagctgggcccagctgttgtttgcatcaggacctgatgacgctgctcttctggttacagagcagtatagctttttgctggagagacttgagaggccatttacagtggtcgtggattctgaacatactagtggttatcaaatcttggtttgcctgagaagggggagcgggcttttataaatgcagattccctgtcgtcacccagagatggagttactagatggttctgaggcatcctaggagaaatagtggtgtgcaacagtcagttcagtcagtaattgtgaaattgtttcactacacagaggcatccttctccttggcgtgaactaacttttggcataagtaaatgactagaaaagcaagacattagatactatgactttaaacttaaccctgagtttaaagtctttttggattccaaagctgaacatgggtttcttgtacattttgtaattggagtggttcagtgaatcctctccagttaaaataggcatactttttaaagtggattacataacctggctaatgagtactcacaatatgccaggcactgtgttaagtgcattatataatgaatgttatactatttaatccttgcagcaactcttaagaggcaggcactattattattcccagattgcagatgagggaataagttgtaggatagtgaatactaagtacccagcaaagcatgagcagcagagcagaaataagtacagtcttaccaaaaacagcagcttgaattggtgtaaaagcaccaaacgagagtcaggatattgttgttccagcctactgtgtgtacttacaagctgtgtgtcgttaggcaaatcctacccttttagggcctcaatttattcatttgtagaatgccggtgttaagggaacaaaagttctgaaccctactcatcagaaccccctggagagcttaaaaaataaagatcttggggtcacacctcagagattttgattcagaagaactggagtgaagcctatttttttgtgtgtggtttttttttgtttgtttgtttgtttgttttgaggggtaacaaggtttatcgtgaagagcgaaataacaaagcttccacagcttggaaggggaccacagcgggttgcccctatgatttatatttaagatgcttcctcaagcaattattattattatttttttttttgagacggagtctgggtctgttgcccaggcgggagtgcactggtgcgatctcggctcactgcaagctccgcctcccgggttcacgccattctcctgcctcagcctccggagtagctgggactacagatgcccgccatcacacccgcctaatttttttttctgtatatttagtagagacggggtttcaccatgttagccagaatggtctcgatctcctgagctcgtgatccgcccccctcggcctcccaaagtgctgggatta

SEQ ID NO: 913337 - DNA, 4001 bp, Homo sapiens
tgtcgcccggcttcacctggctcgctcgggccttgcctttgccccggggaccgcgctcgggtctgcggggccctggaggccgctcggcgtggtcggaagacgagctctcctccaggtccagcgcgtcggtgtcgcgcggcccggccggcgcgggctcgccaggggcgccgttgagctgggtgggcagcggttcggcctctgcgccccccgggcccgcgctgcgctcggggcccagaccgttgggcctgcgctcggtgccccccggcggcgcggcgacggcgtccggaccccggcggctgggtggcacgcgggtgcgacgcttggcgatctggtagatgcgcacgtagaccaggatcatgatgaggcagggagcgaagaaggagccgatgcacgacgagatgacgtaccacttctggtcgttgatctcgcagcgcggctcggccggctgcgggccgccgccgccgcccttcttctcgatggagatgagcggcgggaaggagatgacggccgagatgacccacacggtgatgatgatggccttgatgcggcgcggcgtgcgcttcaggttgtactcgatggcctgtgtgatggaccagtagcggtccaggctgatggcgcacaggtgcacgatggacgacgtgcagaagagcacgtcgagcgccaggtagatctcgcaccaagccttgccgaagtaccagtagcccatgacctcgttggccagcgagaaagggatgacgagcgtggccaccaggatgtcggccgaggccagagacaccaggaagaggttttggggcgccttgagcgcgcggctcgtgaacacggcgatgatgacgagcacgttgccgaacacggtgagcagcatgagcaggccggccaggcacaccagcgtcagcgtcacctgcagggagtaaggggtggcccgggcgccgccccccggcgcctcggtcccgttccagctcgcgttgcccgcgtccggctgcagggagcccatgggcgcaaagctgccctcggccaacggctgctcctggcggaacatgaacgcgggcgcccgctggcctgggcctgctgccagctgccttccggcccggcgcccgtgggtcctcctcttcctccggcgccccgctcgcctggctgcggctcacatagggagggggccgcagggaggccgggcccgaactggaggaccgctagcggcccatggcccgggtcccgcgaactgcgcctggctcgcgcttcagacgctctcggtgggcgccttcttgctccgagctcctaatacagccaagttttatttctaagcggcgggagagagtagggagagccgatgggtaaagagagatttattcttcaagaagggagaacaaaaatcatcggtggcctgataacttggaaggatgacaggaaattaaatatatatatacatatcaatatctgtatcttgaatcttgagcctgagcgaaagcaagaggtcttaccgtgtgcggggcccgcccccaccccgggaggcagccgaagggtgctgatgcgagctcgggggtcctatgtctgtcgccttacatccccgaagcgattaccgactctctggcttcccccagacgctgcggttctggcccggcccggcccggggctggggcgcggactctgccgcctctcggagcgccgcgagacttccaaagttgtgcgccctgctggggctggggcacactgtgcggagctccgggacggcggcggcggcggggtgaggagtgtgggggccgcatgaaggcacccccgtcctcaggcgggccggggcaggtgaacgatcagctctccaggagccgcgacggaggcaggggttctcctgggcgtccgcctggtgggcgccgagcgctgctggatgggccggggtccgacgacagcgcgagttggggcaggagcgcaaggcggggaagaaggcgctggagtggccgggcggcggcacgccggctgctgggcttctgcaccgagctggagctgctgctgctccgctgcgctcacggtggactcgttttatagccccaggatcaagcaagcgttgctgagcagccggcgtcagcccccacgtgggaagccgaccctcccccgcccctcgcaccacccctccgccagtctagcgcccgcgcctagcgctggacctcggggagcgttgccctcaggcgggacgagccctttggagaggcgggtaccttgagctagagacttaaagagggagcccgggggtggggggtaggggaggagcggcccctgctgggagttggccatgcagctccgggccgacggagcagaacgcaacgggcacccgtgagtgcccccaagaagctggatcttgggagaaaagggaagaaaaaaatggaagggaatccccgcccaaatcgagggaagtaacctccggtgtgagttacgtctggagcagcccagctccgggccagagccgacgcggtccgcaggtgctcctggaggctggggagaaaggggtcctggagagggaggaaggcgcggcttcggatggaacccctggggcggaatggacagcacccacggggaagtggtacaagccggagttcagacctccgcttagggaagaagcggctacgtgtcctcccagccgcgatgctgtctgcgggaaacgcaagacccggggtctggaccgcgcccccttagaccgaggtggggaggggtccaggagccgagcgccagggcaaagcgaggacgcactgacacctgctggccgctcgtggtcacggctgagaagcgacccgctgacgccaggcgcctcctcccgtctcttaggtcttctgccaacagagccttctcctatctccgaacaaattggtttctaagctcaggaaaggagaacccagagtttgaattgcaccctgccgtgttgcagaaatcttcctaaagcagatactcgtgtgtctacccctggcgggagtgggggtttgtctaataaagtcacatcaggaagggctcagcaggcaccgccggccagaacgggcatcccactctggacccgcacagcccacccttcctgcagatccgagagaggccaggatcctgcctccttggttgcacagctctggcttgctgggaatcattatgtttttgttgaggaccgaaagctagactccactcccgccccgcatcccacccccattcagatgtacacacagcatccttcaataaggggaagagggagtagaatattttccatgttctctctgataagaatagcggtgggggcgggggggagtgggtgtgcggcgaatggcaagtttttccgtgcgtgctagctgtcctaggatagattttaacggtcactagagcactagcttgcaccctgctagctgcacttttcagatgagagcaagcagtttaatggtaaaacccaagagggtaggaaatttcagcaggagagagattagacttaaaggaatgtcgtcttatttaaggaaccactaaaccaaaatgccttgtgcagtcacctaagttggaattccaaggatggaacaggctgcctctctgtgcagccagctgcaggcttaggtctggctgggggctgatggctaaattaagggccctgagaatcaccttcattcccagctgatgtctatagcccgcaccagtgatacagttattggtgctgctgctgttcatgtagtctcaaaatctgtactttccaaagtatttcacagaagtctcatttgacttcagtacctttgtctcccaatctttgccctaatggtataaactccctttccagtgttagttctgaggagcctttctaatctccctttctggacaatctaaaggaagctgagaagacaatttcctcgctctgttgagtcactcattttccatcttctactaaagtctctgctctgaggctcttggcaggggctttggacatcgccagtaggctcagttggaaacatggctacagtcatttttgcacagcaactaggaaccccacacttcaagta

SEQ ID NO: 913338 - DNA, 4001 bp, Homo sapiens
aaactgtcattctcctctctctggctggtagtgtgttcctgttcccgggaaagggatgggagccacgatgatcgattttaatcccctcctaatgcttctcccttcccctaacccacccatcttccactccggtcctctcagagagtgtcaaaaaccacctggtgggggaaaaaaatctaaagatgcatcacacgcacacacaaaagaaggccggaccacaaacagaaaaaaaaaaaaaaaaaaaaaagaagaagaaagaaaagaaaagaaaaaaaaaacaacaaggaacatcagcaagccactctcccatcccttcccaaactttcctttttgtgcaacggtccgtggcttttctctttgcctcggatgattcagacgaggattgtgggcttcgagttcacctgctatcggtcttaagtaaacacagatctcctcgttcccctgggaagccgtgcccggagtccgcgccccgcgccgggccctacaccttggattccgaggcgaagccggggcggcacggctcgtccaggctcgagtcgctgtccgccgccgccccgccgttgcagccggcccagggctccagcaggcgcgcgggcggcgtggccccgacgacatcgtcgtcgtcgtcgtccgaggcggccccgggcgatggcgggggtccgggccgggccagacagcccgaggcgcgcggccggtctccgtgggtcgcgtggcgccggcgggcagccctgcgcgcgcagcagagcagtccctggaaggccttgcggaagtcggggctgcggcagtagatgatggggttgaaggccgagttggcgtagcccagccagttgaagaagacgaagaggcggtcgggcaccagctcgcggtggaaggccttcaccacgttggccaggaagaagggcagccagcagagcgtgaagacgcccatgatgatgcccagcgtcttgagcgccttctgctcgcgcagggccacgaggcgcgagggccgccgcttacccgcacgcccgttggccagcggggcggtggcggcggcggcggcggggcgcgggggtccgggcggcggcgcgggcgcggggacgggcgagggcgagggcgagggcggccgcgctgggccgccgaggaaacggcgctcgcagctgtcgatcttcttcacctgcttctgggcctcgcggaacacccgcaggtacacgaaggccatgatgcacaggggcacgtagaaggagactacggacgaggcgatggcgtaggcccggttggtgacgaagtcgcagcacttggggtcgttgtagcagcggcgcgcctcgtcgctctccgcccgccaccagtgcatgaggatgggcaggaaggacaccagggccgagatggcccacacggtgcacacgaggccccgcgcccgcgcgcgcgtcagcaggctctggtagcggaagggcgaggtgatggcgaggtagcggtccagggcaatgacacacagggtctcgatgctggccgtcacgcacagcacgtccactgaggtccacagctcgcagaagaaggagccgtactcccagcggccccacaccacgatggtggccccgaacggcaccaccagcagccccatgaccaggtcggcgctggccagggacatgatgaagaggttggtgagcgtctgcagccgcggcgtcttggcgatggccacgatcaccagcacattgcccgccacgatgagcagcacgatgagcgccatcagcagacccatgcccgctgtccactgctgagacagcggctcggggctttcgctggcgggaggcagcaacgaggcgggcggcgacgcgggcaccagcagccgcgccgcggtggccgcgccgtcggggagcggtgcggccgacgacaggttaccgggctcggaggcgcccaggacgagcacccccgcgcccatgccgagctgcggaggccgggggcggggggtgtggcagggctgggccgtggttggggaacaccccagaagcccgggcggcgtggtgcgcagagggaggtcgcggccgggtcagggcagccgcggcgcggggccggaggcatgggcgccgggcgcctttcccgcaggagccgagcgctgtcgctgccgctgccgccgccgccgccgccgccgctgctgctggagccgctgccgctgctggaagagccgccgggacttcagcatgtttctgagcgcgccgggcccgcagctccggcacccagcacccaccccaccccgctcccactccccaagccaacccccggggcctcgcgtcaggctcctgcagccaatccgggcaaaggcacgcccccgtctggtctgcacccccacctccaactccccgcacccccctcccgttggcaattgagcggctcctgagagtcccgagctgatcgcgtagctagtgcctcccgtgcgcccgcgggttcctgcggacgcaccccttcctgcgcccgctggttcctggtccctgttcccccgcgcccccttccgcgcctggctccccccggggccccgtcccctccctcagcccccactcgctcccgcacccactcctgcgccccgtttgcctcccgcacccgctcctgcgccccgtttgcctcccgcacccgctcctgcgccccgtttgcctccagcactcggctccctcctgcgcccccgctccccccgcatcccctcgacctgcagttccggggttctctgcggaacagagcgctagctcccttgagcggggaggggaccttggtgttcaggaagcgccagagcgcctgggacagcttgtccgccaggcttggaggagtttgccctgcgagcttggttgtgatgtggggcagcctagcagggtgtgtgtaaaacccttcccccgtcaagacgggacccagccagcatgcgtcgtgacagcttgggggattggaggtgggtgttagtggttagaagaaacttcccagcagagcgggttgctggagccaagcgcgcatctgtcaagaatgctctctgggcgctgttcttgcaaggatcctctgttgaacctcgagtgcagtagatgtggaaaggaagcgaaggtttgtgcatctaacagctaacgctgagggccctttggaatcgtacacactcctcagtcctagctaatgaacgtgtgagcatgatgcaaaaatgtatgctcatgatatgaaaggagaggcttagggagacagaaacgttgagatacagagtaaacgataccaccgcgagggggaaaaaacgcgtttaattacattttagacttttcaatgataacacctgtattttgtgttttattactcatgtgattttataatttgagctgggtcaatacaaacaaaaaggtactgtcagtttatgctgacgtaatgaactgcgatttcagattccttggtctgcgtgcttgttttctcctttgcccaagttcccagattctcaaaactctgagattagttttgaagggatgagacaagaaaacatataaatactccagaggattaaaatccaaaagcatttaaagttgtatctgtggttttttttttttttttttttgagttggcaaatgaattgctttgaaattagtgagttgttaacctggcaaaaaggattatactgggggtgaggggacaagaaagccatgaatatgcaatatggcaggactgcaagccccttctctaatttggctcctgtagtgtcctcagctcaggcctgaaataaaaaaaaaaataaaaaaattaaaaaaatctctaattgagtccttgaggagtaaacagcttctaattgtttatgtaagggtgcatgaaaatgttatataatgctcacaggtccttctagcattggaataagaacagcgcccgtaacgaacatcatgttcgttgatggtcatcaatatgaccaagctcatatccttaccttgcaaggagagaccgacttccacagctgtccaggtcaaaagcaaaaagtaatgtttttcaagtttatataaaatcaagcagttttaaccactttc

SEQ ID NO: 913339 - DNA, 4001 bp, Homo sapiens
gccctgatttagagagattaatatgctgatttgagaaagtagcttgcaacctacaactaacaccacccccacccccatacacacaccccagctttgcaagtcagggagctggaaggcaccccagaggccaacacttcctgtcaggctcaactcaaggcctgaattcccagagagggtccctcccgaagggcggaggggccccagtaggggagggagtgcaaacggccatgttacaaggagcaggactgtggcttcctcaagtgtctgagacagcataagcgcgcattcagtcattcaagcacaaaactgacgtgatcccagtagaatttgagaagaagaaaaccaccgggttagaaatgcgagagaagctccagggagggttcacagaaagaaatcaaaggtggccaactcctttaaccctgtcccccacgccggctccctgctgtcggcaaagacccttcctgaatatatgaagctctgtctgggacttggatcttttgccttcaccagtaaccaggctacccagatgagaaaaagcaatgggaaagtgaaagacaagactactttagggaagccggtcccaacaggtccctttatgtcagtttcagggatcagagccctccgggagtgagattcctgggaatctgagcgttctctttttattactctctcccaggggaaaacaaatatagaagcagcatttcctcccgcaggtttggcggagaccggtccagcaaaagagaaggcaagaggcttttccaaagggaaggggtctgcaggaggatgggggaggggggagcgcccgcagggttcctcttaaggggcaactccctgtactcccttttcaaaagaaccgcaatcgagacttgtagaccagctccgaggctccgagtgtgggtgctaagctgggcgtccggcgcacccgggacggcccgcccaccggggtttggcggagatcctggcccccgccaaacccaaagctcgcccagctgcgcactgagctaagccctcgggtccggacgcctccaggagctccacctgccgggcactccattcggcccccgaccctcgcatccctcctttcttggtgtgggggagcaaagaagggcttggagagaaacgatgacccgaacggcaggacgtttggggaggccccacctagcccggggagggtctgcgcgcccactccactgcccaagcgctttgccgggagcaggaagcccctagcccggcgggcgcccgggagaaaggactcaacagcccgaccctttgcccccagcagctcagcacggttcccaccttcttcggggcttcctcggccccaggcatctttcctgtgcggcgggactgagggtggagtggggtgccgggctcaccctctctcctgcaacaggtgagaagccccgccacgccccccactgacgaccccctccttccgcgcccgggaggatcaaagggctcgggccgcagcagccacctaggagcccacccgcccagtccgcggcgccgctgtcgccccctcttaggcccaggtccgggctgggtgggggcagtgggctctgcttatcccgagtcctggcaagacgagtcctagccctgccctccgcgtcgctgggcgaaagggagtgggtgtgcgccgcgcgaggaacccgcgccctcacctttgtaccgctccatcggggccacggagtgcgctcctcgcggctcggcttctgcgctgctctcccggcgctcggctcagcgcccaggccgccgcgctggcccctccccgtgaggtcacgctcgcggccggacctcctggcggggccgccgcgcccagggtcctcggacctggcccccgccagggctcgcccccagcgcccctgtcccagcgcccctgtcccagcgccggagaactccggcccgccgaggctgacagtcggctcttgagtcggtgcgcgcccgcggccccgctcgccgcccccggccgccttggcactcccttcacgtcttgactccgggggcgtcgagagggaacgagactgggacgttcccaaactctgggggaggctccgggaggccgggcttgggtgggcctccaagattgttcccacacccctgcccgctgcaaacccaatgcctggaggaggagaccgaggtccaagctaggaggttgagactggcttagagctcctcgcgcttggctcccgagccagcgcgcttttgccctaggccttcctggaggggcgaggagggcagcggggcgggcaaccaaacctgctccgggttctttggggattgctcccactctcttggaacctctctgggcagccgctgccaatcgcgcacacttcagggtgtgtgaaaacatctgcttgctgctttctacctgaatttccagggccaacgccacaagtcagggagtgccgtttccggggcgcccagtaaacctgaccgccttggaggggtggcgccggttccataaggaagctcggccatggctctgaatctccaccctgcactgcctccatccagaagtgccacacttccatcctttgccttttgccaccggtccttccaggcccttaatgcgacctagtcttctccgtgctccccccagagatctatgtgttcttttaaactttttcagttttcactttaaaatctcagtcacggtttgtgctgggtgcctggttggttacctaagttccccagcttccttgaaggaacaattaaggaagatttggcagtggtggttttctaaaagacttcttaattcttccttggaatcgcagatttagttgtgatgtttggagacctcccccaacccctcccaacagcatgtagaaatatttttcttagttatactagcacctaatgtggatggagccctccccacaagccaggcacggcgctaagggctgtacatcactgcctttagtttccccgatatccctgtgacatgggtattattatgatctctttcatagaggtgaagaagctacggctgggcgcggtggctcacgcctgtaatctcagcactttgggaggctgaggcgggcggatcacgaagtcaggagttcgagacgagcctggccaacatggtgaaactccatctctactaaaaaaaaaaaaaaatagctgggcttggtggcaggggcctgtaaactcagctacttgggaggctgaggcaggagaatcgtttgaacttgggagatggaggttgcagtgagctgagattgcgcactgcactccagcctgggtgacagtgtgagactacgtctcaaaaaaaagaaaagaggttaagcaatttgctcaaagtcacacagctagaaaagagcggagcaggcgttaaactcggatctgtctgcttccaaatgtgtattttaatttttatttttttagagacaaggtcttggtttgttgcctaggttggagtgcagtggcacaatcttggttcactgcagcctcaaactcgtgggcttcacactgatcattacagaaatgcaaatcaaaactgcaatgagataccataccgtcagaatggctattattaaaaagtcaaaaaataacagatgctggtgaggttgcagagaaaatggaatgcttatacactgctggtggaaatgtaaattagttcaactattgtgaaaagtagtttggtgatttcttaaagaacttaaaacagaactaccattcaacccagaaatcccattattggatatatacccaaaggaatataaatggttctaccataaagacatatgcacatgtatgtttattgcagcactactcataatagcagagatatggaatcaacctaaatggtcatcaacagtagactggataaacaaaatatggtgcatatataccatggaatactatgcagccataaaaaagaacaagaccatgtcctttgcagcaaggaagaatggagctgggggtcattttcataagcaaactaatgcaagaacggataaccaaataccacatgttctcacttttaagtgggatctaaatac

SEQ ID NO: 913340 - DNA, 4001 bp, Homo sapiens
gcagcaggagcatgatgggaaggtcaaggtggctgagatggaagggagggggtgttgtgggaacaggctggaggtctgggaggctctgccctcatcagcaggtgggcttttccttagacttgttcctcagacttgttcctcctgtggttccaagtggctggttctagggttcctttccagccacaaggtgtccagaggaagatgaagggcggcttttttttttttttctgagacagggtctcactctgttgcccagactgagtgcagcggtcctcgacctcccggtctcaagtcattctcccgcctcagcctcccaaagtgctgggattacaggctgagccaccatgccccgccttcaagacaagaaaagccttttctagaagactcctggcctcaggcctgatctctctccttggccgcacctgggtcgcacttaaggcgatcactcacaaggagaacaagtgaaaagtcccttgggattcatccctgagtcataggggaatgatgcacaccagaaggatgctgggctctgccagtccagccccaccagcctcctggagtggccctgaggccggctctccagaccctaggacctgctcctggaggcaggggctcctggaagcgcccctgacactgctccgggtgtctcttcaaggactttcccacattctacaaagaaaccttttggggacagtcagcaacatgtaaccgatagtggaaccagggcagccctgggttaagggtggtagacacgtgccccgcgagggagatctcagactggagaagggaacggcctcctaggcagacctgtactgcagcatctggactggcagccaggttggggacttcgtcccctgctgggaggccggggaaggcagggagcgcgccttgagtccgctgactaaatcgcctcagaactgggaagcaccgcgtagtcggtacctttcaacagaaacgcagaggccactggcgcgcaggaggaggcgactgcaggtggaggtagtaccggggtaaagacatggagcgggtggacgggaaccgctaggggcccgctggggcgtgaggggcgcggggaggaaagggccgcagcagcccacgccccgcgccagggccaggcctcatccggcgctcaaccagtgccacgttgagtcacctactggcaaggcatacaccgtaccggggccacacgcgtggacacgtgccgggggggtgctgggaacaccagtccatccggaacccactagacaaaaccttccagggccggaggttaccggtttgtcccgaaaggaagtggtgtggaagggaggggtctcccgcacgcgagcgcgcacgtgcatgccccccccacaaccgtgcttcgttctcacgtgcacggccccgtgccccgaagcccctccccggggagtggcggggcgggaccccgccgggcggcagcgccccactcaacaaagcttcccgcgggccctgccccatgactcaccgctgggtggggcgggcacgcaggcaacccgcgggccgagacggggtagtgagggccggaagcccggctcccgactccgcttcgtccccacaacctccggccgcctgaagtcctgaggggccgtggccctgggtcgtctcccctgttcccagcctccagtcgcagctggcggagagaagttcccgaggcccccccgacttgcaaggtcccttgccccgcccagagctgagccttccgaggatctgaggaccgagtccagcccagctcccaggaggggccgggatcctggggcagggaataaggggcaggggctggctctaaagtcgggcgggagaggggcactaaccgagatgggggctgagcctccggtctgggagcttcgggaggcgcgtggcgggatggaaaacattcctgagaccgttggattggatttccgaatttgggaggctaggactccggctacggtggctctgctcttgggatgagaggactgggcccagcttgcgaggaatcatgaagtggacacagggtgggaacgtgaattttaatgagggggcagaccgaggaggtggtggctgcccggagatcagggccaggctgtgctagatggcgcctggaaggggggtcacccaagtctccctgctgtcatttcaggaggccgacccaagtctccctgctgtcatttcaggaggccgaattttttcccaatcccagagaaggtgtcagaggcctggttagcagtcttgtcgatggtttcctgggtggtcttggccagctggtccatggctggggaagggcgggagagagggcaggtcaggcagggcccgggaaccacagtgcctgtaggcttagcctggcctgggtctcccgggggacctgcttggggcattgtggacagagggctctgcagaggagaggatgtgcctgggccccagccgggatggggcggggagtgggaggtgtgctggggttgcccgcctccctccagccccaccagacctttctgccccgcctctgtggcctggtccaccacttgctgagctgccgctccggccgctgacactggaacagagagatgtggcttttagcccctgttgaggcaccaccgactacaggtgccccaccattgccatgcctctgtgtcctccagagtattcggtggtacaggtccaagggatggatgccatggagataaagtccctggcccagggccccccagcccgaggggcaggagacctttccatgcctctgggatgtttttgtttatttctaactctgagctccttctctgtgggggaggagcttccctttccatctccagggctactgagaaaatgttggacagaggaaggaaggcagggcagggccaggctgcagctagcatctggactgttggctaatgctggtgatggcgcagaagacccttgcccccttttacagcttctcccctagaagcctggcccagatgcctgaattcccacctttcatgcacttagccctggggcttgcagttttgccaggtccttactgcctcctccctcctgtggcctgcccggaggggcacacaagcaaagccagtgcctctgtggacaggcagcttaagacattaggagacaaatgaaggaaggaggcaaaacttccaaggccggactatctcctctggaccagagtttcggcctgctgggaatggagtcaccagccccgggggggctgacaggtggctcccgcctacagagctgtaactcatccctgctgctgaacaggaaagggcctgccttacccagatcccatcctccggaaagggttagtcaggcaagtgtgctgagaggcccctgggaacctcgtctcgattaacccatcagaaagcagcccatcctttgcacccagctctcagatggaaaagtgaagcccagaaggaagggacctgacacggaggcttccttggtagcatttcagtctcaagggaagaactgtgggcctcccctggagcactggtgaagtaaggggttggtttggatattgtctcctgactgggatatgggcaggactgacagggagctggagtcctaacgaagcctgggctaggtgcaggaagaaccaacccagtggtctcctgacatctcccacgcccccaccgcagctgggtcacctccagaatacggaggagagagctggaggtggaggaactaaggaccttctttgccaggtggggacttaaaggtaaggcgacgattacttttcggcgatgggggtgggatggaaacaaagccctttgaggtctggggcagcctctggtggcgcgcgcgggtttaagtggtggcgggccgcgcccgatccctgtcctggaccttcaccctctcctgagggcctgggcgggccgcccagcgccagcatggcctccttggaggggctcccgcagtgcccgcagcgcagctccggctcctccggagcctctgttccgctgcctccctgcgggcaccatctgtctgctcgccggggtgggcgttctgcctgccccctg

SEQ ID NO: 913341 - DNA, 4001 bp, Homo sapiens
aattacttttacttagattcatctctttgcaaaattttagaggcaaacgaactaattgttttctcttttctaccggctcccatcccctgcctctgccagcagtgtagagactaaaaaactccaactttctttcctttttttttttgtgagacggagtctcgctctgtcacccaggctggagtgcattggcgtgatctctgctcactgcaacctccacctcccaggtccaagcaattctcctgcctcagccttgtgagtagctggaactacagtcatgtgccactacgcccagctaatttttgtattttttttttagtagagacagcgtttcaccatgttggccaggctggtctggaactcctgacctcaggtgatccgcctgccacggcctcccaaagtgctgggattacaggcgtgagccaccaagcccagccaaaactgtaactttcttatctttgaacaagatgctattgtcaggaggggaagggacaaagggggagccatggcaacaaacactcttacagggaaggtctgacattttaacctgcaatctttatattacacattgaaagtctacattgacgtttcatgtcttttgaaagttttgaccatgaaccaatccccacctctcttttagaacaaggaggtaaataaagtctgttaagtcaccagaataaatctggagacacattttctgttaaagtaagaactttaacagaaaagagcttcataggtaaactcctttgagaaaccccaaacacacacacacaaccatttttctgcagccccggctgtgacatttcacacctttcacaattattttaagcactctccttttttctttttccttctgtgttcaaattacagttagaagaaactaagcagcttctatcaaggtgacttaaagcagcccattaagaataccatatagcctctcccatggcaaactccattctgattttaaataagaaatccccaaatatttgaataggaactgtcttgagatttggctactttaacaaaggaaacaattaggcacttacctggttccttcacttaggtaccatctggataggtacaaagaaaaaataagatgggtactgaaaagttgggatatttgagtttttattgagaaaaggaagagaatagctcaaagaagcctaaacaaagtcccacaggataataaacagagctacagacactgttgtctcaccatctgtttgagagttcctctggaatattgtgcttgcctctggattggcagaaaggttaaactccaaagctatatgtatagagggagaaaagaaaaaagatgtaatcatttataaaaatttatcaactcatttattcaactgctgcttattcgacaagagccataaataaatggtcccatgccagcctgggagaatgagatgagagagcaagaactgggcgattgggaggggaggcgaaaagaaactgactggactcggtggggaaatactaaggggtgggaattcaaggcagagccagcttttgttcctggccagctcccgggaaagctggctacaagcagaaaggagctcgaagtgggggatgcctcaaagggaaccttggggacagtagcagccagaggcaaaccgagggtagatggcacctatcacctcctcaccttcaggcatctcccggtcacgaacgtggtgcatgtggaggtcctcaccaacttcaacagtcacctcagcaggctgtacagcagcagccatgggcgctcctgccatcctgtccccagctcctgcctcatagatctcagattcagagggacacaccgacccctgctgctggtcaaactcgaggctgacgctagggtgcacacgacaggtcagtatgttccccatggggcgcctctactgtctgccaccacctgtgcctctgctcacagctttggccacgcactcccgctgtcctaggccgaggctatgctgcacttgcagagatggtcttcccgctcctcgcctgcccacctcacagcgcggccccgggcaccagccctggccctggccctggccccggccccggctagggctgcgggccaaggcccgcaccctgctgcctcccctgagttgacttgtctgggagggtgaagaccagccggcttatttaataggttgtgaacccaacaagtgctgagagacacaacaactgcctgaagagagaacagacggagctcctcctccttctgtagtcacctacagactgaagcccactggccccaggtgggagcccaggcatgtggcacacaatgccccaccccacacttcacaatgccctccccgacacctcacagtgccccaccctgcctgccacccctccccaacagctcagaatgcccctgccttggctgccccaccctgtggcttatgatgctgctgctctcctggcccctcgtgcagtgccattgggactaaggttttcattcatcaccagcttcctgagattttagtcctaagaaaagcaaagggtagttcattacttgaagccatcttcctctatgagttctatacaaagcctcagtagagtgggtccaattagcaaccaagttgaacaacttttatttgctgactaaatatagatacacctgaattgttgactgcttttgtaactaaacactcctctcctgtcttccaacgagtggtcatttttgtccgcaacttgaccacagcaatccctggggccctagctctactctcaataaagagttatggctgtgtgttttgaatgacaccttaggacccatcctgcctccacctccttctccataaaatagaaacctaacttgcccctccaagctctgaaatgctgaaacttaccaactcccttttctccccgctatttcttccttccgtggcagggactttcaggttttctttcttttactaacaaggcactaagcatgattttctcatacaaaatcgagagccataaagtggcttaccacagtcctatttcaataaagatgaatactcgacatctggcaagtagtgtgtgcctgacagtgtccccactgtgctatgctcatttaaccctcagaaacaatctcatgttacagattttgcagaagttgttgagacggagaaggtaagcaacctccccaaggtcacatgactgctaagggtggggccatagtttgatcccagctagtctgaattccccagttgcttaagcatgattatcagaaagtatagcagtctgttttcacactgatataaagaaatacctcaggttgggtaatttttaaaggaaagaggtttaactgactcagtttcacatggctggggaggcctcaggaaacttagaatcatggcagagggggaagtccttcaggaaacttacaatcatggcagaagggcaggtccgacttccatggtggccgcacagagagtgggaacatgtgaaggagcaactgtcaaacatgtataaaaccatcagatctcagctgggcacggtggctcacacttgtaaccctagtactttgggaggccaaggcaggtggatcaactgaggtcaggagtttgagaccagcctagctaatgtagtgaaatcctgtctctactaaaaatacaaaaattagctgggtgtggttgtgcatgcctgtaatcccagctactcaggaggctgaggcaggagaatcactggaactcaagaggcagagactgcagtgagccaagatcgtgccatggcactcctgcctggacaacagagcaagactccatcccaaaaaacaaaacaaaacaaaaccctataagatctcatgaggacttactgaatatcacaagaacagcatgaggataactgcccccgtgatccaatcacctccccctaggcccctccctcgacacatcaggattatggggattataattcatgatgagatttgggtgggggcatggcaaaaccatatcagaaagtaaaggtagaagtcaagcttggatgggaaatgacattgtagatgatgatgatgatga

SEQ ID NO: 913342 - DNA, 4001 bp, Homo sapiens
taggaaaagatcttttgatgacctttattttaacagactttttttttctttttgagatggagtcttgctctgtcacccaggctggagtgcagtggcacgatctcggctcactgcaacctctgcctcctgggttcatgccattctcctgcctcagcctcctgattagctgggactacaggcacccgttaccatgtccagctaattttttgtatttttagtagagacggggtttcaacgtgttaggcaggatggtctccgtctcttgacttcgtgatctgcccgcctcggcctcccacagtctgggattacaggcgtgagccactgcacccggccagactttaaaaaaaaaaaaaaaaaaaaaaaaaactactgtgggaaaaaggatattatgtatagaaaagtctacacttcttgatacaactaactaaaaaaagcctgatacactaaacaaaacccaaataatgtcttccctaaaagtgggtaacttgaaaagcaatttgagcaaaaatcaaggagttcaattataaataagtatatcaacaaagtgaaagatgggtttaatttttcccacaaaaagttaaaagaaataacagcaggtttagaggaagaggaaaaaataataagaaaattatatgcagttgcaaaatgtgtgactatttacaaactctaacatataactacaaaatggaccagaagaatcattatcataggaagcaaagggtcatttcaaaaatcagaggagggatgattcatatttaatttaattctgtggaaaaaatttaagtaatgtttgaggacaaaaataggtgatgtgttgaaatgcgggaaaccacagtggaaggaaaaataattcaagaaagctcagtttcagtaaccagtatctagtaaaatcttcaggacctagaggctacaatctgcattaatagtgtctgaagacctagaaatgtcattaaataccattttggataattcttgtagacttgagatgatgtctatttaaagttacaaaatagtgcccatatttctgtattcattacagaaaacaattggatatggaaaagaaactaacatgctatgccacaatctctaaagaaagattagggaagtttcagcttaaagcaagaataatcacaataaagttttacaaccctttgcaagcatatatgaaaaacttacaaaaagtctgtaatgatcttttcttaagctaagagaacagaaaaaatgagaaaaattaaattataaaatgaaactttggtttagaggtaagaaacatttgatgacagtcaagagatcagggttgtacagtgtattatgtgaatgttgtgactcattggtttcatcttggatatcataacttgacattttgtaaaagtgatttttcatgggagtttcttcaggtgccctatgaagtcctgtccctttagaagcgaataatagtcttccacattcttgagatatcttaatgaataacatcttctacagtcttccattgtttagaccttggagagacacgcattagtgactgttaaggtacctgggttattaggtgcctgtagactatgcccagtgatatgtgcattaggtacatgctccctagctgtgctgacactgactgaagctgtgaggtttcacaatgacatgtcagccaaatacatatgctcagatttaccatttatcaagaggtcttcacactatcaattgtgcaattatcattctacacacaggcagcgataaagggagtaaaaaaacacagccatggatcgggagaccaaggtacctccagaggagtccagtgggtccagaagccctttggatgttggtcagaagctcctcttgggcagagatcacagcagcagccaacaggtctggagaagaccttacagttctcatggacaaagtttgtgaaggcatcttagacaagatcttgtctttgctggttttatgatcctctgcagatgggtctattctcattacctcagccacctttcacttcctatcagttcagttcaggtctctcatgatcccaggcagcagtagttgttatcacgtaagttcattcatatatgtttatctctggggatggggggacaacttcactgtggacttaattctactggagatgagtgaccccattttaagacaacaggatcacaaattattatcacatatcagcagggcagacaatagctacgacctggggctgaaagcaggtaactctatttattctgcaaaaattctgtcttgattatggtgccagttgctgtgagggatttcctttctagaacctgtttttcacaaggtttgagtctgaactgttaacattctactgatttctgggtgaagggactgactgcaccatcctagcctgtcagagcacttgccccaatacttccactttaagagttttccaccttgtccagaactacagtccactaatcccctcattttctctcttaagagaataaacaggccaggtgcggtggctcacgcctgtaatcccagcactttgggaggctgaggcgggtggatcatctgaggtcaggagttcgagaccaacttcgcctacgtagtaaaacctcgtctctactaaaaaaaaaatcacaaaaattagccgggcgtggtggcaggcacctgtaatcccagctactcgggaggctgaggcaggagaatcccttgaacctgggaggcagaggttgcagtgagccaagactgtgccacagaactccagcatgggcgacagagtgagactccctctcaaaaaaaaaaaaaaaaaaaaaaaaagagagaaaaagagagagacagagaataaacaacccatgtcaagtacacacccacatccctcttatcccaaataccaaacacacaaaaatccaatctgtctccttctacctaagcaattgcagatagtcacattcccataattaccttaagctccctgacttgctgctcgtcctttctctggcaaaatctcatccttggatgagcccgactttgtgtttgctcaatgacaccactcacctgaaccagaaaaaatatcaaaaagtggtcagagatatcatcataaattcaaattacttacataaaaaattggccctaaatgtttccagaaatcaataaaagttttgtttctccaaagacatcatttcttcagaaacccaacgtgtataacctattttttctatgttcttctaacattcattcaacttctctcatctgatatcttgccaaatcattcaaagagaaaatatatcccattagtcaagagccaaccatattcccatcacctgagaaaatcatatgcacaggatgcgcccacctcacctttctctgcctcatgtcagaaaaagtacccctccttttgtcacaaggcaaacctgagataaaagatttagatggcctgtaattccagcactaagggaggccaatgcatgcagattatttgagtctaaaaaagaagcctaagcaacttagggaaactgcatctctcaaacaaatacaaaccattagcctagcatggtggtgtggtggcacatgcctgtagtcccagctactcagggtggggagcactgaggtgggaggatcacctgagctggaaggttgtggctgcagtgagccgtgatcacgtcactgcactccagccagggtaacagatattttttaaaggatcttctctgttaaaaataatcaaataaacaggtggccatgaggctgaggtggctgcagtgcactcaattcctccttaaataacccaaaacttgactcagtgtaaataataaaaggaaacttaagtttaaccagtcagaaaccaccaactaacatctaactagagaccttccactgtaatgttccaaatgaggccactgctccacttcacccaatcaagtattttctttttcttccacattcaccatataaaattcttcccccaccctccctaagcctctctgtgggacctctgagctgcttgcagtctggggctgcctagtttatacatttctgaa

SEQ ID NO: 913343 - DNA, 4001 bp, Homo sapiens
agccaactggatttaatatgtttatgatgcaatgttttctattttgaaaatttcagtttttattcaagaaccatattattacccagaattacttttacttagattcatctctttgcaaaattttagaggcaaaccaactaattgttttctcttttctaccagctcccatcccctgcctctgccagcagtgtagagactaaaaaactccaactttctttccttttttttttttgtgagacggagtctcgctctgtcacccaggctggagtgcattggcgtgatctctgctcactgcaacctccacctcccaggtccaggcaattctcctgcctcagccttgtgagtaggtggaactacagtcatgcgccactacacccagctaatttttgtattttttttttagtagagacagcgtttcaccatgttggccaggctggtctcgaactcctgacctcaggtgatctgcctgccacggcctcccaaagtgctgggattacaggcgtgagccaccaagcccagccaaaactgtaactttcttatctttgaacaagatgctattgtcaggaggggaagggacaaagggggagccacggcaacaaacactcttacagggaaggtctgacattttaacctgcaatctttatattacatattaaaagtctacattgacatttcatgtcttttgaaagtgttgaccatgaaccaatccccacctctcttttagaacaaggaggtaaataaagtctgttaagtcaccagcataaatctggagacacattttctgttaaagtaagaattttaaagtaatcagagcctcataggtaaactcctttgagaaaccccaaacacacacacacaaccatttttctgcagccccggctgtgacatttcacacctttcacaattattttaagcactcttttttctttttccttctgtgttcaaattacagttagaagaaactaagcagcttctatcaaggtgacttaaagcagcccattaagaataccatatagcctctcccgtggcaacctccattctgattttaaataagaaacccccaaatatttgaataggaactgtcctgagatttggctactttaacaaaggaaacaattaggcacttacctggttccttcacttaggtaccatctggataggtacaaagaaaaaataagatgggtactgaaaagttgggatatttgagtttttattgagaaaaggaagagaatagctcaaagaagcctaaacaaagtcccacaggataataaacagagctacagacactgttgtctcaccatctgtttgagagttcctctggaatattgtgcttgcctctggattggcagaaaggctaaactccaaagctatatgtatagagggagaaaagaaaaaagatgtaatcatttataaaaatttatcaactcatttattcaactgctgcttatttgacaagagccataaataaatggtcccatgccagcctgggagaatgagatgagagagcaagaactgggcgattgggaggggaggcgaaaagaaactgactggactcggtgaggaaagactaaggggtgggaattcaaggcagagccagcttttgttcctggccagcccccgggaaagctggctacaagcagaaaggagctcaaagtgggggatgccgtaaagggaaccttggggacagcagcagccagaggcaaaccgagggtagatggcacctatcacctccttaccttcaggcatctcctggtcacgaatgtggtgcatgtggaggtcctcaccaacttcaacggtcacctcagcaggctgcacagcagcagccatgggcgctcctgccatcctgtccccagctcctgcctcatagatctcagattcagagggacacaccgacccctgttgctggtcaaactcgaggctgacgctagggtgcacacaacaggtcagtatgttccccatggggcgcctctactgtctgccaccacctgtgcctctgctcacagctttggccacacactcccactgtcctaggccgaggctatgctgcacttgcagagatggtcttcccgctcctcgcctgcccacctcacagcgcggccccgggcaccatccctggccccggccccggccccggctagggctgcgggtcaaggcccacaccctgctgcctcccctgagttgacttgtctgggagggtgaagaccagctggcttatttaataggttgtgaacccaacaagcgctgagagacacaacaactgcctgaagagagaacagacggagctcctcctccttctgtagtcacctacagactgaagcccactggccccaggtgggagcccaggcatgtggcacagaatgccccaccccacacttcacaatgccctccccgacacctcacagtgccccaccctgcctgccacccctccccaacagctcagaatgcccctgccttggctgccccaccctgtggcttatgatgctgctgctctcctggcccctcgtgcagtgccagtgggactaaggttttcattcatcaccaacttcctgagattttagtcctaagaaaagcacagggtagttcattgcttgaagccatcttcctctatgagttctatacaaagcctcagtagagtgggtcccattagcaaccaagttgaacaacttttatttgctgactgaatatagatacacctgaattgttgactgcttttgtaactaaacactcctctcctgtcttccaacgagtggtcatttttgtccgcaacgtgaccacagcaatccctgcggccctagctctactctcaataaagagttatggctgtgtgttttgaatgacaccttaggacccatcctgcctccacctccttctccataaaatagaaacctaacttgtccctccaagctctgaaatgctgaaacttaccaactcccttttctccccgctatttcttccttccatggcagggactttcagattttctttcttttactaacaaggcactaagcatgattttctcatacagaatcgagagccataaagtggcttaccacagtcctatttcaataaagatgaatacttgacatctggcaagtagtgtgtgcctgacagtgtccccactgtgctatgctcatttaaccctcagaaacaatctcatgttacagattttacagaagttgttgagacggagaaggtaagtaacctccccaaggtcacatgactgctaagggtggggccctggtttgatcccaggtagtctgaattccccaattgcttaagcatgattatcagaaagtatagcaatctgttttcacactgatataaagaaatacctgaggttgggtaatttttaaagggaagaggtttaattgactcagtttcacatggctggggaggcctcaggaaacttacaatcatggcagaagggcaggtccgacttacatggtggccgcacagagagtggcaacatgtgaaggagcaactgtcaaacatgtataaaaccatcagatctcagctgggcatggtggctcacacttgtaaccctagtactttgggaggccaaggcaggtggatcaactgaggtcaggagtttgagaccagcctagctaatgtagtgaaatcctgtctctactaaaaatacaaaaattagctgggtgtggtggtgcatgcctgtaatcccagctactcaggaggctgaggcaggagaattactggaactcaagaggcagagactgcagtgagccaagatcgtgccatggcactcctgcctggacaacagagcaagactccatcctaaaaaacaaaacaaaacaaaaccctataagatctcatgaggacttactgaatatcacaagaacagcatgaggataactgcccccgtgatctgatcacctccccctaggcccctccctcaacacatcaggattatggggattataattcatgatgagatttgggtggggacatggcaaaaccacatcagaaagtaaaggtagaagtca

SEQ ID NO: 913344 - DNA, 4001 bp, Homo sapiens
catgcgccactacgcccagctaatttttgtatttttttttttagtagagacagcgtttcaccatgttggccaggctggtctcgaactcctgacctcaggtgatctgcctgccacagcctcccaaagtgctgggattacaggcgtgagccaccaagcccagccaaaactgtaactttcttatctttgaacaagatgctattgtcaggaggggaagggacaaacggggagccacggcaacaaacactcttacagggaaggtctgacattttaacctgcaatctttatattacacattaaaagtctacattgacgtttcatgtcttttgaaagttttgaccatgaaccaatccccacctctcttttagaacaagcaggtaaataaagtctgttaagtcaccagaataaatctggagacacattttctgttaaagtaagaattttaaagtaatcagagcctcataggtaaactcctttgagaaaccccaaacacacacacacaaccatttttctgcagccccggctgtgacattttacacctttcacaattactttaagcactctccttttttctttttccttttgtgttcaaattacagttagaagaaactaagcagcttctatcaaggtgacttaaagcagcccattaagaataccatatagcctctcccgtggcaacctccattctgattttaaataagaaatccccaaatatttgaataggaactgtcctgagatttggctactttaacaaaggaaacaattaggcacttacctggttccttcacttaggtaccatctggataggtacaaagaaaaaataagatgggtactgaaaagttgggatatttgagtttttactgagaaaaggaagagaatagctcaaagaagcctaaacaaagtaccacaggataataaatagagctacagacactgttgtctcaccttctgtttgagagttcctctggaatattgtgcttgactctggattggcagaaaggttaaactccaaagctatatgtatagagggagaaaagaaaaaggatgtaatcatttataaaaatttatcaacttatttattcaactgctgcttattcgacaagagccataaataaatggtcccatgccagcctgggagaatgagatgagagagcaagaactgggcgattgggaggggaggcgaaaagaaactgactggactcggtggggaaagactaaggggtgggaattcaaggcagagccagcttttgttcctggccagcccccgggaaagctggctacaagcagaaaggagctcgaagtgtgggatgcctcaaagggaaccatggggacagcagcagccagaggcaaaccgagggtagatggcacctatcacctcctcaccttcaggcatctcccggtcacgaacgtggtgcatgtggaggtcctcaccaacttcaacagtcacctcagcaggctgtacagcagcagccatgggcgctcctgccatcctgtccctagctcctgcctcataggtctcagattcagagggacacaccgacccctgctgctggtcaaactcgaggctgacgctagggtgcacacgacaggtcagtatgttccccatggggcgcctctactgtctgccaccacctgtgcctctgctcacagctttggccacgcactcccgctgtcctaggccgaggctatgctgcacttgcagagatggtcttcccgctcctcgcctgcccacctcacagcgaggccccgggcaccagccctggccccggccccggctagggctgcgggccaaggcccgcaccctgctgcctcccctgagttgacttgtctgggagggtgaagaccagccggcttatttaataggttgtgaaaccaacaagcgctgagagacacaacaactgcctgaagagagaacagacggagttcctcctccttctgtagtcacctacagactgaagcccactggccccaggtgggagcccaggcatgtggcacacaatgccccaccccacacttcacaatgccctccccgacagctcacagtgccccaccctgcctgccacccctccccaacagctcagaatgcccctgccttggctgccccaccctgtggcttatgatgctgctgctctcctggcccctcgtgcagtgccattgggactaaggttttcattcatcaccagcttcctgagattttagtcctaagaaaagcacagggtagttcattccttgaagccatcttcctctatgagttctatacaaagcctcagtagagtgggtcccattagcaaccaagttgaacaacttttatttgctgactgaatatagatacacctgaattgttgactgcttttgtaactaaacactcctctcctgtcttccaacgagtggtcatttttgtccgcaacttgaccacagcaatccctggggccctagctctactctcaataaagagttatggctgtgtgttttgaatgacaccttaggacccatcctgcctccacctccttctccataaaatagaaacctaacttgcccctccaagctctgaaatgctgaaacttaccaactcccttttctccccgctatttcttccttccatggcagggactttcaggttttctttcttttactaacaaggcactaagcatgattttctcatacacaatcgagagccataaagtggcttaccacagtcctatttcaataaagaggaatactcgacatctggcaagtagtgtgtgcctgacagtgtccccactgtgctatgctcatttaaccctcagaaacaatctcatgttacagattttacagaagttgttgagacggagaaggtaagtaacctccccaaggtcacatgactgctaagggtggggccatagtttgatcccagctagtctgaattccccaattgcttaagcatgattatcagaaagtatagcagtctgttttcacactgataaagaaatacctgaggttgggtaatttttaaaggaaagaggtttaactgactcagtttcacatggctggggaggcctcaggaaacttacaatcatggcagagggggaagtccttcaggaaacttacaatcatggcagaagggcaggtccgacttacatggtggccgcacagagagtgggaacatgtgaaggagcaactgtcaaacaagtataaaaccatcagatctcagctgggcacggtggctgacacttgtaaccctagtactttgggaggccaaggcaggtggatcaactgaggtcaggagtttgagaccagcctagctaatgtagtgaaatcctgtctctactaaaaatacaaaaattagctgggtgtggtggtgcatgcctgtaatcccagctactcaggaggctgaggcaggagaatcactggaactcaagaggcagagactgcagtgagccaagatcgtgccatggcactcctgcctggacaacagagcaagactccatcccaaaaaacaaaacaaaacaaaaccctataagatctcatgaggacttactgaatatcacaagaacagcatgaggataactgcccccgtgatccaatcacctccccctaggcccctcactcgacacatcaggattatggggattataattcatgatgagatttgggtgggggcatggcaaaaccatatcagaaagtaaaggtagaagtcaagcttggatgggaaatgacattgtagatgatgatgatgatgatgatgatgatgatgatgattattttgagatgaagttttgctcttgttgcccagtgaaattgtttctctaatttcattttcagattgtgtcttgtagatgtatagaaatacaattgataaatgattctggctattaaccttttatgcttcaaccttgctgaacactattttttttttttttttgagacggagtttctctcttgttgcccaggcaggagtgcaatggcatgatcttggctcactgcaacctccgcctcccgggctcaagcgattctcctgcctcagc

SEQ ID NO: 913345 - DNA, 4001 bp, Homo sapiens
attacttttacttagattcatctctttgcaaaattttagaggcaaaccaactaattgttttctcttttctaccggctcccatcccctgcctctgccagcagtgtagagactaaaaaactccaactttctttccttttttttttgtgagacggagtctcgctctgtcacccaggctggagtgcattggcgtgatctctgctcactgcaacctccacctcccaggtccaagcaattctcctgcctcagccttgtgagtagctggaactacagtcatgcgccactacgcccagctaatttttgtattttttttttttagtagagacagcgtttcaccatgttggccaggctggtctcgaactcctgacctcaggtgatccgcctgccacggcctcccaaagtgctgggattacaggcgtgagccaccaagcccagccaaaactgtaactttcttatctttgaacaagatgctattgtcaggaggggaagggacaaagggggagccacggcaacaaacactcttacagggaaggtctgacattttaacctgcaatctttatattacacattaaaagtctacattgacatttcatgtcttttgaaagttttgaccatgaaccaatccccacctctcttttagaacaaggaggtaaataaagtctgttaagtcaccagaataaatctggagacacattttctgttaaagtaagaactttaacagaaaagagcttcataggtaaactcctttgagaaaccccaaacacacacacacaaccatttttctgcagccccggctgtgacattttacacctttcacaattattttaagcactctccttttttctttttccttctgtgttcaaattacagttagaagaaactaagcagcttctatcaaggtgacttaaagcagcccattaagaataccatatagcctctcccgtggcaaactccattctgattttaaataagaaatccccaaatatttgaataggaactgtcttgagatttggctactttaacaaaggaaacaattaggcacttacctggttccttcacttaggtaccatctggataggtacaaagaaaaaataagatgggtactgaaaagttgggatatttgagtttttattgagaaaaggaagagaatagctcaaagaagcctaaacaaagtcccacaggataataaacagagctacagacactgttgtctcaccatctgtttgagagttcctctgtaatattgtgcttgccctctggattggcagaaaggttaaactccaaagctatgtgtatagagggagaaaagaaaaaagatgtaatcatttataaaaatttatcaactcatttattcaactgctgcttattcgacaagagccataaataaatggtcccatgccagcctgggagaatgagatgagagagcaagaactgggcgattgggaggggaggcgaaaagaaactgactggactcggtggggaaagactaaggggtgggaattcaaggcagagccagcttttgttcctggccagcccccgggaaagctggctacaagcagaaaggagctcgaagtgggggatgcctcaaagggaaccttggggacagtagcagccagaggcaaaccgagggtagatggcacctatcacctcctcaccttcaggcatctcccggtcacgaacgtggtgcatgtggaggtcctcaccaacttcaacagtcacctcagcaggctgtacagcagcagccatgggcgctcctgccatcctgtcctcagctcctgcctcatagatctcagattcagagggacacaccgacccctgctgctggtcaaactcgaggctgacgctagggtgcacacgacaggtcagtatgttccccatggggcgcctctactgtctgccaccacctgtgcctctgctcacagctttggccacgcactcccgctgtcctaggccgaggctatgctgcacttgcagagatggtcttcccgctcctcgcctgcctacctcacagcgaggccccgggcaccagccctggccccggccccggctagggctgcgggccaaggcccgcaccctgctgcctcccctgagttgacttgtctgggagggtgaagaccagccggcttatttaataggttgtgaacccaacaagcgctgagagacacaacaactgcctgaagagagaacagacggagctcctcctccttctgtagtcacctacagactgaagcccactggccccaggtgggagcccaggcatgtggcacacaatgctccaccccacacttcacaatgccctccccgacacctcacagtgccccaccctgcctgccacccctccccaacagctcagaatgcccctgccttggctgccccaccctgtggcttatgatgctgctgctctcctggcccctcgtgcagtgccagtgggactaaggttttcattcatcaccagcttcctgagattttagtcctaagaaaagcaaagggtagttcattcctcgaagccagcttcctctatgagttctatacaaagcctcagtagagtgggtcccattagcaaccaagttgaacaacttttatttgctgactgaatatagatacacctgaattgttgactgcttttgtaactaaacactcctctcctgtcttccaacgagtggtcatttttgtccgcaacttgaccacagcaatccctggggccctagctctactctcaataaagagttatggctgtgtgttttgaatgacaccttaggacccatcctgcctccacctccttctccataaaatagaaacctaacttgcccctccaagctctgaaatgctgaaacttaccaactcccttttctccccgctatttcttccttccgtggcagggactttcaggttttctttcttttactaacaaggcactaagcatgattttctcatacaaaatcgagagccataaagtggcttaccacagtcctatttcaataaagatgaatactcgacatctggcaagtagtgtgtgcctgacagtgtccccactgtgctatgctcatttaaccctcagaaacaatctcatgttacagattttgcagaagttgttgagacggagaaggtaagtaacctccccaaggtcacatgactgctaagggtggggccatagtttgatcccaggtagtctgaattccccaattgcttaagcatgattatcagaaagtatagcaatatggcgttgtttgccaacgggcaatgagtactgctgttgctccctgttctatgtcctggccatcttcagccatgtccatggccgactctaaatccgcatagcagggccccttgaagcactgctggatctgccctctgctttcactggccctgcttctgcacagtctcaggcatctgagtgggtgatgggattgcatccatccctatgagggtccagctcgctctgtagcccaagctggagtgcaatggcgcgatctccgctcactgcaagctccgcctcctgggttcacgccattctcctccttcagcttcctgagtagctgggactacaggcgcccgccaccatgcccagctaatttttttgtgtgtttttagtagagacggggtttcacagtgttagcgaggatggtatctatctcctgacctcgtgatccgcccgcctcggcctcccaaagccgaggattacaagcgtgagccaccgcgcctggcctagaattattgttataaaatgtctcatgtcactctcaggagtaattaggcaacttcatttccgtacatcagtggcatgggcaactacatattttagaaatttactgttattttcttatttccaggcttcctcaaatgtttcaggttcaaagccctggcctcccactgtcttcccacaacccagctctgtatcctgccccctccctcccctgcacctggcattgcacagaaggtgtgagtgtcccttaaatgcttctgcgaggcttagcttactcctgcaatgtctgtgcctattagta

SEQ ID NO: 913346 - DNA, 4001 bp, Homo sapiens
ccatattattacccagaattacttttacttagattcatctctttgcaaaattttagaggcaaaccaactaattgttttctgttttctaccggctcccatcccctgcctctgccaacagtgtagagactaaaaaactccaactctttccttttttttttgtgagacggagtctcgctctgtcacccagcctggagtgcattggcgtgatctctgctcactgcaacctccacctcccaggtccaagcaattctcccgcctcagccttgtgagtagctggaactacagtcatgcgccactacgcccagctaatttttgtattttcttttttagtagagacagcgtttcaccatgttggccaggctggtctcgaactcctgacctcaggtgatccgcctgccacagcctcccaaagtgctgggattacaggcgtgagccaccaagcccagccaaaactgtaactttcttatctttgaacaagatgctattgtcaggaggggaagggacaaagggggagccacggcaacaaacactcttacagggaagtctgacattttaacctgcaatctttatattacacattaaaagtctacgttgacgtttcatgtcttttgaaagttttgaccgtgaaccaatccccacctctcttttagaacaaggaggtaaataaagtctgttaagtcaccagaataaatctggagacacattttctgttaaagtaagaattttaaagtaatcagagcctcataggtaaactcctttgagaaaccccaaacacacacacacaaccatttttctgcagccccggctgtgacattttatacctttcacaattattttaagcactctccttttttctttttccttctgtgttcaaattacagttagaagaaactaagcagcttctatcaaggtgacttaaagcagcccattaagaataccatatagcctctcccgtggcaacctccattctgattttaaataagaaatccccaaatatttgaataggaactgtcctgagatttggctactttaacaaaggaaacaattaggcacttacctggttccttcacttaggtaccatctggataggttcaaagaaaaattaagatgggtactgaaaagttgggatatttgagtttttattgagaaaaggaagagaatagctcaaagaagcctaaacaaagtcccacaggataataaacagagctacagacactgttgtctcaccatctgtttgagagttcctctggaatattgtgcttgcctctggattggcagaaaggttaaactccaaagctatatgtatagagggagaaaagaaaaaggacgtaatcatttataaaaatttatcaactcatttattcaactgctgcttattcgacaagagccataaataaatggtcccatgccagcctgggagaatgagatgagagagcaagaactgggcgattgggaggggaggtgaaaagaaactgactggactcggtggggaaagactaaggggtgggaattcaaggcagagccagcttttgttcctggccagcccccgggaaagctggctacaagcagaaaggagctcgaagtgtgggatgcctcaaagggaaccttggggacagcagcagccagaggcaaaccgagggtagatggcacctatcacctccttaccttcaggcatctcccggtcacgaacctggtgcatgtggaggtcctcaccaacttcaacagtcacctcagcaggctgtacagcagcagccatgggcgctcctgccatcctgtcctcagctcctgcctcatagatctcagattcagagggacacaccgacccctgctgctggtcaaactcgaggctgacgctagggtgcacacgacaggtcagtatgttccccatggggcgcctctactgtctgccaccacctgtgcctctgctcacagctttggccacgcactcccgctgtcctaggccgaggctatgctgcacttgcagagatggtcttcccgctcctcgcctgcccacctcacagtgcggccccgggcaccagccctggccccggccccggccccggccccggctagggctgcgggccaaggcccgcaccctgctgcctcccctgagttgacttgtctgggagggtgaagaccagccggcttatttaataggttgtgaacccaacaagcgctgagagacacaacaactgcctgaagagagaacagacggagctcctcctccttctgtagtcacctacagactgaagcccactggccccaggtgggagcccaggcatgtggcacacaatgccccaccccacacttcacaatgccctccccgacacctcacagtgccccaccctgcctgccacccctccccaacagctcagaatgcccctgccttggctgccccaccctgtggcttatgatgctgctgctctcctggcccctcgtgcagtgccaatgggactaaggttttcattcatcaccagcttcctgagattttagtcctaagaaaagcacagggtagttcattcctcgaagccagcttcctctacgagttctacacaaagcctcagtagagtgggtcccattagcaaccaagttgaacaacttttatttgctgtctgaatatagatacacctgaattgttgactgcttttgtaactaaacactcctctcctgtcttccaacgagtggtcatttttgtccgcaacttgatcacagcaatccctggggccctagctctactctcaataaagagttatggctgtgtgttttgaatgacaccttaggacccatcctgcctccacctccttctccataaaatagaaacctaacttgtccctccaagctctgaaatgctgaaacttaccaactcccttttctccccgctatttcttccttccatggcagggactttcagattttctttcttttactaacaaggcactaaacatgattttctcatacaaaatcgagagccataaagtggcttaccacagtcctatttcaataaagatgaatactcgacatctggcaagtagtgtgtgcctgacagtgtccccactgtgctatgctcatttaaccctcagaaacaatctcatgttacagattttacagaagttgttgggacagagaaggtaagtaaacccccccaaggtcacatgactgctaagggtggggccatagtttgatcccaggtagtctgaattccccaattgcttaagcatgattatcagaaagtatagcagtctgttttcacactgatataaagaaacacctgaggttgggtaatttttaaaggaaagaggcttaattgactcagtttcacatggctggggaggcctcaggaaacttacaatcatggcagagggggaagtccttcaggaaacttacaatcatggcagaagggcaggtccgacttacatggtggccgcacagagagtgggaacatgtgaaggagcaactgtcaaacatgtataaaaccatcagatctcagctgggcacggtggctcacacttgtaaccctagtactttgggaggccaaggcaggtggatcaactgaggtcaggagtttgagaccagcctagctaatgtagtgaaatcctgtctctactaaaaatacaaaaattagctgggtgtggttgtgcatgcctgtaatcccagctactcaggaggctgaggcaggagaatcactggaactcaagaggcagagactgcagtgagccaagatcgtgccatggcactcctgcctggacaacagagcaggactccatcccaagaaacaaaacaaaacaaaaccctataagatctcatgaggacttactgaatatcacaagaacagcatgaggataactgcccctgtgatccaatcacctccccctaggcccctccctcgacacatcgggattatggggattataattcatgatgatatttgggtggggacatggcaaaaccatatcagaaagtaaaggtagaagtcaagcttggatgggaaatgacattgtaga

SEQ ID NO: 913347 - DNA, 4001 bp, Homo sapiens
cacacacacacaatctgatttacacaaaaatttgctcagtcaatcctgttttctctgccaagagcatccaccctgatctcaagggtattattccacaataagcagcccataggactactgaaaaaccaggaagttacatttatgccaaagctgttcagaggttgtgcctcagaagacacacagcaggaaccgtgtgggctctgatcaaagcaagaatgtcatcccagagttgctccagtattgcttcacaaatattacaaataaaacacgatgctttttgagtcgtcatggctcacacaaagggtaggtttcaacatcagcctctggagagccacattcccagagtggccgtcccggataagaaggccactacagcacgactcacagcaccatggaggtttcctccacctgcgggacacagcaggatggagacggttgggcggcctcccttcctgggacactccatggccagcccctcagggactacttgaagaacagaacccccaaaagaccagtttctgaaaagggactcaaagtctaagggaggcagcctccttttatccccaggggagggcagctctggggcagacaggttcatctggatgtcatattcactcccgcacagaaaacctaggccaagcaatttgtccatcctcctcagagccagttttgtggtccccatggtctgcccaccacctgtacctggacgctggcttcatttggccaccagacaaaagtcaggctggccctggagtccaccggcctgcccagcccatcacttctgggctaggtagtgctaagcctgcccagcccaccctggctggggctcagtgccctcttcttggtgacacactgtgctccttggagaactcctctctaggtgctggggtgagggcaggtgtgatctgagatcccggggctctctggcaggtgcatgcacgcacactggaacctgatacaggcttttgaacacaggtgcacagtccagaaacctgcaagtcccatcccaaactatatctgactctctgccctatgcctgtcctcctacaggatcatcagcccccaagagacctcaccactccccatcctcaccttaaattccagggtcaaaaagactctccttgtagggaaaggtagggtgtgttgatcaggtggtgttggaaggagagccccaatataggccactaattcagttccaggtggactgcacgcgtcccatcagagttagtttactcaccgctggtctttgtccctgcagcacccagggcttcgggaagggagaagcagacttcctagtgctgcaccccccagctcccccgagcctatgggcactgggttgactccagtttctttcctcttagagactgaggtttctccctttcctctcacacctgcttctgtccggaccggccgcttctacccagcggaccctcggacggtcctcgcaagatccgggttacacccgccccgtgttccctcttccccggttcgcccttcccggcctaagcccatcttccttaggaaaacttagcagggatttaggggccaaaccaggagggtggagttttctttgccctcggccaggagcacatctccctgttgcgttttttgggggagacagagaggggcgggcctgagtcgagtatccctctcctcgcagcgccacaactgcgcgcaccgacctccccacgccagacgcggcgtgagccaggcctctaatccgctcgcccctcttccgggtcccggtcccgcccggggcgcccggggtctcgagagcccgcctggcggcgcgatctcacctgtcggccgcgcccgcgcgctctcgctccggctcccgctcccgctcccgctcccgcttggtcgtcttcccgagttactgacccgaggcgctcccgggcggggcgtgactcagcactcgtgctggtccccgaccccgcggcaacgccccggccaggccccggaaacggtcctggcacgctggggctggtctccgaacggcccgccggactaaccttgaccctgagcgaacggccttgaactttgaaacaaatgctcccatggccagatgtcgcctctccggctcctgccagcacccgcgccccagtcctgccgagccattcagacttggtttaaagtgtcctttcagcatactttaaagcaaaaaagagagagagagagagagagagagagagagagagagagagagagagagagagagagagaaggaaggaaggaaaacaagcatccccctgttcctctgattttctcgaggacacctttaaagccactggaaccttggagagtggggttcccctcacacgttgggcgcactgccaacatccttccttcagacatacacataataattccgcaaaccctgttgagctcctacatttgccaggcactgtgctaggcgttggagggataacttggagagaaaactgacaaggttcctgctttcacggaggcgacagtctgggaaaagacagatattaaacacaccaccaaaaaatacatgtatagagaaaacaaaaaccatgtatcaccaactgcagtaagaaagattgggcatggccaggcacggtggctcatgcctacagtcccagcacttagggaggccaaggcgggaggatcgtttgagcccaggagttggagaccagcctgggcaacatagcgagacctacaaaaattagccgggcttgttggtgcacacctgtagtcccagcttctcgggaagctgaggtgggaggattgcttgagcccaggagtttgaggctacagtgaaccatgatcattccactgcactccagcctaggtgactgtgagattctgtctcaaaaaaaaaataataataataataataataaatgaaatgaaatgaaaaaataaaaaagaaagactgagggcaaaggaagggtgcaaatacttctctccaaggatgagaaagaggtagatttaggtaaagaggaaggaagtgtggtctggatgtgcaaagacccacaggcaggacaatgacctggaaggcagtgtattgccagctcaaatcagaccaagctaactcagcgaaagataagccatctccatctacttactgcaaatattagcacctactttaagagttgtggataagggccaggcacggtggctcacgtctgtaatccgagcactttgggaggccgaggtgggtggatcacctgaggtcaggagttcgagaccagcctggcaaacatggtaaaacactgtctctacaaaaaattagcctggcatggtggcacatgcctgtagtcccaactactcaggaggctgaggcaggagattcacttgaaccaggaaggcagaggttgcagtgagcggaggtcatgccattgcactccagcctgggcaacaagagcgaaactccatctctaaaaaaagaaaaaaagagttgtggaaaggcctcaatgagatcatttttataaagtgttttaacatggtgcctggcacacagtagcaatgaatacacagcagccatttattatagatattttatattgcagattattttgcccaaggcaaccagaatgatttatttttgatgaaaaatcctactcatcgtcttagaaaaacaataagctaatatttattgatcacgaactaagtgctttgaatgacttctcaagtttttttgtttgtttttgtttttttcacaaaggtcctgcaaggtaagttttattaatctccattttgcagataaggaaatttaggctcctagaggctaaagaatttaggcaaggtccctcagctagtaaagcaagggggtgggcctacaatggaggtctgaaccatgacccctttttggggggtagggggacgaatctggctctgtcgcttaggctggagtgcagtggcatgctctcggctcactgaagcctccaccttccaggctcaagcgattctcatgcctcagcctcccaagcagctggaattacaggcacctgccaccacacccggctatagtagaa

SEQ ID NO: 913348 - DNA, 4001 bp, Homo sapiens
caaaaaaagaaattaacacgaggaaatagccacatggaaggaaatatgaaggaatacagtgtaagctcctgtgattcctctcccaccatattgcacagaatgcactgactttacccggaatcatattttgtcaatgtatgtgaactgttgtctacaagagatgctctctacatactccattactaagattttgtctgggactggttacattgactcactctgcttcgcaggcacaaaacttccaaaagtctccaaaaggaaagcaggtgcacagaaactccgcagtttgcacaagcagttacttacagccaccattcttatcagttaggaaatagtgagaaatccaccttatcagataccagcaggtttatatgggaaacaggcctgtctatggatagcagtctattatgtcaagtcttttctacacagccattagccattctgtcggcatgacagaactaaatagtaggtgtaaaaatgtatactctaaggatattgatttgtataagaaatagactgcaaggagtaagtgattagcaaaatggggttcagttccataagttcaaggcaactcttttaggaaacatatgattgcagtgaaatttacaattattgacttacgtaacaaatttggatacagatttgaaagtatatcttttaaatgacaaaaacagaaacaaagcaaactgttttcctatctggaaagtatttcagaggctttctttttcccatagaattacaaggaactagatactgggtctcacagccctctcctcataccatccttgatcatttctttgctgtatgagtactcaaaggcttaccaaagctggagctttagtggtatcctcatctttacttcctctccatgtcaatttatattacaaagtaaaccactcctgtcaatggtcttcaaaatgtccctttgtaaatccttatattgtatagatcagaaatgtgaaacccaaattttatgtaactagtccctattcacacacattgtattcccaagacagtcttgagatacaagttttcttccagtgtagaaatagctaagtctagaaaagaaaatctattccattaattttcctgtcagagaaacaagaaatttttctgttacaatattttgatacaaatttgacccatattaacaaagaaaaagaatttaaattttccttgttaggttctagtattttttttttcttaaaatgaggatattttatcgtttcaggtaattttcccagaggtgagaatagtacatgagaaattctctttaggccaggtctagtattacagtgtggtgctcaaggccgcccatcagaacagtgatactctcccaacagatttcatccaccccgtctccactaacttttgccataaaaattcctctgaattgtatcttcttggaagaagtaaatatctgttcgactatacaaagaaacagagaaaccactcccattgcaatcaatcttcaagagagggagcaggcaagccgtgttctttctgctgagttgtatagactctgacaagctgtgaaataaacataaacagaagacaaaacagtgccacaaataagcagtagatgaccctgtgacaagatggcattgcagaacaaagactgacgtttaaaggggagtcatgcagagtaacataggaacacaagcctgacaacctggtcagcttccacttactctagctcctttgaactctcaacactaaaaatattattgttacctctgcaggcgcataggtgccaaatcccaggacaggcatgaagtgaccatcattcagcttcacacactgatatttcgaatccatttctgtcactagcctggctggcaaatgtttctttcttcctccctcacaggctataagagcaatgagctggcaacgcccctgagcacactgtctgctggttaaccaatggcatgtgagaggagggacagaggcagtcttacacaagctgtgataaaaattgcatccagttcaaccgtttcttacctaagaaaattcataagtaaattattatgtggtcatgatacactcattaatttcctctgaagtatttttgctattccagatctctatatatgagacataaattactcaaagagatttgtagaacaaattgtgactttacataagaatacagaaacctctagcggcacagctcttttttgtttgtgtcatgatgatgagttccttctgcatcttgcagcatttgaaatgactaattttcatttttctctctctcacacacacaatttaaaggaatgactaatgagcatttctttaaaatattgccctcaattaaaaattaaagttaaaattttttaatgcattacttttttcatcagcaaatttattgttcctttcttattagccttgtaagagaaacatcccttcctgatcaaggtgcagtcctgataaagttgtaatcctgatgtgggtgtaaataaaaaagaaaatatgatgtggttttattggaagatttcttattaacagcttttggactttggatataatttgtaacatgcaaacagtgccttatttgtcttttccagccatttttatgaattgctaccaaaaagtaacaagccaaaatatgataactattagatatactttataatattgctaaacattattcataaagaaaaactggtaactaatgacatataaactggtgaataatcctcgcatgggataatttttactttattctccctttggaggtcaggttaaaacatgattgtaatttgcatgatccatgattcacatcttggagtagtcacaacttgcagtgccctgattgcttctatttgctttttcataaaacaaacagaaattgaaaaataggtaaattgttatcattgacataaatgtaatattataaagatattgaaatttttcacagagtaatttcaacaagatggtggattctaagattcccatataactcatggaaacatcagaaaatacctaaaattgactgaaataaacttatttatttctggagtggctcagtagagattcagggtgactatacacatacagatgttataggcaaaaggccaggggaagagacatgcaatagtccatctaagccattgaggagaaactgggatgcgaaatttcataatagtaagcaattcaaaagccattggttatttggggatacataaaagggcaaacacagtccacgtaggtgcatgttcagaaacaaactaagaaggacttgaggttttatgtagggctgatgccttgactgagaacctgccacacatataagttaatgactgtcatgacatagaacaaatctatatacagtaaaaaagatgtttattttttcaaatgcccaattagataaaataacaaggcatacaggcctggagcagtggtaatcccagcactttgggaggccgaggcggccagatcacgagggcaggagatggagaccatcctggtcaacatggtgaaatcctgtctctactaaaataagaacaacaacaacaagaacaacaacaacaacaacaacaacaaatagtcggacgtggtggcggacgcctgtagtcccagctgctcgggaggctaaagcaggggaatcgcttgaacccaggaggcagaggttgcagtgagccgagatggcaccactgtactccagcctggcgacagagcaggactctggctcaaaaaaataaaataaaatgacaaggcatacaaggaaacaagaaatcacagttcattatgagaaagaaaataaattagtagaaatctttcctgaagaatcacaggcattaaaattagtagagaagcatttaaacagctgcttaaatatgctaaaattgctaatgaaaaatatggactaagaactacagaaaatctgaaaacaataagaaaatcacgatacagtagtaatatagaaattataaaaaaggaaaaaattggagcaaaaaaagtacctgaatgaagaactcaccagagggtgtttcaatagcaac

SEQ ID NO: 913349 - DNA, 4001 bp, Homo sapiens
aattaacacaaggaaatagccacatggaaggaattatgaaggaatgcagtgtaagctcctgtgattcctctcccaccatgttgcacagagcgcactgactttatccagcatcatattttgtcaatgtatgtgaactgttgtctacaagagatgccctctacatactccattgctaagattttgtctgggactggatacattgactcactctgcctagcagacacaaatcttccagtctccaaaagcaaagcaggtgcacagaaaccccacagtttacacaaacagttacgtagagccaccattcttatcagttaggaaacagggagaactccactttctcagatgccagcaggtttatattggaaataggcacatctatggatagcagtctattatgttagatcttttctacccaggttttggccattctgtctgcataacagaaccaaatactaggagtaaagatgtatactctaaggatattgatttgtgtatgtaagaaataggctgcagggagtaagtgattagcaaaatggggttcagctccataaattcaaggcaactctgtcaggaaacatatgattgcagtaaaatttacaattattgacttatgtaacaaatttggatacagatttgacagtatatcttttaaatgacaaaaacagaaacaaagcaaactatcttcccaccttgaaagtatttcagaggctttttcctgtgaaattacaaggaactagataccgggtctcacagccctctcctcataccatctttgatcttctcttcgctgtgcaagcaatcaaaggcttaccaaggccggagcttcagtggtatcctcatctttacttcctctccatgccaatttatattacaaaataaaccactcctgtcaatggtcttcaaaatgtccctttgtaactccttatgtcttatagatgagaaatgtgagactcaaattttatataactagttcctattcacacacattgtattcccaagacagtcttgagatacaagttttcttccagtgtagaaatagcatttagctatttctaaatctagaaaataaaatatattccattaattttcttgtcagagaaacaagaaatttttctgttacaatattttgatacaaatctgacccatattaacaaagacaaagaatttaaactttccttgtttggttctagtttttttttttttttcttaaaatgaggatattttattatttcaggtaattttcccagaggtgagaatagtacatgggaaattctctttaggccaggtctagtattacagtgtggtgctcaaggccgcccatcagaacagtgatactctcccaacagatttcatccaccccgtctccactaacttttgccataaaaattcctctgaattgtatcttcttggaagaagtaaatatctgttcgactatacaaagaaacagagaaaccactcccattgcaatcaatcttcaagagagggagcaggcaagccgtgttctttctgctgagttttatagactctgacaagctgtgaaataaacataaacagaagacaaaacagtgccacaaataagcagtagatgaccctgtgacaagacggcattgcagaacaaagactgacgtttaaaggggagtcatgcagagtaacataggaacacaagcctgacaacctggtcagcttccacttactctagctcctttgaactctcaacactaaaaatattattgttacctctgcaggcgcataggtgccaaatcccaggacaggcatgaagtgaccatcattcagcttcacacactggtatttcgaatccatttctgtcactggcctggttagcaaatgtttcttcctccctcacaggctataagagcaatgagctggcaacgcccctgagcacactgtctgctggttaaccaatggcatgtgagaggagggacagaggcagtcttacacaagctgtgataaaaattgcatccagttcaaccgtttcttacctaagaaaattcataagtaaattattatgtggtcatgatacactcattaatttcctctgaagtatttttgctattccagatctctatatatgagacataaattactcaaagagatttgtagaacaaattgtgactttacataagaatatagaaacctctagcggcacagctcttttttgtgtgtgccatgatgatgagttccttctgcatcttgcagcatttgaaatgactaattttcatttttctctctctcacacacacaatttaaaggaatgactaatgagcatttctttaaaatattgccctcaattaaaaattaaagttaaaatttttaaatgcatgactttttttcatcagcaaatttattgttcctttcttattagccttgtaagagaaacatcccttcctgatcaaggtgcagtcctgataaagttgtaatcctgatgtgggtgtaaataaaaaagaaaatatgatgtggttttattggaagatttcttattaacagcttttggtctttggatataatttgtaacatgcaaacagtgccttattggtcttttccagtcagttttataagttactaccaaaaagtaacaagccaaaaacctgataactattagatatactttataatattgctaaacattattcataaagaaaaactggtaactaatgacatataaactggtgaataatcctcacatgggataatttttactttattctccctttggaggtcaggttaaaacaagattgtaatttgcatgatccatgattcacatcttggagtagtcacaacttgcagtgccctgattgcttctatttgctttctcataaaacaaacagaaattgaaaaataggtaaattgttatcattgacataaatgtaatattataaagatattgaaatttttcacagagtaatttcaacaagatggtggattctaagattcccatataactcatggaaacatcagaaaatacctaaaattgactgaaataaacttatttatttctggagtggctcagtagagattcagggtgactatacacatacagatgttataggcaaaaggccaggggaagagacatgcaatagtccatctaagctattgaggagaaactgggatgcaaaatttcataatagtaagcaattcaaaagccattggttatttggggaaatataaaagggcaaacacagtccacataggtacatgttcagaaacaaactaagaaggacttgagttttacgtagggctgatgccttgactgagaacctgccgcacatataagttaatgactgtcatgacatagaacaaatctatatacagtaaaaaagatgtttattttttcaaatgcccagttaaataaaataacaaggcatacaggccaggcacggtggttcacacctgtaatcccagcactttgggaggccaaggtgagcagatcacgaggttaggagatggaaaccatcctggccaacatggtgaaaccccgtctctactaaaatccaaaaaaaaatagatggacgtggtggtgagcacctgtagtcccagctactcggtaggctaaagcagaggaatcgcttgaacccaggaggcagaggttgcagtgagccgagatggcaccactgcactccattctggtgacagagcaagactccagctcaaaaaaataaaatgacaaggcatacaaagaaacaagaaatcacagtccattatgaggaagaaataaatcagtagaaatcattcctgaagaatcacaggcattagaattagtagagaagcatttaaacagctgtcttaaatatgctaaaattgctaatgaaaaatatggattaagaactacagaaaatctgaaaaaataagaaaatcacaatatagtattaatacagaaattataaaaagaaaaggaaacaaattggagctaaaaaatatacctgaatgaaaaactcaccagagagtgtttcaatagcaaatttgagcaggatgaagatataatc

SEQ ID NO: 913350 - DNA, 4001 bp, Homo sapiens
agtcagcctccatgattcaatcacctcccaccaggccccttccccaacagtgggaactagaatttcacatgtaatttgggtggggacacagagccaaaccatatcactccgccccagccccttccaaatctcacattcttttcacatttccaaagataattatgccttcctaacagtcccccaaagtcttaacttatttcagcattagctcaaaagtccaattctaaagtctcatctgagacaaggcaagtcccttccaactatgagtcataaaatcaaaaataggttagttactttctagatacaatggaaatggggtattgagtaaatgcttctgttccaaaatggagaaattggcccaaacaaaggggctacaggccccataaaagtccaaaacccagaaaggcagtcaataaatttcaaagctccgaaataatctctattgactccatgtctcatatcaaggccacactaatgcaagaggtgggctcccagggtcttgggcagctctacctctgtggctatacagggtaaaggccccatggctgctttcactggctggcattgagtgtctgcagcttttccaggcacacagtatgagctttcagtggatataccattctgggttctggaggatggtggccctcttctcatagctccactaggcagtgccccagtggaaattttgtgtgggagctcaaaccccacattccccctccacactgccctagaagaagttctccatgagtgttccacccttgcagcaggcttctgcctggacgtccatgcatttttatacattctctgaaatctaggcagaggcccccaagcctcatctcttagtctctgagcaggcacaggcttaaaactacatggaagtcaccacacattggggctagcatcctctaaaacaatagctcaggatgtatctgaggcccttttagccatggctggggctgaagtggctggtatgcagggtgccatgtcccaagacttcacagagcagtaggaccctgggcttggcccatgaaattatttttctctcctaaacctccaggtctgtgatagaaggggttaccttgaaggtctctgaaataccttggaggcatttttccctattgtcttggctattaacatttggctcttctttactcatgcaaatttctgcaaccaccttgaattcttcctcagaaaataatattttcttttctgctacatggccaggctcaagttattcaaacatttatcttctgcttcccttttaaatatgagttccagtttcagataatctctttgggcatgcacgtgagaatatgctgttagaggcagccaggccacatcttgcttgctttgatgcttagaaatttcttccatcagataccctaaatcatctcactcaagctcaaagtgacacagatctctagggtaggaacacgatgatgccaatctttttgctaaagcataggaagagtgacctttactccagttcccaataagtttctcatctccatctgagaactcctcagcctggacttcattgttcatatccctatcagcattttcttcataaccattcaagtctctaggaagtcaaaaccctccttcatctttccatcttcttctgagccctctaaactcttccaatcacacctactacctatccagttccaaatttgctttgacattttcaggtatctttatatcaatgcttcactatttagtaccaattttctgtattattttattctcccactgctataaagaactacctgagactgggtaatttacaaagaaaagaggtttaattgactcacagttctgcaggctgtacagaaggcatggcacgggaggcctcgggaaacttaccatcatgaaggaaggtgaaggggaagtaagcatgtcttcacttggctggcaggagagggagagggagagagagagagaaggtggaggtgctacacactttcaaacaaccagatctcatgagaattctattatgagaagagtaaaaggaaagtcagccctcatgattcaatctcctcccactaggcccctccttcaacaccgggaattacaatttgacatgatatttcggtggggacacagaaccaaaccatatcgtttggtattccagaatttctgccttgctgttgccaccctaacctctggtgcttcctcttagcaattttttctcctctgacctcaccgtgctctatggttataaatcccctcttgtcttacttggagtcagagttgagcttcaagggaaccaatacattttgcactaaaataaatttctttgacacatttcaagacagctattcagaagggcaggaaatacgagaagagccaaaaagctgtctttagtgggaaagacttgcatctgtagagaaaatttgcattgttacagctgggctttctctgagaatctctcttggatagaagaaagattaactgagaatctgatacctttaaaggtctaaagaaaaacatttcccagctgttctctctgagggctgcttcctgggagatttcatctaaataatgaaacctcgtttgctagccaggcttgttcttctctccatcccataacctgtgttgccactgtaaaaaattttgccaagatttaagtgcaatggtgcaatcacagtgccctgcagcgttgacctcctgggttcaagcaatccttctacttcagcctcccaagtagctgagactacagacaggtgccactacacccagctaatttttaaaatttttccttttagcagagacaagttcttgtggtgtgttccaggttggtctgagctgaagagatcctcctggctcagcctcccaaaatgctggaattattggtatgagccaccacgcctggtgatctggctgtttttcctgcattctgcctgtaattgttttttagggtctttttccacatgtctcatgttcagagtctctaaggcacatggtgtagctgagctgattcacccctgtcctgtatagagcaccatgtgggggaaagttcctggtctgctatgccatcgcccagccaaaggagggctgcctttgctctggtttcacattcctgttttaaacagtcatgcccagaattgcttggctacattgtgaccttaatgaaatatctagtttgtgaagtcacagaatttgcttttcatgaaactagaatctctttgagtttgggagtctcacatcccattagggtccctcttttagcacctcactaagattattaaaattaattaaaacttttggatgaactagaatgtctgcagaaacctctagccattttgctggttcgacaggataaccttttttccactaaagaatattagtgttagtttagtgatgaggttaatattccccatttttcccctctcccaacccaaaatgtactaggctgagtgttaaagaccaaagactaatcacttggacaaaggattccttgtatccccacaagtcctaggtatttttctctcattgagagcagagggcctgtattgatgcctggacatgggattttataccttcttggcatccagggttatacaatcaataaacagagatggtatagaaaaatcccttaaaaatgatgggtcatgccaagactacaggattttctttcctcctgtcacttgttacaatgattttcaagtggaaacttgagttctgcatttctcagtttttcttgactctcaaactagctaaacacttcattcttcattcttaagagattggcaccaaatcactttgtcctgtttgggaaatgcagtgtttctcctttgggtgcatttttgaagaccaaggcaaaaacattaaagttcatttttattttctgtgtgggtaaaacatttgattttactgaacatgctccatagttacatggcaggatgttttgattggcataaaaagtaaccaaacttccaaatgcgaagtaggtcaccggaagagtacaggactctttgtgagttgtttttctctccagt

SEQ ID NO: 913351 - DNA, 4001 bp, Homo sapiens
taaaaatgtatatgtagaaatagcacaaaaaataaagggaaaaacaaatgcctacttatccttaaatatttcattggtggtaagaattacaaatgcttgctattcttcctttcatttaataatttcctttttatgttttattttcctctatattaataaaatatcaacaatggtatctaccagtttttgagttcttacaatgtgccattgttgttatgtttttcacacattatctcatcatctctattacttgttaaaatctccactgccagcagttacataacttctgttttccctcattacatgagttactgtctatgactactaaaaccttcaaagcatgaagaaatagtaaatgccttttgttggctatagattattccaacaaaggggcttttgcatccacactccttctttgattttaaaatttcattattctcagaattgagatctccatattgcagaaaattaaatccaagtgctcctattcactccactaaggcagcctttctggaggcaaatacagtgtttgggtcatgtgcaaacatccaaagagaaaaaagaaagagatttgaaatgagtaaagacaccgaattgacaggatttagtgagcaattccatatggagaaggtgagaattggcacctggaccacaaggttgatggaaatgtttttgatctgataaggagctgagcaggtttgggagaacatgatataagcacaaattttggaaacatctaatgcggccacatgggcagtatccacagtgtgtccactagacagtagtaaaaacaccaggcctacatggaaggtgcagatttggcaatgatgtcgactgctctggaaagttccatggagtcaggagagcagaggcacaggttaacccacactgacctcaacctatagttacatatatagtcctaaatatttttaataaagtgaaattaacacagggacaaaggtacatggaaggaattacagaaggaatacagtgcaagctcctatgagtcctctcccagtgatgttgcacagaacacactgatagagagaaaagtgagactcaaatttcatgtatctagtccctaatcacaaacatagtagtctcaggacagtcttggaatacaagttttcttccagtgtagaaatagtttagtctataaaataaagtctccattttgctcacatttgtgtcagaggaccactcctatcattttgttacaaatctgatgcatatgaacaagggccaataatttaaacgtaacttgttaggttctagtcgttttttcttttctcttaaaatgaggatattttatatcctctggtaattttctcagaggtgagagtagtacatgggaaattctctttagtccaggtccagtattaccatgtggtgctcaaggccgcatatcagaacagtgatactctcccaacatatttcatgcaccccatctccactaaattttgccacaaaaattcttctgtattatgtcttcttagaagaagaaaagatttcttcagtgtagaaggaaacagagaaaccacttctattgccatcaatttccaagagaggagcaggcaggcagtgtttttcactgctgagtttcatggattctgacaagctatgaaataaacataaatagaagaaaaaaaacagtgccccaaataaacagtagatgaccatgcaaccagacttctatgcacaacaaaggttgactttttctctttgtacatacagtatagctttaacctagggaaactcaggttggagtcatgcagagtaatacacgaacacaaacctgacaacccaggtcagcttccacttattctggctttgctcttttcaactctctgcaccaaaaacattattattacctctggaggtgcataggtgccaaatcccaggacaggcatgaagtgaccatcatttagcttcaaacactgatgttttgaatccatcactgtcactcagctggctagcaaatgtttctttcttcttccctcacaggttataaaatcaatggaggcaatgccctctgcacactgcctaatggttaaccaatagcatgtaaaagaaagtatgcatgccatcttatgctggttgtgaagaaaactgaatccagttcaattgtttcttctctaataaaattcttaagtaaagcattttacaaataaactcattattttatctctgaagcagttttgcttttcagaatctctatatattacaaaaattattcaattactcaaagatatttcagaacaaattatgactgtatgtgcaactataacaacttccagctacaaatgttttttgtttgtgccatgatgatatcatttctttattgtgaatcatttgaaatgactaaccaactttcatctttctttctctcacacacacaatcttaaaaaatgactaagagttctttaaaaagattaccctcaataaaaaattaaagttaaaaccccccaaaaatggtatttttgcttttttcctcagcaaatttattgtttctttcttttttgcattgtaagaaaaatattcattgctgatgaaggtacagtactgataaagatataatcctgaatagggtgcaaatgaaaaagaaaatctgattattggagtattgattaacagcctttggactttggacgtcatttgcaatatgcaaacagtgcctttttttcttccagccagttttaatagaggctattgtaaagcaacaaaccaaaaaactgataactattttatataatttatgctcttgctaaacattattcctaaagaaaaatgagaaattacttgtttctgcctttacagggcagattaaaacatgattgttgtttgcatcatgcatgaccaatatctttgagttgttttgcaacgccctgattgcttccatttgctttttgatgaaacaacaaaaaaagagaaataggtaaattattatatattgacataatgtaatattataaagtcatgaaaattttcacagagaatgatttcagtaagatagtggattaaaaagctaacagtggacacatggaatcctcaagaaactgtctaaaattgactaaagtatatgtatttatttacccagtgtcttagtagagattcagggtgactatatgtgggcgaaggattacccaggtgccaaggcaagagattgaaggcacaaactgtttcagtataatatagaaaatagctagaataagaatagttataataaaaattagatatagagatgatcatggacattaccaatcattactacaaacattgttaatcattagcttttaatattactctttgttttattactaatataaccaaggaataaccggtaggcatacggtcaggtgctgaagggacattgtgagaagtgacctagaaggcaagaggtgagccttctgtcacgcctgcataaggacagcttgagggctccttggtcaagctgtaacaccagtgcctgggaaggcacccgttacttagcagaccatgaaagggagtctccattccttggaggagtcagggaacactctgctccaccagcttcttgtgtatccagccctgcccacagtcatccagaggcataaacccctccctgtggtgctgtgcttcaatggccatgcttcttgtccactttcatgttcctcctgtactcctggttcctctttgaagttcgtagaagataatggtagaagaaatagtgaaagtcttaaagtctttgatctttcttataagtgcatagaagaaaacactgatgtatgctgccttccctctctgcttcagctacctaaaagggaaaggccccctttcccatgatcacatgacttgcctgaccttatcaatcacttggaggactcaccctccttaccctgtccctttgtcttgtatgcaataaatatcagcacgcccagccattcggggccactactggtctccgcaacttggtggtagtggtaccctgggcccagctgttttctctttatctcttttgtctt

SEQ ID NO: 913352 - DNA, 4001 bp, Homo sapiens
cactgtggctgagaggtagttcaggcacaagcattgacttttatacaagaatcagcttttcctcctgtctgtatgtggggtgaaaagtccatctcagtttgcctgagtctttcctggttagtaataaaggttgagcatcccagaaacaccttcagtctcaggcaatctctggttgatcactgttatggaggtaccaaataacaccctcagattcagtgatttgttggaaaagttaacatgactgaaatagtcctaattatttttaatatagtgatattatacatggtaaaaatcacatggagtatagaagggaaacggtgcaagctcatatgagttctctcccagtgatattacacagaatgctcactcagacttcctccaacatcgtatttgggaaatgctgtctacaagagatgttctttggtgtctcagttcttgagattttgactggatgctagttacatcgacccaactagggttcacttgggaaataaagcatctgtgaatagtagtctattaagtcttttctgcatagtcattctggctacacaacagaactgaacactaggggtaaagatgtatactctgaggatatcgatttgtacattaaaaattcactgaaatctgttaagaatttactaaggtacagttctgccataaaaaataaggctatctctttcaggaaagacagaattccagtgaaatttaaaattactgacttattgaccaaatttggataaagatttgaaaggtattttttaatgacaaaaatataaataaactgttttcatttttacatgtatttaaagaagctttcttgtttcgttgaaattacaaggaactagataacggtctccccgccatctcctgagaacagtctttttttttttttttaaatcttttttgagagcagtctttaagtgtgccaacactcaaaggtttaccaaggctggagcttcagttgtgtcgttattttcatttcctgcccatgccaatttatattaaaaattaaaccacttttgtcactggtctagaaaatgtatccttgtagatcatcacaacttatcgataaagtgagagactcaaatttcaataattagttcctattcacacacttagtagcctgaggacagtcttggaatacaagttctatctagaaaatgaggtctccattttgttcatttttgtgtcagaagaccactcctaccactttgatacaaatatgatgcatacaaaaaaggactaagaatttagactttcctttgttaggttctagattttacttaaaatgaggtggtatttttttctttcaggaagttctttttaaaagtgaaatagtacagtggaaactctagtccaggtccggtaatactgggtggcactcactgccgcccatcagaacagtgatactctgccgacagttttgtgcacaccatatccagtaatttttgctataagtatttctctggatcgtatgttcttggaagatggaaagatttcttcagttgtagaaacagagaaatcactcctattgcaattaatctccaccagagggagatgaccaacagtgttcttcaatactgagttttacatattctgccaagctgggaactagacatgaacagaagaaagaaacagtgcacaaacgaaaaataagcagtacgtgaccataggaatggacctcaatgcagaacaaggattgcctacttttttctcctagcctaggaaacctagaccagtgagtcatccagagtaaggtaggaacacgaaccttacaacccaatacgggtttcacttctactaggtttattcttttgaaatccgaaaactaaaaggaattattcttacctctggaggtgcataggtgccaaatcccaatacaggcatgaagtggccatcatttagctttacacactggtgtttggaatccattccctgtcacttgtctgactagcaaatgtttgctgctgcttctcctcagagattacaaaaacaatgggcaggaaacccctccccccacccctgcaaactgactgatggttaaccaatggcatgtaggaggaggtacataggcagtcttatatggtctgtggagaaaattgcattcagttcatttgtttcttatcaaagagaattcctaagtaaattattataatatatggttataataaactcattaatttctatctaaagtattattttctattctaaatctctatattaaattattcaaaaggatttgtagaacaaatagcaaccatatgttagactataaaaacctccagctacaaatatcttttttcgtttctgccgtgataatgccccttctttatactgcatcatttgaaataattaaccatcttacgtctttctctcacatacacataatttaaaggaatgactaatgagaatttttcaaatagttggtcctcaataaaaaattaaagttaaaactgtaaaaatatttgcctttttacattttcaatcagaaaatttattttgatttttctttctttgcgttgtaagagaaatattcatttctgaagaagatgcagtcctgataaagctgtaatcctgatgagggtgcaaataaaaagaaattctggtgtagtttttattggagtgttaattattaacagtttttggagtttggacatcatttaatatatgcaagcagtgccttaatagtatttgttcttcaaccaggtttattacagactatcaagaagtaactagccaaaaaactgataaccattttatataatctgtcatcttgttaaacattatttgtaaggaaaaactggaaattaattacatataaatggatgaataattctcatgtgggatagttttcacttgttccttcctttggagggcagattagaacatgatgaatgtagtttgcacaatacattatcaacatcttggagttgtcagaacttgcaatgccctgatttcgttctatttacttttcctcaaataataaccaaaaagtaagttgagaaataagttaattattatacattgatacaatataatataaaatcattgaaagcttttacagagtgatttcagcaatatggtggatcaaaaggcccctacttgtctcatggacgcgtcaagaagtgatctgaaattgactaaaataaacttatttatttatgggggtgctgagtagaaatgtagtatgatgccaagggcaagagattaggggaagagacgtgcaatagtccgtctaacccattgaggggaagctggggtgtgaatttttgaaatagtaagctattcaaaagccagtaggtatttgggggaactactaatgggcacacacagtccaggcagatacaagttcagaaaattgctgacaaggccttagggttttatgttgggcttatgctaagactaagaacataccaagcatattagttgataatcgtcatgacacagaacaaatctatatagagttagaaaaatgtctatattttgaaatgctcaaataaaataataaggtatataaagaaacaggaaaacacagtcccttataagaaagaaaacgagttgacagaaattatttttgaagaaccatgagcactgaaattagtagagaaaggttttaaaacaattatcttaaatatgctaaaatttccaattaaaaatatggaaatagaactacaggaaattgggaaaagcatatacggaaaaatgagtgtatcaacaatgatgtagaaattatacaaaataaaccaaacaaattttggagctgaacgatataactgaagtgaaaatctcactagaggatttcaacagcaatttgagcagaatgaagatataatctacatgtttagggataagatattttacatccttgagtctaaggcaaaaaaaaaaaaaaagagtaaagagatgtgaacagaccctaaagggcttgtaggacaccatcaagccaagtagtatacacagcattggattctgagaaggagaagcaggagcctatgggggtg

SEQ ID NO: 913353 - DNA, 4001 bp, Homo sapiens
agagatgggatttcctatgttacccaggctcaaactccggagctcaagggatccacctgccttggcctaccaaagttctgggattacaggcatgagtcactgcatacacactcctaattatttttaatatagtgaaattaacacatggaaaaaggcacatggaagaaattatggtaagaatacggtgtaagttcctatgattcgtctctcagtgatgtttcaggaaacacactgacttcctccagcatcacattttggcaacataggggaaatgttgactacaagggatgctatttggagactcaattcccaagattttaactgggtgctggttaaattgacccagtctgtatagcacacaccaaacttccggtcttgtaaagaaagcaggtatacagaaaccccacactttgtacaaccagttaattatagatgctacccttatcagttaggaaggggtgagaaattcaacttctcagataccagccaggctccaactttgaaaacaggcgcatctacgggtggcagtctattgtgttaactcctttctacacagccattagccattctgtgtgcatgacagaactaaatactaggagtaaagacatacattccaaggatgtagatttatacctaagaaattaactgcgacctgtgagagattagtaaggtacgctttatccctaaaaaataagaccaactcttttagaaacgatataatttcagtgaaatttaaaattattgacttatctaccaaatttggataaagatttgaaaggtatattttttaaatgacaaaaccgtaaatgaaacaattttctattttaatataagcttttctgaagctttctttttctagtgaaattaaaaggaactagatgccaggttgcactaccttcccctgatgccaaccctgatcctctgtttgctgtgcaggcactcaaggtttaccaaggctagagcttccgtgttgtgcttttccttacttctccttcatgccaatttgcattacaaagtgaaccactcctgtcgatggtcttcaaggtgtttctctgtaaattcttacaacgtatagttgatcaaatttagacaaaaattttatgtgactactccttattaacacacttagtagtcttggaatacaagttttcttccagtgtagaaatagctcagtctagaaaaaatgtctccattttgcccacttccgtgtcagagggccacccctatcattttgatacaaatctgatgcatattaacacggaccaaaaatttaaaatttttcttgtgaggttctaggttttccttagaataaagttatttttcctttcagataattttcctagaggtgagagttgtgcagggcattgtattaagtccaggaccagtattactgtgtcatgctcaagaccacgcggcagctcagcagtactctcccaacagttttcatacaccccatctttaggtgctgttaccacaaatgtttcttttgatcacgtctagtagaagaataaaagatttcttcaaccacagaaataaatggagaaaccattctcactgcagtcatctcctagaaagggaactgccaggcagtgttcttcactgttgagttttatatattctgccaagctgggcaatacacagaaacagcatataaaaacagtgtataaaataaaaataagcagtaaattaccatatgacagacctcagtgcaaaacaaacattgactaccttttctctttgaacatagaatagctctagcccagtaagacagaccacgtgagtcactcagggtaacagaaacacaaagctgaacaacccaggtcatcgttcacttattctagctttgctcttttaaatgctcaatgctgaaaatgtgattattacctctggaggtgcataggtgccaaatcccaatacgggcatgaagtgaccatcatttagctctacacgctgatatttgggatccattgcttgccacttctttcactaagcagatcctgtttccttcagcaacatctggcatttatattcaggggttatgtaaaacatgggcaggcagtgctgcactgctccctggggctaatcaatggcatgtaggaggaagcaagtgatggtgtattacacaggctgtgaggaaaattgaatccagttcactcgtttcttatcaaagagaatttttacatacattattatatagtcaaaatatttttttctaaagtgaaattttctattcagaatcaatcaatctctctctctgtctgtctgataaactcatccaacaggtttatagaatgattggtgatcatgttagactataaaatacctccagctacaaatcttgtttttgttcatgccatgatgatatcccatctttatcttctgtcatttgaaataatcaaccatcttacatctttctctcagacagtattcaaaagaatgaccagtgagcatttttttttagtggtgaccctcaataaagaaattaaacaaaaccaaagaaaatttctctttttacgtttttcaccaacaaattaattttgtttcttctttaattgtagtaggaatattcattcctgatgaaggtgtggtcctgatgatgtggcaatcctgcaaaggttcaaagggaaaagaaaacagaaattctgacatgatgtttattggagtattaattattaacaatgtttggactttggacatcatttgcaacatgcaaacagttctttaatagtgtttgtatcttccatcagttttataagaaaccagcaaaagtaacttcccaaaaagctgataactattttatataatttgtgatcttattaaatgttataaagaaaaaagtaattaaaataaattggtgaataatcctcacatggcataattttacttgtttctcccattggagggcagactagaacacgatgattaggccgggggcagtggctcacgcctgtaaccccagcactttggaaggccaaggcggtaggtttacttgaggtcaggagtttgagaccaatcaagtgaaatcttgtctctacgaaaaatacaaaaattagtctggagtggtagtggatacctgtaatcccagttactcaggaggctgaggcaagacaattgcttaaactcaggaggcagaggttgcagtgagccaagattgggtcactgcactccagcctgggcgacagagcaagactgtctcaaaaaaaaaaaaaaaaacaaaaaacaaaaaacgaagatgattaacatctgtgaagaatccataccaatatctgttgttgtctgacattttaagaatagccattctgactggtgtaagatgatatctctatgtgcttttgatttgcaacaccctcttttcttctattcacttcttcctaaaaggaacaataaaagaaaataattaggtaaattactatacattgaagcaatggaatataatagagccatttaaaaattttcacacagagtgtcatcagcaggatggtagattagaaagctctcaaatctcccatggaattatcaaaaaacaatctgaaatgaactaaaataaactcatttatttatagagtggctcagtagagatgcagggtgactatagatgcacagatgccactggcaagagattagggggaagagacatacaataggccatctatggcacttaggagaagctgagctgtgaatttttgacatgataaggtattcaaaaccattgggtatttggagaaatcaaatagggcacacagagtctaggcagatgcacgttcagaaaagaactgagaagaccttaagttttcatgtagggctgatgtcgagactaagaatatgccaagcatattagctgatcattgtcatgacacagaatatatatagattatgaaatgtggctgtttttcaaatgtgcgataaaaacaataacaaagctacaaagaaacaggaaaacagcgttcattatgaggaagaaaataaactgacaaactgtgaagaattacaggcattgatat

SEQ ID NO: 913354 - DNA, 4001 bp, Homo sapiens
cccgtgtgggaggaatacacttgctgctgtacaccactgaggtctggtgtttggccattgatgcagcatttctggggcaacagataacggataggtctgtgatgtttattcactattaaaaatagacgagtaaaaataagcctttgcatagaccagtgatgagtgattatgattaatccaatttgatgcacctgcagtccaagaaaaataaatagaatattttgacctgttaagcacagttttcactaatttttccttatcctgtgtgcacgaaagtctggactcctgcaccaaattgttgcagaaataaagggaagcaagagactcaacagtttaatccatcgagtgcttactgaatgaagggctgacagatgcacgtccttcactagatgctgagaaccaatatgaacaaaacgacactcctagcctctaagagttggtaagcaggtaagagaaataatttaaataatattttcatgagcaggccttgaacattctgactccttcagtaactaacttcctatatgacttcttatagcttttatcaacaactaagtttagctttttttttttaaagatcaaattttaaacgctttttagtcagtgctgtctcaaatcactggcaggaattgtgaagttcaaagcagagaaaggtcgtagaatagaatggtggttataagacgctgggggctgggggaggtgaggaaggagggaatggggagttgctgatcaaagggtacaaagtttcaaacacacaggagacacagcttttaagacttactgcgcactaggatgccaacagtcaacaataatttactacacatgtgtatttcaaaataacaagacatttcaaacatcttaccacaaacaataataactgagagaggtgatagatatgttaattagcttgatttaaccacattgcaattgtatacacggctcaaaacattacgctgcaccccataaatgcacagagcgattatatgtctcaggcatcagggcaggttgcttctaaacagggaacaacatgagatcccaaagtttcttttaaagcctaatcagcaattccaattttccttttttcttttttttttttttttttccagcaaggtctggctctgtccccaaggctggagtgcagtggcgccatcaaagctcactgcagcatcgacttcctggtctccagtgatcctcccacctcagcctcctgagtagctgggaccacaggcgcgcacccccaagcccagctgatttgttcattttttgtagaaacagggtttcgccatgttgacctggctggtcttgaactcctgagctcaggcgatcctactgcctcggcctcccaaagtgctgggattacaagcccgcaccccacgcccggccccaacttttctttctctctttgctggagaggaggcttcgaggttccctgttccggccgagtccagcgccgccaaggcctcccctcggcatccccgctccagttctgagtaacttcaagggctccgcctctccacagagcagccccgcccaacgccgcggccgcagccccagagtctgaggcttggctgccgaggttcccgcttctcccagagagcgcctcggcgggcagcaccgactccgttttaggaaaggccgggccgggctgcttgtgggcggtgggcggccacctcagcagcgcctttcccgggcgtcggccaggcggaggggaggccgccgcacttctccccagccccggcctgggtcccatcgggcgcccccaagtcccgcgctcccctaggtcaggcgcgcctccctgcccgcgaccgcgtcaccttccaggagctgaggcccacggctgggatatctcccatggccgccgccggccgccccgccgccccgccgccccgcacgcgactaccgacaggcaccgcgcgagctactgcggcgctggcgacccgccgttgcgactggctggaagtgccttgtgacggctgacactccgacaatggctggaagcatgaacgcagggcttcctgactggctgctggtgtcgcgcgccgggcactgactggctggttgtattaaggacgggcaccccgattggctggaggcgcagagccagctggagtcccaaatggctggaagcaccgcgctctggacatcctgattggctggcggcatagacgacggaattttcgattggcttgcagagccacgcaggagcagggaaggttttacaatcggctggcattgccgctcacgcccccaccttaggtgtgacctcctggttgccttctccctcgcaccgggtgcatatgcgactgagggtagggcagaggtgctaggttgatgggcagagagtcttcaccgttccagggcctcgccatggccgggccatcctagggcaagctctagggtcagggtgcagagtcctgcgtcccctggggcacagggtgcgcgggagtgggtccccgctctcttgtaccaaggatggccattctcaggtgccccgaggcccccagtctgggagaagcgtgcctggccttggttccccgtcagggagccactgtgcccttggaaaatgccttccactccctgggtcctggcccagagcggctggggcttgcaggacagcgggggtcctgggtggtgcaggggaggccgagccctgcatgtagaggggagcgtccttgcttgcagcctcgggcccccgtttggaagtggatggggtggactggacaccccccttatgagtggactgggctcccccagggccagtggagggaaagaggggtcaagggagccttccgacgcccctcttatctctcctggagcttacagctcccccttcattgcccccctcagccctgggagtcctactgccttgaggacacccacacccagatgagggctttgtttctaggttccttgcctgggtcttcagtgctggccatcaggggaggcgctgcccattctgctcaatggggcggctgcagccagagaaactcccagggtcactctgggtgtccccctgcctcccacccaacttgcatctcctgtgagcatccatctcctcaatgtgagctcctcacaggtgggaagggggatcttcgatactctcatttattcattcagaaactgtgcctggagcactcacctgtgcacggggcaagttaggccagggtgcagtgctgaaaatgacctgcatgggccttgccctcaggagctcaccatctgtaggaatgaatggacagagcataaaagcaaatgcatgagaaaaaaaaagagcaggtgctatagtaaaataaagcaggtgcttgtggtgagaggcggaagggacagagtgagggaatcctcaacacctcaatgaagtggcatttatgctgcaaacagaaaggcaaagagtgagggaaccagccctgcacaagtctgggaacagtattcctgggggaagctctactgcactgcaatcgtgtatcatgctatttcattgttttaacagaaattccataagtctatgacgttgagcatcttttactctgcttctttgctatctgtatatctttgataaggtgtgttttcaggtcttttgcccattttttatttgggtcattcattttcttattgttggattttaagagttctttgtgtattttggataagagtcctttattagatgtgtctttgtaaatattttctcccagtctgtctgtaacttgtcttttcatttccttgacattgtctttagcaaaataaaaaaatttttattttaacgaagtgagcttatcaattatttctttcatggctcatccctttgatgttgtattttaaaagtcattgcaaagacataagaattatataatggacttcggggactcagggggaaggctgggaggggagtgagagataaaagactacacattgggcacaatgtacactactctggtgatgggtgcaccagaatatcagaaatcaccactaaataacttttccatgcaaccaaacactacttgtcgccc

SEQ ID NO: 913355 - DNA, 4001 bp, Homo sapiens
ttcaataatggctgctaaacaattatttacatgtgaattctccaaaataactacagaagagccaaagggtaaaacaatcaaattccagttccacctccctaagaaaccttccccagcaaggctagtcttcacagctggatataattctataggttagcttttaaatagctcatgactactgcttttcccatctggattacaaactttccattgacaatatggcaaaaacgatgaggaacaaggcctttgaagttggtcagatttgggttcgagctctgcacttgctgtgtgtcttgtggagagttacccaatttttctttattattattattattattattattatactttaagttttagggtacatgtgcacaatgtgcaggttagttacatatgtaagagttacccaatttttctaagcctctgtttcctcacttataaatcagggatactaacactatggacctcatgaaattatagtgagaattaaaagagagaatgcgtggaaagtgcttgggtacaacaaatggtcagtaaatgtcagttttcctccttttgtcttttaggcactaatgatgccttacaattattttttccttaatttccttcaagacccatcacgggaacaaagaattcaacgaatattcactattagatacaatcacacacatatattgactgactgtttacctctctattaaccaagagtcattgaaagctctgaacacctacggtcactgaaataagagattgaagactgacgtagaaaccaagcctcctgacctctcccctgtaccaccatctctgactgaccaggcagagtgtattacgccctcgagaagcacacagttgatcccaaggagcaaagagagtgtgtgtgtgtgtgtgtgtgtgtgtgtatctagactcgtgtctagatttgtgtgactgtgtctcgactctgtgtgtgtgtttagactccatatcatcagttgaagaaagttttcacgttttgactcaagacatttctcaatatctctttacagactaaacagaatgcccttatctaactgatttgaacagagaagtgaacctcagtcccagcacagttcacccacaaacacatgctcggtatatggctcaccacttaaatacaaagatccgatgggcctcaccacctcagagggcaggggataatgatgggggaaggacgaggtggggtatgtgggtgcgtcctgctgtaacaggaagaccccagcatacacagaatgccatactgcaaagggagtctggctttgaggaggggatgatgaacgcctggagggccgcggggaactagggacccaggcccctgagagtcagcgtgcggccagctaaaacccgcggcatcccggcgctgccaccaccgccacccacgccacccaccagtgcaggctccatactcttggaaagaaggggcccgcggatgcctgaagtctccacttggcccagttccttacatggtgtacccaggggaggccggggaggtcagggcccgtagccatccgtagatcccggggcggccgcgcaccggcatatgggagcgcgccacggtcttgcagcgcgccctgggcggcccgatgcagccgccatccctcggccgaggcccacacctacccatgggccagatccccgggccccggcacctgctccggcagcgtccccgctccagcggcccggcgctcacgcccctcgcgcttgagcctgggcgcgcaacagcttccgcagagacgcgggcgcctagccatccccgccgctcgccgcgtaccttcctcaccaccgccgccttcgccccctggcactaccgcgggtccgcactccacgccgggctgattccggcgctcgctcactctcttttttcttccgtccacgtcccgcacgatgacgttacgtcagtggcgtaagagtaaacctgggcagccggccctacgctgttgacgtggggcgagggcctgtcctggagctgcggcgcggcaatggcgtaggcccctttcgagaatcaagccagcgctccacgtggcgggccagcccaccaggccccggcagcctggaagaggcgggactcgagttcagggggaacgcccacgtcccgggaggggacaggggccggagacaggggcgaagacaccttcgaaacgccgccccactgggccttccagggaggtagaagaggtgcctggcaccctcagctgctggtagatttcataaggtgtgtttgtcaatgttaaccatttatatcccgggcacacctcggaaataggttggatcaacttacatatgtttgttacttcaggcacatcctgggaatagattggatcagtttacacacatttgcaaactttggctccttaaatggaagcattttggcactgcaatcaaattacttgccccctagtcatctggaggtttccccaatggtcccatctcaactccctttcatcaaaggcagttgtaagaatattgcattttaaaataggatattcaatctatgacaactagaactattccaaaggtgaatgcagactcacctttaaagagagaccacaaaaacctggcactgtggtgtgtgcctgtagtcccagctactcgtaggtggaggcaggagaaccacctgagcccaggagttcaaatccagcctggacaacacagcaagaccccacctcttaaaaagaaaaagaaaaaaagtgaaaacacagatttttctccctctttccttgctgtattttgctcaaaggacacattcctgcataggcacatagtgctgggtggtgggagggcagcacttgataggaggttgggcacagaaaggcatcatgcccttctgtcgtccctgataacactactaagcctatttattcattttcttgtttattaaacactggctactgctatggtctgaatatgtcccccaaaattcatatgttggaaacttaattcccaatgcaagaatattgggaggtggggcctaatgggaggcatttgggtcaagagtgctccacctttatgaatagagtgaccctcatgaatagattaatgctgctatcaaaaggtttgtggaggtgggtgttctcttctgctcttctgcccttccaccacgtgaggatacagcaagaaagccctcaccagatgctggcaccttgatcttggacttcctagcctctagaactgtgagaaataaatttctattatttaaaaattatccagtctgtgttattgtgttttagcagcacaaaatggactgagacagccaagcattccctgggtgtggaagaagacatagctgagttcacagccttatggaagagagagatatatgagcaaataattacaataccatgtgatgaatactaaagaatgggatggccagacattcagggatggctgaaatggtttgactttgtgtccccacccaaatctcaccttgaattgtaattcccataatccccacctatggagggtgggacctgatgggaggtgattggatcatgggactgtttcccccatgctgttcttgtgatagtgagttcttatgagatctggtggttttataagggactcttcccccttcactggtttgctttctcctgcctgccaccatgtaagacttgcctcttccccttccaccatgattgtaagtttcctgaaacctccccagccatgtgaaactgtgaatcatctaaatctcttttctttataaattacccagtcttgggtatgtctttgtaacagtgtgaaaacagactaatacaatggctttaaaaagagttgatattcaaattgtgctttgaagcactagaagtaaggagtttacctaaaagaggagaggagtacaggatcatatgaggaagagggaataagggaatgatatatgcagaggtgtgagacaccccgtgaaaagaggctacttgcagtaggacatgacaggagaggggtctggctggtatcctaaacttacaaagggttttttgtggtatgctaaagat

SEQ ID NO: 913356 - DNA, 4001 bp, Homo sapiens
tggacaaaacagtgccttcactctttgtccgaagagcccgctatggccacgttatcatgtcccctgcaggaggaaagcacacacggggtgcccgtgctgtgcagtgtgagcacaccaatggcctgtgcttctagaaccttatgatgtgtggaggagaatggggaggaggaagcacttacaaaggggaagtagcctgtaccctgtccttctcccccaggtgtggggaatccatgaaataatggaagtaaatgaaggtgcgtcagaaatggcagagggtgccatcaccctaaatggacgacacattaactccagggcaccgcagtcctcagggtcagttccccgactggggcaactaagcaactgaaggttgctcttgtactcaacacctaactcttcttgaagggagctcaagccaggatgctagtgaacttggctgagggccatgtcgtgctacagcgagggtatgggctcctggataggaatcgagcccatggagagcttggaatccagaaaaagagtagtttttacttactttaggctctgcacacctaaaacacaaattttatccaagagtaatcagttgaaacatgaacttgccggttgtatttgtccattatgagcaatttcacaaggtttgatcaaataataaactaaatggtgagaaggcagcttggtaaagtctaaatctttttggtccagttaggagctggggtggggtggaagggaactgatattccctgcgcacctgcagtatgtctgggactattaccagtcatttacggagcgcttcctctgtgccaggtactggattaggcacttcattaaaggctcagtgagaactgcgacctgcccatgctcatggaaaagagtcgtggggctggaattcaggtccagatcagcattaggaactagcttccaaatgctgagggctccctcgcgtcctcacacctagcgtggaagtgttccctggtgtacattctgctgggagggagtgcagcccctccatttaggaaaagcctctcctggcctgggttctgttccttccctttaatttcctctggggactgtcctgagaatgtaagctgcccaggtgccgtctgagccaccagatgggcctgggctcacccatgactcatggaccagactgaagccaaccctccattttcagctggggaaactgaggcccagacagacggtagagtgagctggtggtcatgtctggacagaactcaggcctctggacccgctgacgtgcacccttccccacggctcacagctggctgctccgaggtgccctcagagttctgtgagcatgactcatctgcctctccctccctgtgcgacctgcagaaggagcctaaggaagaggtggcacaagaaacgcggcccagtgaagggggctccggagcctcggagcccagatcttgaagtggaggggaaaccttgggccttctcctcccagggaagacgccttgcaggcggcacgcgggaagtctccgtttccgacaggggtcgcggccgccgcgaggggtcctggacgcttgcccaccagggtacccaccggccactgggagcccagggcacgccccaccgcagttctgccctccctgacagggtcctggacacccccagtcctgtccgggccgccccgacgggccctcggcgcccccgcccaggcctctgccgtccaaaccgggtcccggacgcacctcagcccgcgctccacccgtgccccgcccgcgctcaccgcgccacgctcgaagtcgttgtagaagggcttgtccagcaggtgcttctcgctgcagcccgccgagcccacgaggctgaggtagatgtagtcgtcagtgccggcgaaccactggctgccagtggccacggtgaccgtgtaggagggcatggcgcgggccgcgggagcagcgagcgccgggagcctcggcgcggcggtccaggtgtccgcatctagcgccgcagcctcctcccaccactggtccctggccccggtcccggccccgccccggtctggctccaggctcccggctgcccccgcccccgcccccgcccccgcccccgcccccgcagtacttctctcccactcttcacgcggcgccgactgggcgggacctcgcctcgggcggggcaggggcctcgctcctgggtctctcctcagcgaggtgtctgttcctgcagccaggggactggggcaacctcggctgccacccctcatccattcgttcactcgttctctcctgaattgcttccaccctttgccctgcctgcctgcctcggcttcgcccaaggccaggctcctgtaggccctggggtggagctgcggggactccctacaaatctaggcacagcctctgctctccccaagttctcagtgccacttgcggtacttggagcaggggtgctccgggagtctgcagaggaagagcgacccatgagagaatcagaagggcttcctggaggaggccaccccagcgctgatactgaggatggattctggagcacagaggctccttcagcgcgggcttcttcactggctggacctgcggctcctggcgggggcaggcgggcgccgagaccgcgcccaggcccagagatggccagtggtcgcgggaggcaggcgggacggcacatctggacatgcggggctgtctaggggaggccaggggtcacgggtcggctctctgaatcgcggcgggcaaatgcctggaagggtgtggagaaggtttcgcgcgctcctgggcggcttcccgcggctggggcctgacccccaggttcccgcccactcctggcgcccgcctctcccagccccgccggcagcgcagggtctgacgggcacacagtcgcgtgtattgatctcggctaagtttaaacactagctcaccgtgcgtggggcggcggggatgtgaagtccccaaaggcggctgcctacattctcaccaacgcttcatgtctgtgaagcagcagagtccctgtagcatctcctcatactgtcttgggtttgtgcacctggcaaatggctttgaacatcttttcacatgcttgttggatatctgtatatttttggagagatgtatattcagatgcttgactctttggaaaactgggctatttatcttttttatcattgaattgcattatttatatatcctggatagaagtctctaatcggatacatgacttacagacatttttattgcttctgcgggttgtgttttcactttcttgatgatgtttgaagcacaaaagtatttaactttaagtccaatttcttttgtcgcttgtgattttggggtcctatctgagaaaccactgcctacaataacatcttaaagatttactcctaggttttcctctaggattattatagttttagcttttcatttacatccgtgacccattttgagttagtttttatgcatggagcgatagaagaattcaaattcattgtgttgcatgtgcatgtccggttgtccatgcatcatttgttgaattcattattcttttcccattgcgttgtcttgacaccttattaaaaagtaattcattataaacataacggtttatttctggacattgattctagtccactgatctgtaatgtacatgctatacagtgccacactgcttgattaccgcagtgctatagtaagttttgaaattggaaaatgttaatccaccaacgctgttctttatttttcaatattgttttggttattctggatcctttgagattccatataaattatagaatcagcttgtcaatttcagccaaaaagcaagctaggattttgataggggttgagttgaagctgtagatcaatttggggaatattgtcactttaacaatattaagtcttctgatccatagaatatgtttcagcttatttaaatcttttcttttcttttcgactctttggagtctccctctgttgcccaggctaaagtgcagtggtacaatctcggcacactgcaacctctgcttcccaggttca

SEQ ID NO: 913357 - DNA, 4001 bp, Homo sapiens
cgaaatgcttgggacttggaagtattctggatttcggatttttttttcaggttttgggatatttgcattatacttaatgattaagcctctcaaatccgaaaatctaaaattcaaaatgctccaattagcatttcctttgaccatcctgtcagtgctcaaaaagttttaaattttggaggattttggatttctggattaaggatactcaacctgtaataacggcacctacctcacacaggtgtgacaaagattagttaatacacgtaaaacacttggaacagttacaggcttagtaaacacttcataaatcttggctattcaaagtcattaacggagagttactactgagtcttttttcctatgcagatcccaggttttcatacttactatgaaaaaacctcatgggaaaagtattaattctctccatctaacagagtcagcaagctcccacaggagaaagaatctgttcaggaggagggccagtgccttctattaagcactttacactttccttttttttttttttttgagacggattctcgctgtcacccaggctgaagtgcagtggcgcgatctcggctcactgcaagctctgcctcctgggttcacgccattctcccgcctcagcctcccgagtagctgggactacaggcgcccgccaccacacccggctaattttttgtattttttaggagagacggggtttcaccgtgttagccaggatggtctcgatctcctgacctcgtgatccgcccgcctcggcctcccaaagtgctaggattacagacgtgagccaccgcgcccggcctacactttcattttaaggttcaatgatcttaagaaacaccctgccaccttcgaaaagtctttctaccctcaatgccgagcacagaacctggggcagtgtttccactgtgcttccagtcccgagcatttcggatgaatgaatgatgaacaaacgacagaacgcagggcgagcagctcagcaaaggtcatgcaggagatagagaagcgctgtgtcatgagtattggatcattatggatttttttctttctcattgtgcagatctattcgcacaactctatcttcaaccagtttgccaggcccaccggaggtgcccagtaaaattttgtcaaacaaatactgatgatgaagtatcctgggacttggccctgtcaggtaagttggggctgacagtggagatcctcacaggagagtaacgatgctttgtggacacagattgctgtgtccgagctaagatgcttaaacatttacttcatgtacggcagggatgacctcgcattcatatatttatgaatataaattcctttcctttctaacagatatatgcctattttcttaaaaagagtaattccttaaaagttcctaccctagtacaaaggcaaattattacaagtaatcattaaattccatcatcaacaaatcgttccacttcaaaacagctggattacaacccaaaccaaatagatgccgcagctgtaacgggggggggggggggcgggaacggggcgggggtgggcgtggagaaaaagtggccagagaggggagcgctcagaacaccagcggctcccaagctaactcctagccacttttcccacccagctgggtccccaggaaactacgccatcggcgctgtcccactgcgcaggcgccagccctcggcccgcatgcgcactcggtcaaacccggcctggggaaatttcctatcgcacgtctgctgcagcagtctcctgtttctcctcctaccttctccatttttctagtccctgcaggtaggatcctgggggttaactcccttttcaccaagctcccgagggccctcgacccctcggcctcttacctcagcggctttagcactttcccctacagccccacccccaggaccagcctgagtggctgcgctcaccacgacgaggaccgcggcgtgttcgccccccaacagacggagccagcggcgaaggcggcgtgcgcgcgcccgtgccgtggtgggcgtggccggggcggagacgcgaggaggggagcagagaacgcgctcgcgtagaggaattccgggtcctcctcctcgccctaccttggtttacctgcagccgcctagtcctcttctccttctctttgatgattcagggcctcggcttccctcacgatattgcagaaagacacagctttcctcttcctctccaaaccacctcgaagcagggttaagttggttattcctctctttccttccgagcagtctcgtagcgcagggccatgtaggacaggtagatgctgcatttgctgtctccgcgacaactgcctgttcttccggagctcgtggtctgagggcccgactttcatcttagtctgtttttgtggggaacattttttttttaagcttttcctttgaaagtcttttttcgttgagaactttagaggcctcggggaataggccactgggttgtgatgtcatcgagtattgctaatgatgtgcccttttcctccatccatgtcggtttaccttctgtgttgttatttctcacgaaacctcttcttggttctgtaagcgcacaactcatcaattattattttatttatttttttgagacgaagtctcgctctgtcgcccaggctggagtgcagtggcgcgatctcagctcactgcaacctccgcctctcaggcttaagccattctcgtgcctcagctttcccagtagttgggactacaggcgcccgccaccacacccggctactttctgtattttcagtagagacggggtttcatcatgttggcctggctggtctcgaactcctggcctcagatgatccgcctcggcctcctaaagtgctgggattacagacgtgagccaccgcgcccacgttggcttgaacattagtgtatttagtaaggatcaacttgttttctttggaacttttaagtattttgggcttcaagactatctaagctgtacgtggtaggaatattggttgaatttaacctcagctagcctgtaaggaacctttgtttcctaaattattgattcattaagtgatgtgaccagaagcttggcttcgcagtgagcgatgtgcattttgttgggcagtggcctgtggaaattggattccccccttcagcagtatgttggtctgagaaccatattggttaagttgttattttaactgtgctttaacagacaactggaactgattgtttggtatgaatttctagcacctctaaaagtacttaggggcttttttttttctggatggttaagtgtattaaatatccctcattgtcttaattatcttgctagatagaaagagtttgctgggcgcagtggctcacgcctgtaatcccagcactttgggagactgaggcgggtggatcacctgaggccaggagttccagaccagcctggccaacatgacgaaaccccatctctactaaaaatacaaaaaattagccgggggtggtggcaggggcctgtaattccagcaactgggaaggctgaggcaggagaatcgcttaaacccgggaggcagaggttgcagtgagctgagattgtgtcattgcactccagcctgggcaacaagagcaatacaccgtctcaaaaaaaaaaaaaaaaaaaaaaaaagagatattgtgcaaatggttagataaccactgaagtttgcattttactcattaggttaaagtaataaagagacctttattctctctttcaaagccatggacaggctgtgtttatatacgggcatttataatgccttttatttttaatctctcttttttttgttgttgttgttgttttttgagagacagggtttcgccatgttgcccaggctggtttcaaactcttgggctcaagcagtcctccttcctcaacctcccaaagtgctgggagtacaggtgtaagccaccatgcctggcccttttctctttctctttttctttttctttttttaagacggagttgtgctctgttgcccaggctggagtgca

SEQ ID NO: 913358 - DNA, 4001 bp, Homo sapiens
atcatcacccaattccttaaggtcctgtggcccaagatatttgtctgtgtccccggtcattgcatcttcacctgcagatgtagagagtaagcccacatcaaaagcttcccttttgaaagtgtcagctgtggagaaaatcactcctttggttatcagcaaatcccccaatatctcatattcaccttcccctatcacctggataatttttgaaactctcatttagaaggaaaaggtataggtaaaggttagtacacaatttcaagagtgaatttaagtagcggaaacaactcctggtattaaatacaaatctgaaaacattacccgtatccctttgcttccctgtaagcctcagctgactagaaaggtggatgttttatgtcagttatagttttcctcacctcacctcacccacgatgagggcagcttgtttgaatggacatggattacaaaataagaaccacctcttcattactgttcttgaaattatatgtgggaaggaaacagacatttaaaaaaaaaactggttttctcacacacaggatttcagtttggggcttaagtaagaaactagcaagttatgtgaactataacttgcttggttggagagccttggaacacatcaattttgaaatgcttctaaacctatcaaattaacaacagcccaactgtcccaatgcttgaaatctacatggaaagcaacacagccttctccagagataatatgggtgctttagcactttgaaaggactatataaattgctctttaattatcaagacaaagagttaattatgtgaaatacttttaccagctacgtatgcaaaacatgacatcatatggaaaaaccacattccaagagtgacaaggcaggtttttcaattgtcttttgccctctgggacatttcccatccttctcaaaaggtagcacaggctgcagaaaagttccttccccacacaggcaaactcttaccctctttctggacgcaagcttcactggccaagagattgcaaaagtgtacatgttgtgttttctcaaaggtaagtgattcattcccccagatatattttccaattcctgcattcggtactgtttacattttccattcatttaaactcaggaaaccgcaagagctcagcttttaaactaccaatcaagtctaaaaatacactgtcaactactgtttttgcaaatgtaaaaactaaacagatcaactttctactgctgctacccagtaccaagagattattttaagtaactatttacggctgggctatttgcacattcactgcatctcaaacaaaaacagcacacaccaagtacaactcaaagatcttactctgcggtaaagccatttccactaggcttggatgatcaaatgttttcctgatgtttccaggaattccttaagcagtgatttagaatcaacctccaaaacagctcaaggaaaccaatccctggtttgtatccactctcttcaccaccgctgaattcctctcagcatcttgatatcctcgtaggcaattgaggaattatacatctttccccactcagagttcgaagattttcaaaatttcaggcccccaaaaaaatctttttaaaaaaccccacttaattgaggttaagatccttttgaccacttcgcagacatccttttaaagctccttctgattggattaaaaactcctctggcaagcctctagcaggacagaatggtgacataaatgcaagcccctgagttatttgtatgtaaatatgaggactgctccggtgtagactttcggtaatttgataccaatgcgcgttgcctagtcgggtaaccaagacagccttcatgtagggagagagcgaagtgctacatttaattaggaggtgattcttctcaaatatgaatgaagaaacagccaacccaggtagaggaaaaacattagaagaaaacaaagcagtggcccaggcggggagtggcatggagctccaggcaaactttcaactttgttctcagctgggaacactgggagcctcagttatttatggtccctgtcaggtggaaggaggggaaaaagagagagggagggcctgcccttgagttgaggttgtgaaactggggctaaggaaagcagcagtgattcccataactctccaagaggcactttgcaatacactaattgccgctgctttttatcaggagtttgaagaagggagcagaagtgagacaagttggaaaaagcaaatgggtgttctgctttatttttggcccaagttctttcaactatttaatatggagggactcactggtgctccttcgagaggtccctggaggaagtgcaaagcaaagggagaactggggttggctggagaggcctctgttgccccagataggaggcaggactgaggtctgtcactttgctgttacattgtttctttctctctccactagtggccttccttctcagctgctccaccctgtttatgttggcagtgaaggaaaaaactagcaggacttccccatcttccatctgggtacactggagaggccatttcaattgctgtttttttttttttttttttttttttgcttccctccagcccccaccgcccccgagaatacctggagaattgggctcaaaagtaaagggtttagaaactgtcttgctgaagtaagcagtcttttataagagcacatctatccccttggaatgttacctaaatatacaggaatctgaatctgtagaaccgataaagtagggggaaaaatctgttttccctggatacatgcatagatgaatggataaatgcatgattcatataatattaggatgctatgacacctggtgctttactctgatcagcctggctgtaatcaacatgggaaatacatggaaatagaagggaagtcatttataatgtctggaacatattgaaaactattcccaagcagagaataatttccaactctaaagaatagaaggggaagtcttgtttaaagagaaatgtctgaatgttcatcgactttttaagtctgtatttcgaatcgaaactacagaactgagcaaagcgttattcaaatactgtcattcattccaatttctcagcaaggcctatgatgcaatgttccttccactgacttcttggctatttttccttcttggctattcttccacacccaccttccctcctgttatacagaattttttcagtccctagaagtccttaaactctttagactttgagcctttactagggtgtattctcttgatggaaactttatcgttttttcctgatgaacttctctaatctttgactctttctagaagccgtcgcaccctctactcaccattaggtgtccctcatcagaatgtattgccagtaaacacatctgcttagtctttcccattggctggtgagatcccctaagttaggagccatattcttcctgggccaggtatattggaagttctcataaataatcttggaatccatgactgataataaatataagttatttttatgtttatcttttaaatctacatgtcatggcaacttagcactcttttcaaatattatgttaaatgactggtatacagtaaaatttcaatgaaagtaagtttccattattctttagccgtacttcttagacttcagaaatggtcactatgaaacaaaaagaagtctggggtaggagtgggagttgtcaacacacttggccaaagattaatgaaaataaaatagccttataacattaagtaattatccacttagcattttagaatggtgagaacatttcttaaaagacatggaatttagaaataaaagcaatggtattcttttaatgctgttttccacagtaggtgctctaggttcaaatccaagctgtaccatgtattgactgggtgacctttgaaataccatttaactgctctgagtcatagttccaacctctataaaactgggggtaataagtctgcctctaccctcaagcctcctggggagatttaaatgaaataa

SEQ ID NO: 913359 - DNA, 4001 bp, Homo sapiens
actgatttgagaactaagagaagttggccctccagatattagtagctgatttggagatattcaaaggattgttttgcttcagtcaatttttgtttcagaactgtggttttaactttacattcactttcattacagaaatttgcttccttaaacacgcaccggtttgagcccaggtcagcagatgacaaggctgcctgaactgctaaagcagcaatctgtgtccaatctgagactgcctccctataaagcctacctgccctgacctaccctcctggaatgaagtcccatgtaaccccaggatgactcttctatgcttttacgaataagagaaagtgacctcttccaaaattagacaacccacactctcaagcaagcaaaatcaaaatcagaatctaggtagcaatcaaaaccaccaattgacttggttgaaacttcagagtcttcttttgaagacttctcattgattccctgaggatttttagagacgacaactaaaggaaaaacatggcatgggcaagatttgtgtttcaagggcaattctacataacttaaaactaggtgaactgttgttttcaagacgattcaaatgtgcctcatttttaaaacatgtagtatttattcttctgcgaaaatagttaatgcaagcccacgatttaaaaaaaaaaccaaaagtcctaaaaggtatgtgaaaggtaagggtaagtctccctcctcaccctctcatttgtctccccaatcccccttcccgggacgactactgtttctcaggaacctttccctagccattctatgcaaatgcaaacataagcgagtgttttaaaccaattatgccacattatacacaccgtggcagcaccaaaattgctattaaacgcctccgggcgtaaaggtggcaatctgctgaggggtgtggggtgggaagaaggagactatcttgatgcagcggttttgctcgtcaggcaaccgatttctacttcttgtttttgtttgcatgcctttacaaggctctcggagatcggagatcgaagagaaggtaaatccaccaaagccaccccctggcactgccacgatagccaccctgctctgcacgtttctgtctcaatctatgaagtatgttctatactttcatggagttaaatcgactcactttcaaaaaagaaaacaaaacaaaacaaacaacaacaaaaaaacgcctaactctgaaggtaactttcagagtctgaaggtaactttcagagccaggtgatttccgaaccaggtgatttcctccccgccaaacgtgcagcctctgcagcctgcttcagtcgtgtccttaggaaaggttcagcctggcacggagttggaggggcgagccaagagcagagaagccccaagacgagagaccgaggtgagggcgtcctgagcccggggcccgcttttctttttccagacgaatgtttccaagcagaagccccaagtcctcgggcccccctctctcctggggatgctccagcactgggaccgagttcgagctctcgcctctgtcccgggccgcaacttccaggcgcaactggactcccacgatccgcaggaaccgggtcccctccactcgccctcccggagcctcgcggcgccgcctggcacccccaggagggcaggactcctggggccccccggcccgggcctcccgcccgcccgggtccccgcatgcccctgggtgaaggcagccgcaggtaggggggcggcgcggcgctcacctgggcaggagcggagtcctcggtgcccgcgggagaggaggaggcggaggaggccatgttgtggggctgctgctgctgctccttccaggaactccagtctctcctccccgtcccgctcctcgggcctccaaacgtgggacttcttgggaaaaagttcggccgcggctcaggaacaccaagcgcggccccgcgacgcccgcccagcgcggcctatcctcctcctgctgtgtccgctgcgaccgccaggtgcccgcgcgggccggtgcgccgggggcgggcccggctcaggtaaaggcgcggctgggccggaggccgaggctgcgctgcacccagctcccggcgatcacatccagtcggccagggcccaggggccagggtaagaggaagacggccttagggtgactaggagcagcagaggcagctccaggaagagagggagggcgagtcctctttcctccgggctgctgaatagagtttcattagccatccccataataataataataataaaataacatggcttaagggaataaaatcatctttaggcaattttgtttttgcatttttattattattaatctgtagcatgcgatctatgtaaaagcaatgtttcccaggcagatagcttccgagcaatgcccccagcctcccttccaccccgccgaggtcctggcagcactcagattgcttcagctacgtgcccaatgaaaatattaaactctggagctgtccggggtgggagggaggcactgagcctggtccagcaacagaatggggagcaggggacctctgagcgtccttgtttctaggagctcatatgataagggttttgctgcactcctgtcctggacaaggccggcgggataggtggatatcaggccactgcccccacagaatttactattctacttggtgtggggcgaggggagaaattgccctcacgtcatgtctcctaaagggaggacatctcacttggagtcacggaagataggtctagtcggtgcaccgagcagggccagggcattaaatgactgtgaatcacatagtaagaaatggattcctttttgcattctctttcagttcttctgtatacaaggagaaagtattctctctcaaacagtaaactcccttttatcacagagcaggctccaggctcaaagccctaggtaagcactggtatctaactggaatttataacattgtttcattttcattgtttagttccattgtttattgttactgttattttctatttaaggcaagtgaaagtgggttttctatttaaggtagggatccagaagttctttcctagcaaatatatatgtttaaaaaatattttaaaagggtaattgtccaggtgggactgggataagcaaaatttcaaaaggtaggcagggaatgactaaagtatgggaaacatacttttaccaacaagtaacaactaaatactggaatgactttattaccagagaacactgcagtgagttagctatgtctcccatctaacaccttgctcattttctccgtaacacacattaaactgaaataacatttattgggcattagctctgtgttggaccctgtgctaagcactttattcatgtggtctcatttagtcttcacaaaacccttgcaagacaggcagcacaatctggaaactgagtgtcagaaacattatttagccaaggtcacacactaatagagtaacaataactctttaggcattcttaacatgagctttataaaccacttcagaatttagcaagtccataaaccccttaaaattttatgttaaattctgtgtgctatttcatagggagaaagcacatcatcttcatcaacttttcaaaaggatttgtgtgtccccagaaagttaagaaccactgtcatcattatttccaaggctatcctatgccttggattttaaggtccgttggggcaaaagtcctgttttcttttatctctcactgtgcctagcctagttctctattccctcaggcactcataggaattggttgcccaaattgaatgtgtgaagcagacaatagagactacaagggccaggtgctagtggcttgggagacgcatcaccttggtaaagcctgcagagacacaggtattttacaagccaactccctggcaccgatacagccacagagccatcttaaacaagaggcaagcagccagccaggtagacaatagagggagaaaaaaactctacaggaagttagcacaaggagcagcacctgggagagaagctcagaa

SEQ ID NO: 913360 - DNA, 4001 bp, Homo sapiens
tctgtctcggctctctatgacactctatgttcagaatcatggtggagcctgtcaagacacttaaagccatatcttataaacatgagcaaacctgacaggttttttttttttttttttgagaccagtgccactatgctaggcattaaacaaatcatttgtgctgtgcagctgagacctgctcccttgggaaatcagactaacacctttgcaacatcatcaacccttgccaaggcaatgtacaagaagtcaaggctgacttaaaaccagtctgcacagattcactatctggaagacattgaaccactgccctagaatgttggcatgtacatagacatgacctcagaacagtctgctggtagtaggtcccttaagaacatcatattcaaattaaccttttaattaataataaacagattatgaacatttttttaaacgcctgatatattccacgagtagctgaaatctttatcttctctactatagccaccattctgtatgtgtccactgtctgagcatacattacattgggccaaggaagcattttaaagaggtaaaattatatatgagtcctagtaattaaaatattatatctgaagattttgactatagattttaaaatacagcacacattctccttaaatatctatgagctataatcctattttagatatttgtttttctttgttacagatgcacaactgtcttttccattggtggcacaccctaaaaccaagacaatttataaatcacaatggatcaaaaccaaatgacagatctagagaattatcttttttccccatttcaaaatgaattaaaaagttaggagcacctttgaagatatacacattcaagaaaaccaaaatgaatctacaggtttaccataatcatctattaatatattgatgattcctcaatttacatggaaaacaaaattaattttttggattataatagacaaactgggtatatggctgtatgactgcagggtcgaatgcaaacctgagatctgtcagccataaagtgatcaataattaaaatggagttcacctccatgctgtaattttaaagtataactataggtttctctaagtttccctaaaatatatgttaaagctaaacatctataccataataatattcattagtaattataccctgttgattaacgagcattctgtgaaatttaaaggagaaaaaaacacacccacccacataattaggacgtgtttacttaataatcctgaatatcactatgaaaaacacaccacgtcagtgaaatctaaatgactgtatttaactgtttaaatattttagcagtgtatccgagttgtgatgattttcctccaagacagaacacacccattaatagactggaaaaacaaaagcattcagattctagcagcttcttaaaaatctaaagccaatctcttaaaaattcagcctaaagatcacttcctccccagagccagagaacaatgaagagaacatgttgcttattcatttcttaccttttttcctttccttttcctatgagcaggttttgcatttttctcctttggttcttcactcatctttcctttaaatcaggtgagtttataaaagacagatcaccgccggtattccaacatccaaaaccacggcaaagagtcaaagcattgagaccaaagtccatttacgggtgctccccaggcaaagcagccgctgcttaaacccagcccctgctgctgtcagagagacgcgggctgctaatgtagccctgttcagctttcctcaggaagaaactgggtgttctctatatcaaacagtcaattattcttctaaagaaaatcaatattttagcctttcatttttaactaatcgttaccctgagataaggtcctgacaagactttgttgcttgttcctccacagtgatttgagcctggaaatggtgagagagagagaaagagagagagagacacacacacacaccctcacacacacagaaataagctacagactgctgacaagtctccgaagccttcccaggggctgatttgctgcttctagcaggctgggaagctgaatgtaaattgctctccgtgctgctagcctcccatactaacacatgtgttgaatgcatcagggcataccggaggaggcagtcgggagagtgataaaagatcaggttacttggtctgtaaaaaaaaaattcaatgattcaaacaataaaagagacctaccactactggagaagtcacatcacaggctagattttctccatgattactcttttttttttaatgtgacatgcaaaaaagatgccaatcttcacctaaggatttctaatgcagggtttatgacggaaagccccatacccaatttgccatgattcatatttaatcattggtttccttccatgaatataccaaccaaccaaccaaccaactaacaagaaaccctccagaatattcaggaaatactaagagcaaagctgctgtctctgtggcagaaacattctgtgcttcttgactgtgtttagggcagtgcaggtctcagatcacattacacactccccagctgccctggccacacactgtgcccacactccccactgcacgccatcctgagccccaggaatctggttattttctgagtgtctggggtatttcacacctgggtggaaaccccctcaccatgccttccatccatttaaacacagccaaattactattatgagctgtcatttaagcatctttagaagcatgccagatacattctgattcaggaaagcataaggttctaggagcaaccacagacaaccactaagatgaaaacagagcactttgagcagataactgacagaagtacaaagtgagagtggggtaacaagtgggaaagggagaaagaaggggagagagggttcaggtccattcctaggggctgggagccaggaataaatcatatcagttccacacacagtaacattgttattcaggagacatagcattcaaatgaatattaactttttcaggagaaatgggattcaaatgaatgtaaaacacagccatacaggaaaaaacaagtcacagagggctaatttttcaatggtatgtgtgggggacttaacagtggttgaggacatgacgctaaaatattaaaccaaaagaacagatctgttgaggctgaaatcgtccccattttttacctagcatataaagggggtttgtgtccatattcaaccaagattccttctcctacacctgaaacaccagtcccagagaaagacatgagttagagggatgcttagatgctttacccagggctgagcaggccaagcatagggattcaagtgacacgctcagagagccacgtggattttaccaaccacagggcagctatttgagctaatttctatttgaggtgtgcgcattaattataataatacacatctcagtaagtctgggatggccagaattctgaatggtgttgggcatctaatcatcatgttctacatttctgctcagacactgaactgctatttaaccacagtttccattttctgccactattcagtaacattcctcttgtcatgcaatataaaaggcagaacatctcaagacggcaaaataaacctttcaagttcttcagtgattcaacccttgctcatcttcaaaacacagggaaatctggggaactggcagtacctttactgcttctaccgctcattgacttcaatcgggtgaaccttgtttattagtcgtgtgtcttttgagggatgaggatgaggtaggtgctttatacaaattcttcataagctgaagagtctaagcaggtggattcaattttgactttcccacctaaatcttgacattctttactaggtaagcaacagagatagtacatccacctaaagtaatttgtctatagtagattccaagcagtaggatttacctcccaaaagaagcctttgtcaacaactatttactgactatccaaagaacatgggcctctttctttaaa

SEQ ID NO: 913361 - DNA, 4001 bp, Homo sapiens
aaacctagctagcctaacaaccctaaaatatagtgtcaatattaatatgacaccatatcttcatacaaatatatgtaccttttccatctttcttagaagctagtttatcacggtgggggtaggcagagatgtatggacagggggcaagtggtagtgacctacccacagagaaacctcacacaataaaattagaccagaatctagcaaagtatggcaatttcataacaactgtgctgtgcaaggctttgaaatacgcctgcacacaatttcttaacccaagtttgtatttttatgaaaatatattcaagaagtttatttacaagaatatcaaagtaggaactatctatatttaacatcttgcagtgaaacaactgcagctctccagcttcaatctcaaagtcagctatgcaacaaaaggcagagagtcttctatagatcctaactctgaagaaaatggcaaaggtaccaggaatattcatggtcactcctgaagaggggtacatgtgggagatgcaatctgcatgtcatttagaaagcacatgccttactgctcaaattaaggatatctttcctttgggaattttcacaaagacacataaaaatgctttatgacctgcctttcctattcagatcacagagttttagtcaatttttattaattatcatggaggaaaagtgctttggggtcttactcccagctcagtacctaggagtcatatttaagggcactctaagtactcacgggctataataaatcaccactgacccagaatattcctcctattttccccctgccttggaatatcagtaaggaatcatcaatgcccatgctttgatctaaagcaatcagtgttgaaggttgcaggttactggaattcctgcgttcaggataatcactttcacccagcagggaaaaacaaacctctgtgatttcagctttatttaacaaaagaaagttatttctagcagcttatttccattgcacaacttgacaaaaagcaccttataaaaataagaggcaaaaggaaagaaagaggaaataaaagcaaagcaggaaatgacttttgtgctactcctctaaggtcacagatctgcctgggaaacgcacgcatgtgacacagttccagcacaaaagctctttttccacgagacaaacctctaagaagtacaaagcctggttctctggcctctccctctaacccaagtcaccgcagtgcatttcaccttgactgggctgtgaagaaactacttttgtaactccctcacagcacctttccatgtcatggaaacatgcccatgcctatataaagtgaagcacactttccgcatagccctgcaatcaccccacaggagaaaaccgtccctcttgccttgcccatcctatggccatgttctgccatagggtttatcatctgttcccaatttacacacccaatttacactctacccagcatgtaaaaataacccttaatgcttctaacagatgccagagggagattaaaacaaaaagaatccaggcaagatatatgctctggcatacatagatacctttttcttccgatcccgggaccgtttgcggtgtttcctttttttctcaggctcttcttcagcattgatttctaaatccctgtttttctttaattgtgaggctgcatgagccataatgcatttaaaaagatcctctcaagcacacacggcttccttgtaaaaggtgatatcctcaggcacctctaatcaggcttacagcagcattccaatcactagagagaaagctttgactagaagcaggaagatattcacaatgcaaagatgctggagaagctgaagcttttaaaaacccaaatgatggtgtccggacttcatcctacaccttcctctacctgaacctttacaggagagtgcagccatcgtaatgcatttaccgtagtgaagaagacagctgggacagaggaagctgtattatggctgtatcccctgccaccagctggaagtgtctaagtgattcctcggaagggggaatgctgcaaaggatgcttctccaaaggggaagaatcaagagtcaccacacatgcagaagcaaaaatccagcgctaattctgaaaacctattttagaatcctttgaaaaaaagaaaaggctgcaatttatacatcaccactagatctacacggagaataatttaacccctgatagaatggagctgttcctactttagttcaactgctgatggtgacaaaatatataaaataagatttcaaaaaacacactaaattttgctatggagatcctgactgcattacagggaaaacaatgcatgtattgcctgtctcaacagtgcatcctttatgctgaactatcaatctaaatgcattttgtggggaggactacagaagggcttgttgtcttttaaaaacaacatgctgattacaacacatcatacagaaagacgtgagcatattggtgtatggaacagatgcctgattcataggaggttccccaggactctcctctcatggggtctgagggtcaggaatctgtgctgtaatcagtgtttctgagtcactgaaatgcagatttgctttcatgttagggtttgcttcaatcaccttactatttttgccacctgagttctcaatgactgcagcctctgaatattcattatgtgaagtgaagcagcagcagtgctcaaggcctgctggggtgtcttctgctaggatgcacacaccggaagaaatctaataagtcgggagtcatttgcacacatactacacagtattcacagtaagcgctttagcaagaaactgctgaaatgtcaggctgggcctaaaacatatgagacctagtaaaaaaaagaacacacacacacacacacacacacacacacacacacaaacaacaatttcaccaagaaaatgagtcagaaaaaaaaaaaagatgttctgatgaaaatactttgttagcatgtgtgcttccgatacaaaagtccataactttggcggtcggtgcatttgactttgtagggctgaaagtgtaggtgtgtaaaggacacagcaccaagtccaatgcatcatgtgaggatttggttggggttctctggagctgttgtttgtctgcttcacaaagagtgccaagtgtgagttcctgcaaacaacttttactcaccatacttctagatttggggttcaaaggtctttcctcttttcctcttgtaggacgctttatagtctctgcgaagcagtgataaaaatgggaagggaaagaatcagggaccatggcatcccattcctactaccaatggactgcgcacttctctgaggcctcacggtgaaccacagggaaaccacgctggtcatagagttaccaagggcctactatgtgcaccgatgctcacatgcttgacttccacacaaactatcttcatgaagaaagagttctggaaagtttctccattgcctatgaaaccatacaaaaatggagaaaaatgaaggtgggggattaaatgtaattcagctccaaaagcagatgaaaggtatttgggtctttgtagtaaaaatgagtgtttttctactaagatattttactgtattagtaacagctggggcagagtaaaaattaaaacttcgtatgcattttcccaatataaatcgtcttatacttttgaaaaacgttcatacaatttcttttattttcagcaagttgaagagaacagccagctaaaaagctggcgtctttcccactggctcctggatcatcttttctttctttatagacgctaatgatactttaaaatatatttagaagtgtgcttgatcaagtaacttctccgtctgaggctggcaaagcactatactttctcattgatttctatcggcaaaagtatagttggaaattaggaaaataagccacaggtatttttcaacatacttctctctagaataactctttgcttcccccaaatgttcagaagttgagaatgtgtcatggctttttaggactctataa

SEQ ID NO: 913362 - DNA, 4001 bp, Homo sapiens
agaaattcgtatttcaaaaatatggtgagttctactgacaagcattctggttgtgtctaaactaaatctgcaaggtctgagataaacatgtgaacagtttgagcaaaaacattttttaaaaattatataaatctttgacttcattttagggatttcttattcagatatttatctgggagtctaattttcagctaattgccatcatctttacttctgttgcttgtagaatcagcccttgaccaattgaggacacgatctggtctctaagtgatgactttgtaattaatgccataagcaagtcttagatttttaaaggatttttaaaattatgctcaaaacttggtttaatttttgagcatgataaaaagaatctaacaataaatgttaagctctgaaatatcaatgtcattctctttcactaagcagagccttctaaaacagactgtccagggaccacagctaactaaagcaaattttatctgtgttagtaattaaggaaaattcacccagaaacacagattgtgtcaacacagatagcagacagttaaacaatgatctatggaccacagaccatgttattgagaaaaagagatctccgttgcttgggattaactacatggtgtgtaacatcaggaattcactggacatgtgtatctttcaatcaaaacatggtcacagcacatttattcattgattcagaattcagaggtcatagtcttgtcaaagagttatttcccaaaacctgttccatacaagttgcctctttacgggttagaatctggtaaagagacatcttaatgattgggtttgtttctctcttctccttccctgacatttccattccctaccccagccccaacatcctactagtggattccacagatggctctcacctctgcctctcgttgtttctcgcttttccactgttgctcccccagggtcacagggtgggctagaagtgtcttcagatcctcctgcttctctaaagtaacagcagcttcatactctccatctctgaaatcctcaggaaggaattcccctgcctccccattgccattcttctttccagtgacctatgagggaagaagatggcagcgtcagaagcagcagcctcgtcctgggtcattcttcacagacaatgccgcaggaggctcttggtccttctcccctgggaacagccacctttgagcagtgcactctcagatctcaagctgcgatgcacactgctacaattgtcccagaattaccttcagatgcttgtcctactctcttggttaaatcaaagcttgggttaggttgacagattaaatctacttttaatctgcttaatcacatttcttttaggaaaatcaaaaaccttctctgcttaattaaaactcaactttaggtacttttgatgagtttcgccttattgtaaagtttccgggcttacattctttcaataacacttcttccctaagacattttgataactacacgtgattccacactgtagtaataaaaccaaaggagaagatattaaataggaaatatgcagagaattcattactggtagctccattttttttttccaatttcacttgtttcatcacatcaacctttttccatatatgacattttcagagttcccttgcattacacctgaaagcaaagggcatttcaattttcaaataaaaaccaagatgaaccagttttcattttataaaattaatgcatcttacataccagttcctctactttcagtaccatcatgttggctgaaggagtcttgtatgtttttctgtcgtggaaggaatccctggagttggccctgctgggcccctccacaccggtcagcttatatagctggggccgggtgagataatcttccaacctgggaaccgaagtaacactcccacccccattaggagccaactcagaggcaggtgaattttcattccagactcagtgtctgggaagctgaagagggaggggaggacaagctaaccctgctgaatatgtgaatcaggaagaaatgtgagagggccattcctttggtggtgatcacatcgctcagcaatgcaagtcatcctatttgtcaagagtcaggggacagctgtctgttgacattgcaccacatcactgccctttttttctttgtcagctttcatatgactacctatcaagaaaatgtagatgccctacatatcacacccccagtaatatctttctgataagcagacttatcaacacttcacttaggggaaacttgtcccaggacatcctattccctgggtaaacagcctgaggggaagggatctgggccctaaaggcacttgtctatatctgtttggaattctttggagtgatgtctggggctaaataggccccatgacatgccaccttaccatcattataagaaattgaaagcattcagtaatgcacttttcttttatgatgtcactggccataattagcacatgacatgcttaccgtgttctaaaacagcataataattggagcatttttacttcaaaatggatcagagtggtcaagaaatagagtaaatgaaaccagctatcagccgggtgcagtggcttacacctgtaatcccaacattttgggaggcagagacaggaagattgcttagcttaggagttcaatactagcctgggcaacatggcaaaatcccatctctaccaaaaatactatatatatatatgaaaaaaatgagaccagttattagcaatggcaggactctgattaggtcattgagctgaagttctcaaatgctgtggggaaaggaatcacctgtgggagcttgtcagaaatacagatccctgggccccactccagggaattctgagttgatttatggtaactcgtaggaatcatcttgaatttcaaagcacccagatgattctgatgcatcaagatttgagacacgtggctggagggataatgcactttgcttccggaagggttgaaaaaggtctctatttctggtttctaatctttgaggtgtaaattatgtaaaaatactggggtctttttatagtttcaggaaaaactgggtttttttcagtaaaagaaaggagagaagaatgggagaagggaattgtgaatggagggaagtgttaattaggaagttatgtttgacctttgtgtgtctatttctccccaaactcacccaatcaacaaatgtggctgccattctcctcttcccccttgaatgctcagtcagtggatggtgtttctgaaactttgagaagacatcgactccccaccccaagacaaaacattgacaaagagggaccctcccagtacctcctgtatcatatgttccggtctcctaatattctatcttaaaagggggttaattaaaggaaatctcctgggcttttctttgagatggacacagctatcactattttctttttaattttttccttttctctttattatttatttatttttaatatatggaatgtttcacaaatttgtgtgtcattcttgcacagagtccatgctaatcttctttgtatagctcctattttagtatatgtcctgctgaagcaaacagagtcattactattttcattggtctcttcatctaagtcagaagtagtcatggacactttttctaccatttcgtatgcctttttgttccaggcctgacccaaactgagggaggtattaggaggagaagtgtttgggggaaggactgtgggatgtttaagggtcttggatatgaaatcccagagctgtccatgccctcgaagttggagcaagactaatgctctcattttacagagaggatgctgaggcaaagaaacattaagtaacttgctgcagatgcacagctagttggtgaatgctaggttgaagagtcctgattccatccaacagaagcagacaatcattgagcccaaaagatttcctagggcaagtctcacctagacccactcaggatgcaaccaaaactgattaaatggctccttactgtttcaatcacctcaaag

SEQ ID NO: 913363 - DNA, 4001 bp, Homo sapiens
ctgggcaaacagtgagcaggtactggaggatcagagggtcgccttctcgactggcaatgtggaaactgttccagccatctttgttcttcaggagtggattggcgccatgttccaccagctcctggatcacccccaggttcttccttgtgcaggccatcatcagaggagtcctaaggccaaccaggagaagctgtcagatggaggcagctgagacattagaagccaggggccaggtcttcaaaacacacacatccttggcacagatggaaaacctagaggattcaggggtctggcaggcaggaaaacagctttgaccggcaacctctgtgccttctgtgaggaccctgggagaaataataaggggaaaatgattgtaacgaacgtgtacctagaggagagggtgcctgggagacaaagcagcttataagctagttcacaggatagcagtgaattggagcagagctaagaaaacccacagacaaccctcaacacataacgaagtctattcccctgccccagtggggaagatgtacttccctatgttcctaaagatgttcacgccctctaacgaacctgacctagtgagtactaaaatcagtgtcaatctaacaaacgaaatgcaattggcttgtgtgatggtggagcagagtatctctgactgtggtggttatgcaaggctgcacgtatgtgatacaactgcactgtgctctacacacacgagcgcgtgtataactcaggaattctggatattgattggagcaatgccacttgaaacaatgcattggtgcagaagtaacttagctaaatgtccccagaacatcgcatccggaggctatctgtatagtgcacacacttcattgtttggtaacattctctttggttatattctacactattccgtgctctagaaagggaggtgactgccccgaccagttaacccacaagggcaggaacgagggactctgcaggtcatctgcgttataagggaaagttgggcaggaggtccctgccgctgagcaggcctggggtgagaactaggagctgagaacagctacggtgtccaaggggacggagaagcacagggaactcgctacgactctgcgagtagaggggaggcggggtgtctttccgctccacacctaccagtcggccttcttcaggcagtcgaccgctgccccccggcccagcaggtagcgcacgcagtctcggtggcccatggaggccgcctcgtgcagaggccgcttgtagtctcggttggtggcctcgatgtccatgccccaggcctcggccagataggccagcacgtcccgatgcccgtggcgcgcggcgcagtgcaggagggtatccccggccggccccgggcagcccccggccgcctgcagctcctccttcagggcgcgcagccggccctcctgcaccagcctgcagaggcgccgcgggtccccgggctgggccatcgccgcgggtcgggccgggctgcgcggggaggcggcgggcgggacaccggcggccgggcagggagaagccgagggcgagtgggactttccgcctcttcacgcaacctgccccgcgcgccccgaacccggcagaaccgcccctcacgcccccggctttgtccccggcagagccgcctcctcaaacccccggcctagtccgcaggcgggctgccccctcacagccccggcctgccccgcgtgggagaagccgcggttccgggcacggggcggtttttcctcagggacggagcggtccgggatgagcacggaggggcctggggatccgagagcgctggcgtccgccgtcctggagctgcagcggcccgtacgtgattcgggactgaacacgtaagggagtggggcgcgccgctacaccgcaaagccccaaagtggagggtccgggagggcgcgcacagcctcgcccggcgccgtgcagggtggctcctgaggcagccaggcccaagcgtgacctgccccgcacgcgtcctcagggccgccccagcctccagcccctgggggccggcgttcctgggctccgcccccgtccccgcccctcgaccgccgctgctccgcggggactcggggagctcgaaggaactctgggaaagtttcccgctccgccccggcccgagcggaagcgcggatggggcgtggcccggtagctgtggccgcgcccccaccgattgcgcatttcgattggcgttagtggccgtccgtcagcacgccccctccggtctcgcgtcccgattggtcgcgggggccgtcagtccggctccggcggcgggcgcttcccggggctgcggcggggcggagctcgcggaggaagtcggcgggcgtctcgggctccaggtcccggccagaggaggagctcgctgccgggggacgctgggctgagcggccggcggcgcgggcccggcggcggcggcagcggggtccgggtccggagcgccacagtgcgtgaggccgcagacgtggcagggagtgtgggaggggctccgccgtgtggaaaacttaacctccggggtcctgcgcggggggtccgggcccggggtggggcagcgggggccccgggggcgcgaggctgggctcgggcaagcgcgggcgtgggggctcggccgtccgggccgtgggcaggtggagggcgcggcgggggtgcgcgggggaggccagggcgctcactgaactcggtcgggagcggcccccgcgctgccccccgaggccaggaaggcgcagcgtgtgggtcctcggggctgaaggggcaagcgcggggacgtggcctcggctgctaggaggccaggctttcccgtctactctgacgttttgaccttgggcaagtcatttttcgctgccctctgcccctgtgtcatcggtagcttctctgcccctcctctgagcatgggaagcctaaggcgatgtgggaggcctggcgctggtggagggcacggcgagagctgggcaggctgtgggtgatggaagagatcagtaggtgttgggttccttacccgatctgattaggtgccagtcacttaacctctccatgttttcgattcctttagggagtagaatgggagtagctcctatttgccaggcctaaaaacgagtgccgtttacattttttattgcagtctgtggtccgaagacaaccctatgaggcatcagtagggttttacaggtggggaagtggaggcctaaccaagtcagtgactttcttacagaattacaggtaataaagtcttctggaaggcaggatggtagcatgtgttgagtgtccgccagcgtctgccgctgtggtaaaatgagcggagataaatgaaaagacttctggaatgggcccatgaagataagtccgttttactcatgagcagattgagtttggttaaggtaacagtgatgtggatagcctctggagacagaactagtccaagtaccagctttgctcaggttattgttctgtcgtgccttgtcactccagcaaaagaaaaaaaggaaggcataaaagttgtttgaaatgcacaaaagtgtagggcgtgccaagcagtgttctgctgccgttgaagttagtgcaaattggaagttgaggcatctggtagcttcatgctttttgcttttacccctgcccctctcccagtttcagatgactatcttctcttgcattatgtctctagtttccctgttttttaaacataattgggacacacgggttcacagtaggttggaatatatatatatattttgagacagagtctcgctctgttgctccgggtggagtgcagtggcacgatctcggctcactgcaacctccccctcccgggttcaagcaattctcctgcctcagcctcccgagtagctgggattacaggcgtgtgccaccatgctcggctaatttttttgtatttttagtagagacggggtttcaccatgttggccaggctggtctttaaactcctggcctcaagtaattcacccagctcggcctcccaaatgctgggattacaggcgtgagcc

SEQ ID NO: 913364 - DNA, 4001 bp, Homo sapiens
actttatcaagacagccacgctttcactcatggaaacttcagctcctgcatttcctgaggctggaataccctccaccatcctggactccactgagtccccttgaaggcccagctcaggtatcctcctgtccacagaggagtccccttttttttttttttgagacggagtctccctctgtcacccaggctgaagtgcagtggtgcgatctcggcttactgcaacctccgcctcccaggttcaagcaattctcctgcctcagcctcctgagtagctgggattacaggtgcctgacaccattcctggctaattgtatttttagtagagacaggatttcaccatgttggccaggtgagtctcgaactcttgacttcaagtgatctgcccacctcggatctcagatctcaaaatgctgggattacaggcttgagccactgcacctggccctgtccacagaggagtccttgaaggccctcagaacaattcatgagccccttgtgttcctccacttctgattcacacctctatttagtcatttcttccctttgccttgtttcttagttgactatgaaaccaacaaatgggctaaaatgaatcctgggttggtaaaaagaaggcagggtctgacccttattggtccacccatttctacagctctgggctcttggcagagccaacactagatgaagtattagtttaaataaagtgaagagtaggggccgggcatggtggctcatacctgtaatcccagtactttgggaggccaaggtgggtggatcatctgaggccaggagtttgagaccagcctgaccaacagagtgaaaccccatctctactaaaaatacaaaaattagccaggcatggtggtgcatgcctgtaatcccagctactcgggaggctgaggcaggagaatcgcttgaacccaggaggcggaggttgcagtgagtcaagatcatgcattgcactccagcctgggcaacagagggagaccccgtctcaaaaaaaaaaatgcagaataggacaagccagcaccccctgccaccgctccacttccttatcccagagaaaatgcaattgcccagaacaccacacgccaaaggactccccaagggtggccagcaggctggcaaaatccatgcttcatttcccagcatcccttcctcactctcttcttcactggccaaatactggagtttcccctgccccagcctcccactcagtcactggggcatcacagggccacacattcctgaaagtcccaggcagcacccagctgtctgctttgtacagcccactgtctctcaaggcccaggagggtgagcagtcttaggaagcccagcccagctccccatctcactgacttaattttgaaggctgaagcctcagtcttctgctgccagcaataccccctgccagtaataccctgggacaggaatgaggcccaactgggcccctggggacatctgcccccctccccaccacaggtgtagcagacaggatctccctccccttgacagcagaactggatctcctcagacccccttgggcacctccacccctgctcgcacctcattctcctcctcctgtgccagccgctgctcgatgagcgctgtggccctctgcaccgcctcggagtcctccatggtgccgtccataaccgcctctgcaggccacagggcctcgggggctttataggccagagcacccacccctgcccagctgggcgcctttgccatgagctcactggcccaattctccacctgcctcccccacctgtcaccttcacctcgggcagccccagggagcagggggagccagggccagggagcagagccagttgcccccccaactcctggcctattagagccggagggcactgtgtcccaagagcaggggtgcaggaaggagcccgtccagcctctgtcctgagcacttgggactggttgggccttagccaaggcaactgagttgcaaaagggaactgctggctgcatgctccagcccagatgacagtgccacctgctggatgcctggaaaccctgctcagccagctccaggaagagggcctgaaaaccaaacgggggacccaggacagttctgtactcccaggctgtcctgcagacaggccctgctggctgtgaggagggtcacactctacttgtccaggccagggccgtggtagcaggaagggcagctgtctccctctctgatcacagctcacgctggccttcggctctccggggtcccacatgcttccccgttaagcatcactgcatttggctgggtgacttttagtcatgaacaaaccttatccaatctgtctcctctcttggtaagtgctcaggggacctctgcagggcttacagagtcttgcttcaagaaaggggtctccggaaagcactaagcccagctagcgaggaacagcagctactctggatccttctaccctcccagggtttccctgtcaggcccagacagtgccagacttccctggccaggaggctgcccatgctcactaagaaggaaaaatactcccaagtggagcaaaagcagatctgtacttgctcagttccacacctggaactcgcatgctggagctctgagtcactgtgacccaggttaatctgctagggaactgcagacacccagccctgtgcttctgtaaggctcacctggctggtggctgcccttagctaaacagccttatataagattcccttctcttcagatatgcatgcattcccctaggaagcatgaggaaccggttccttttcctttctggttcccttgctgggaagctgacacaaacctctgacacacgatctaaatctgtcagagattttgctttaacatcacgatggctacagcgtctccagggccggaagttagcccctcttgctgcaggagcagaccaccttcctgaggtgctgtcttcgccttgcaagcactttcacatctgtcttcctgcttaatcctcccagcaactgatggaggaggcagggcaggcagcatggctctgctttaaagaaaagcaaagagtggcttttcctgaggactcatgaggacaccaggggagctgggatcagggcccagaagactggcagttccaggctcactctgctggagattgcatgcccagagcagctggggaggccaggcatccacctgttcccataccagaacagctccaggggccccacagagctgcaggagaattcagtcaaatgccaggcaagcgagaaggagcaaaaggctttattgataaatatgcagatatgtctgtccacagggacctgctgtggaggccatgaccaggctgcagacctcccactgcctgggttacagccaggacatggccctgtgcagaccctgccacgacagcccagctgtccaccacccgcctcatctctgccaattgtgctgggggcagggagaggcagaggcccgcctcaggcttcccaagccctggggctcacgggtggttccctcccttccaagggagtggcactgtgcccaggggagagccaggggatgggggcagaggagggagacagcagctgcttcagaccctgagcagaaaaccagagtgagcacagctggcagcaccagatgacagatctgggctccaggggcctcctggttggcccttgtggctcgaacctgcttcgggagacaggcagggtgagggccctgttcgccttttctctgacaaggttgcaaggcccgtgtgtggctgcctgctccctgggtaccgggaactggtggcgcgtagtgccctgaaaggcagggtcccttcacggctcacccaccagccacaccgaggggagggcccctgaagaaaatgacagcactggaaggcagcagcagggtgggggcctagtgctccaggcggggcctcttcccaggggtccgtgggcccatcagtcctggggtggtgggggctggttgatgatgacctggatgacaaaatctttctggatcttggtctcctggagccgtgtgc

SEQ ID NO: 913365 - DNA, 4001 bp, Homo sapiens
aggagcttcccgcactcaaattgggggaagttttttttttttttttgaatagattcttccaggcaacataggaccagggatccagcaggcttttttcttgtccttaatgagtagctcacaatctttatccttaggaaacacagagcaaatgatatattacaaatgagtaggctatgtttaaatatttaagagattactatttaattttaaagagtctcaaactctttaaaactatagatgaaaggtcctacttccaactttctacatcagaatacctgaggatgagactaggcttttttttttcctttttccaaatcacatataattcccacatgcaatctgaaaaagcaaccaaaatgcagaatcttaggtcccacccaggtctacaaactaagaatctgcatttaaacaagaccttcagaagatctgtatagacattaaaaacgggaaagcactggcctgtggcagtctttctttctcaggatggtggtaaacagatcacccctatgtcagaaccacctgggatgctccttttaaaaagtatacttttgtatcctaccatagactgagtgaaacagactctctgggttggagtcccttgaaactgcatttcaaacaaacttctctccctgacacttgggcagtctaaagtttgagagttaccagagtagcatttaaaagcactatatgttttgtcattttcatgtatatgatcccttcatgaggctaaaatcactgagcaagacatacctagagttataaaccaatcaaacactgcatttgcacacacggagagatatatacacacatggcattagaaataactgcaaataaactgtctttaatactagatcaaaactatccaagaaggttcccctgagcatctgcaatgaaatgcagattaaccagttaattgtgtcagaggagagagagagtaaattatgtataatgacatcattacacctcttgtactcttgtctaaacattccttgcttgtactttcttgaaacatcattaaaaatccatttgattctaataagttacttccaatacaagtaaaagtacctcagtatttatcagatgtgaaaagaaaataatcaaatcatcaaaatatgttattattcctcttcttcatagtgatagtctttactaatatttactaaaggtgaatctcccttcaaataccaagctgaaaggcattactctggtcatgtggttccataaaagaggcagtcaatcttttggatatttagaaaatccaattgagtacaattttctctttttctctgagtgtttgtcatgagaaaagcacaactcaaactcgattttgtccaaattatccttgcaaacatccagatactatgaaatgtgtattatattcatctcaacttagatctagctaatattttagaattacaaaatactttgtcttaaactattaagaatatcaacaagaataacacataggactttattttttctgacttaatgctcccccagggagttgaacagacaaaacagaaatatattaacagggatagaaaattgcatctgaaaagcatgagtaacttttaacatctttggaactctgctttcagaaaggtgatgtacctcagagtataggattcccatgctggtccttcacaggcttacttcacctctacagctccttgaatcttctggaggtatttctgatgaatatcaaaatccttcctggctgagaggaaagtccctagaagtccaagctggtggcaagctccaggagtgcttttctagcaaacacctgtcagtgcttttccagcagctcaggcagcagcacaccttccagagagcccagcccaatgaaacaaaggcactggtgtcatgtgtaacgacccaagcctgtatcatctaatgttacaaccctgaggagccggtttctgagtcatatttgctctgccagtggtaacatgcaggaaagaaggaagcaaagttaagggaggaagaaaagttcttacattggcaggaaggactcacggttcaaaccaagatactgtatttcagacatttcgtaatcaaaatctggttttcagtggccattgagaaaggctagagaccaacaaacttacttgtgagagccacacgtgtctggcaaagaacttgaaaaataatcttcaaaattctcagcctaacaagtaacgcttttccagctatttatgcagttttgtaaactaataaatttactaacataataaatcttaagttgttttaaatattccaatactattcacacatttagccaaattactttataatattcaatttaaaaatcataagtctaaaatcaaatactctgttatgcattttaaattgcatcatcaatttatttatcaaacatgctagtatgcccaatctcttaaatattgtaaacattttatatgctatatatgatatcattcacacattttccttgaactgaatacaatcacatcaaactttcccagaattgaaacactcgaccgtccacacacccattataaccatgggaccagcccaaatgggccgtactttgttgataacaaatgtcaatttactctgtagatataacagagccaaaaactgtaagtcatttagcccaggcatgcacaataaaaatgtttttgcctctaacagaacctagaacaaatgatccctcccctgggaaccaagaagacaaggacatgacgggaacctaaatgcaggacctctttcagaagctaggggctcattggcccaaaagatccagggctgaaatctgcctcaacataccttacctttagtggtcaaatttgaagcccttcaatcagtccctgccaaaccaacattcctaaatcctttccctcaccctctaagccatacattttctcagattccaaactggggaggcagatttgagcccacctcctgtctccttgctgacctgtcttgcaataaagtttttctttcctcaaaacccagtgtccagatattggcttctgtgagcagggggcagcaagcctatttgctcaataatatcatggaagaaatagttcaaccatctcaaaccaattgatgtgattttcccaatcagttgaggctccttagtggccagaaactagtgaccaggatactaggcctgtgcttataaatattcagggaaattcttcttactccactggtggatatactgagctatttttataattatttcaaagattttatgtttcactatgcagttgacatcgaggccagcctctctggagtttaagaattagctaattcttccgttggaggagagggaagtctgcaatacccactaaaattgcagctgacttcctctttggcttggtttgattttgtatttctgtagactcttaagacatttaagtgtcttcccattgacttagaaaaacattaatggtatatccattgggtacttcactctgttatgcaatattttgtaacctctggtagcctcttttgtaacctctttcaactaatttgtgtggacagaactcttcactgtcattgcttctctcctaaggttgctgctagctttcttcttcaagctctttcctccctgactgagctctaaatgtttctttaactttcaatcaggatcaaaactcattttattagattctgcatctcttgacaacatctggttctaaaggaacagtactcattataattgcaaatgatgtagggttagctcaaaaaacaaaccaatgaaaaaagcagttgactcattgttatttgtaaaacacttggatttaactctaggccattgggtctcaaccaggggttatctcgcccccagatagactgcagatttagcaacgaaaaagataagatgttcagttaaatttgaatttcagataaatttctgaaatgtcatatgggacatacatacactaaaaaattatgttgcttaatggagaacgtcgttttattggaaactaaagacatttggcaatgtctggagacatttttggtggtcacaa

SEQ ID NO: 913366 - DNA, 4001 bp, Homo sapiens
aagaaaaaagtttgacttattatacaaatgcccagaaataacaaattttaccacttttttttttttttgagacggagtcttgctctgtcgcccaggctggagtgcagtggcgtgatctccgctcactgcaagctccgcctcccgggttcacgccattctcctgcctcagcctccggagtagctgggactacaggcgcccgccaccatgcccggctgatttttttgtatttttagtagaaacggggtttcactgtgttagccaggatggtctcgatctcctgacctcgtgatccgcccgcctcggcctcccgaagtgctgggattacaggcgtgagacaccgcgcctggccaaattttaccacgttttgtacatattttcagctaacacaagaccacagtctgtatgtataatcaaactttttttctcacttgagataccaaagtatatcctcacatgccaatacacttctgtatctattgccactttcttttctttctttcttttttttgagacagagttttgctcttgttgcccaggctggagtgcaatggcacgatcttggctcactgcaacctctgcctcccaggttcaagcgattctcctgcctcagtcttcggagtagctgagattacaggctcccaccaccatgcctagctaatttttgtatttttagtagagacggggtttcaccatgttggccaagctggtctcgaacttctgacctcaggatatccgcttgccttggtctcctaaaatgctgggtttacaggcgcgagccaccacgcctggcctctactgccactttcaatggtcacatattatcatgcactgacatttattcacaaaatccattctatgggttctccttaatacactgcttaagcaatgctgagaaaaacaaattacttgtatatctatttcctaaaggcattttatttctttttctttttgaaagatagggtcttgctctgttgtcactgacatacctcactgcagcctagaactcctgggctcaagtgatgctcctgcctcagccttccaagtagctgagactattagagttgggggggggggtctcgctataatgcccaggctggccttgaactcctggcctcaagcaatcctcccgcctcagcctcccgaagtgctgtgattacaggcgcgagccaccgcgcctgacgaataacagattttatagaaataatttttaacccagaagttgctatattatggaaactgcttatctcattatgcacctttccataagtgtatgacattgtatcttaaatgtgtacattaaaaataaaacgctgtacgtgcttttgttcgttaattcactttaaaattgtcacttaagtgctctctaagggatttcggggggatcggaaaccagctagagttctgtttttgtttttctgctcagaaaggcggcctgggcgctggagccctgcaaggtgtcaccgtcccaggggctacggagcccgcgggaggctgatccaggccctgggtggctcccacaaaaggggcccctcttcctgcccgcctactccagtggcactcagtccgggcttgcgacgcctattacctgttcatcttgtctctatcgttcaagccattcttcctgagcaaaaggatctgctgcactttcgccacattacccgcgctggcagctttgtggatcttgccgagatctcggtctcggacgtggtagccgggctgcgagtaggcgccctcccccggctcgcccccgcctcccgcgctgctcctctgccgccgcgcgaaggagcccaagggcgactcgcccttcttactaaaaatcttcttcatggcccaggcgaccgggcttcagagacacctcatgtctctctcggctcttaacggcctccggagcccaacataacaagtcagccccggctggccgcagcctcccaaaggaaactccgcggtttccaatctctccctccgggttaccaagcaagcgatcccgctagacacaagtgcgcatgcgcacctcagatggcaaggtccacgcgcgtgcgcacgaaggcccagtggtcaagtgtgctccatgcgcatgtgcaaggcccagacctcgcaaatctcggcgactgggacgagccctgcgttcctgtcaaacaaatgtcggtgggagtctggctgagtgttcaggacgtttgcgaaaagaagcctcgcgcctgtggggaagcagcctttacgcatgactgggactggagtagcgtggagttttaagatgctgaaagcctcttctccgagaaaactcccctaagaaactctctgaatctccctatctctcagtttattccccttccatgtccctttgggtgccatctggtctccatgagaacttaacagatgcaacaacagagggcacaggatttcggagatcgtggcatatgtgtcaagtgcagagggcacaggatttcggagatcgtggcaatatgtgtcaagtgcaaacttacgaggagaaaccaatgcacattctccagaagaaatgagaacgcatttctgcatgcctccttcccccacccctctgcctttggcccagccttatgttttattttttgcttttgattttccaaggttacatctctttcttcttttttttttttttttccccaacagagtctcgctttgtcgcccagactgtagtgcagtggtgcaatcacggctcactgcagtctccacctcctgggctcaacgatactcccacctcagcctcctgagtgagtagctgagactacagacgcaagccaccacgcccggctatttttgcattttttgtagagacagggtctcaccatgttgcccaggctggtctccgactccagggctcaaatgatgctcccatctcagcctcccaaagtgctgggattacaggtgtgaaccaccacgcccagcctagattgaataatttgacaacaaattggaattagcaacgcagacgtcaagtggagtctcagcagaaattgctgctggaatgcacctccatagctctggacagctctagggtcccttgtggaggaggtggctggccccagaacaggcgtctttattgccaagtgagaaatgagcaaaaacaaaacaacacttctcaggcctctccagcttagctagatcaaatggttttgatgtgggagagtggtttccactatcgtcaccaagaattttcctcctacactaccccagctagaaagttatgttgtctcctcaacactccccaaggtgatctatgaagctagtcaagtcccagcactttaggaggccgaggtgggtggattacctgaggtcaggagttcgagaccaggccaacgtggtgaaaccccgtctctactaaaaatacaaaaattagctgggtgtggtggtgcatgcctgtagtcccagctactcgggaggctgaggcaggagaaacacttgaacctgggaggcagaggttcacaccactgcctctggagtggagactcttggatggagaccacgactctctctcaaaaaacaaaaacaaaaacaaacaaaaaatactcaagtgtggagaacactgactctgaacagaggactctgacatttcctaatgcagcctgaaattaaggccaaagacattaccagtctggatggatataggaatcacacaccactctccaggtaagttgtagagatttggttgactatagtgtttttgtatagaccagagatacccaaggactatatgttaggccagctctgaggtgttgaattcatcagccaaatgctggatccccaaaaagtttcttggagttcattgaaagctaagatctcccattcatatggaaattaatttcagatccagagcagacaccctctagaaagttgtcacttggaactcccatgcctatctaaggctaaagtaatgccctggttcagttttcctataccctcatttaataattatgtcaatgaaattaatgtgttaggggaatatttgttttatagtgaaaatcaactg

SEQ ID NO: 913367 - DNA, 4001 bp, Homo sapiens
ggtacttaccatcaaattgtctatttgaaaagtcatctgcaacttaaactttaaggagtactataaatatcactgctttttatcctcacaaactttgtggatagaaaacagtatttgattccttttttaacttaaatgccttctctaaccaggaacactaaatattatttcctgtgtgcataggtcagttgcagatcttaaaaaaggactttgcccaatttttagatctgcaatttagatctctaatttaaatttcccaattttaaattagagggttttttgttgatttgagtgaattctctataaagcgaagatttttaaatctaatatgtatacacacacacacatacatatgtagtaaatatttttacaagtatgctgccctttattttttctcatatgcagggtgacttaatttctgttttactaaattgcccttcagagtgcttgcttctgagcttcttaaaaaggttttgtcaagataaaaatgtatctgtgtaaataggcatttatattttcttccggtatttttatcattttgtacattaaaaacttttaatctatattccatcaggaacttattttgtggcacaaaaatctagttttctccaaaaagcaggcatttcacttaggaaactaattcttttcctgctagtataaagtgtgaccattaccaagttctaaattcttacatatatttgggtgtttgtggattttctattctgttgtatttatttacctgtcttttcagctgttagcgaacaatttgtgatttttttttttttttttttttttttttttttttttttttgagacagagtttcactctatcacctaggctgaattgcagtggtgggatctcggctctctgcaatctccgcctaccgggttcaagcgattctcccgcctcagcctccccagtagctgggattacaggcacccgacatcatgcccggctaatttttgtatttttgtagagacggcgtttcaccatattggccaggctgatcttgaactcctgacctcagatgatccacctgcctccgcagcccaaagtgttgggatcacaggcgtgagccaccactcccggctcatcttgtgcaaattaataccacattttgatatctagaagggcaagacttttttactccattacaaaatatttaaaatgtcatcacaatagtaaaagacagcctgtgtaatttaaaaaatgttaaaacgttgataactttatttggtttatgtaaaactgataaagaactcgcatcctgagaaaaatgagtcttcttaaattcaagaacataaaccatcttcccacctcgaagtttccttctaaggtccctcagcaaagaacatatttacatagacattcattgatatcaaaatggatattggactctatccagataatttttagccaagaagtacatatattatgggaattatttcattacgcaccatttcataatgtatctaacattatcttttaaaacctgtacattaaatgtaaaaccctgtatgtacttaattttgtgagttaaatcactttaaaattctctacacagtcctctgtgagaggaagtgggagtgaaggagaaagcagctaaagtttggggttgattttaaggtggcatgggccctccgccctgcagggaccccgcatcccaagcctgggggcctgcccaggaagaaggcctagacccgagggcccaggatggctgccccgctgcccgttactcctccacctgctcccttcttccccaggccccccagcccccgactctgaaggggcgatcctcccaccgcccccacctcctcctgcagccccggctcaggcagggcctggtacctcttctgggcgtcttgtatattaaggttgatggtcttcttcctctttgtcatcttctccagcttccggacttgtccccgggaggcagctttatggatctttctaagatccccagagtggacgatgtaggagtcgttgctggtatagactagctggctgaaagggctcgggcgctccgggcccggcacgaccttgacagcggcggcagagatctcctccatggctgcggccacctgctagagagtgcccgcgcctcccgatcgcccttcccagccaccaccccccacccctccccaatcgccctcgcccttcttcagtccacgcaccgcctcgatacccgtaaaaagttctgtgttcgccaagctcttgcacactcaggcctctctcagtagaatcgcgctgagcagagccgttagccagcagcgcatgcgcagctcagcaggctgaggagacacgcgccctggccgcgttctccgggcaccgcgtgcaggtggcaactgccgctgaggcactgcgaggctggcgggcctccctggagcggaaagtggggggcgccatgccacatggcccgcttgacatagccgcccctggcccctcctcgacctgcgatccaggagccggaccctgatgctgggcacggtgcagcctcttgggtggcactgagtgtcggttcccgccctcctgcagccagggacccaccccctgacttaggcgccctggaggcttctggcccaaggatccgcgctgctggtgacgctgacagggtcgaggttgcagcccctgctgccgcgtgccatgttcaggtgggagctgcacctgagtccacggtggaggctaatcttgtatttttttagtagagacggggtttctccatgttggtgaggccggtctggaactcttaggctcaagcgatctgcccaggatcgcaaagtcctgatcccaggacttcggaaggctgagcggggcagatcgcttgaccctaggagttccagaactgcctgaccaacatggagaaatcctgtctctactaaaaaaaaaaaaaaaaaaaatacaaaattagccgggcatggtggcacatccctgtaataccagctattcaggaggctgaggcagggaaatggcttggacccgggaggcggaggtttcagtgagccgcccgtggcccctcctcgacctgcgatccaggagctggaccctggcgctgggcaccgtgcagcctccgcggtggcactgagtgtccgttcccgccctcctgcagccggggacccaccccctgacttaggcgccctagaggcttctggcccatggatccgcgctgctggtgacgctgacagggtcgggggcgagccaccacgccaggctgatgtattcccttctgatgaataaattgactgggtgccagtttatcactagaaaagatggattacctcactaaaccaccttccaaacctctcctctcggtttcctgcattggttactttttttttttttttttgagacggagtctcgctctgttgcccaggctgtagtgcaagggcgccatctcggctcactgcaacctctgcctcccgggttcaagcgattctcctgcctcagcctcccgaatagctgggattacaggtgcgtgccaccacgcccagctaatttttgtacttttagtagagatggggtttcaccatgttggtcaggctggtcttgatcctgatctcgtgatccatctgccccggcctcccaaagtgctgggactacaagacaagcatgagccaatgtgcccctctgtaatttcttttcctttttctttttttttttttgaggcggagtctcgctctgtcacccaggctgtagtgcagtggtgctatctcagctcactgcaagctccgcgtcctgggttcatgccattctcctgcctcagcctccccagtaactgggactacaggtgcccgccaccacacccagctatttttttttttatatttttagtagagacggggtttcaccgtgttagccaggatgctcttgatctcctgacctcgtgttccacccgcttcggcctcccaaagtgttgggattacaggcgtgaaacaccgtgcctggccaatttctttcttttttttttttttttcttgagacaagtttagttcttgtcgcccag

SEQ ID NO: 913368 - DNA, 4001 bp, Homo sapiens
tctggaggctgtggtgggtcattccctggccatgacctggctcattgcctcctccttagaatggggcaatgccctttacccccagccttgttaggaagactcattaaggttgcttttgtctgctccctttacatccactctaggcactccctctgcattccccctcatccagtctgtctgggattacatcagggcctctgcagttcctgtgagtttctagcctgtggctctgccttgcctggcaggtcccttcatccccatcctctgtcatcgcctctgacctgcaaattctcccttcatcctcatcacacttggcaaggtgaaaatgaagataccctttttacagatgggggacacgaaggcacagaatgatgaagcaacttgcccaagactatgtggctagtgagtggactctgcctgtctccagaactgagttgctccttccccaagagtagcagaacagtcagaaaccatgggaattggtgggctggggtacacgtcccctaaccattagtatccaggaggaatgagaaaaatcagaggaatttcaacctgcgatgctggaaagtgtgcagcacaggaagccggagtcttgtcacactagctgtctctggatgcttccccaacctccaggagccacccttgtccaggaaccagatagaaaaatacctgtactactcacagcccaggattgtggtgaggtgccaggagtgcaggggaagggctttggaggccagaaagtgctgcaacattctcctgaagattgcaccactgctgctactgaataagcacagagtattaccacccagcaggaggagcaggaaagggaaccaaggcaatctctccaaagctgaacatttgcctcttttctttcctggtgagccagaaggtgcctaatacgtagcccagcttccccagggccagcctgaaacagaccaaactgttctgaaagtgtaggaactatcgcgtggctctccaagttgcagaagaggcacttagaagcagccaaccaaaggccttctctaagcagtgacattagaatgcccaacacaggcaacaaagcaatctctgtggggcccagtaaaatagaagtcatttgcgtgaaaaaacaaacaagcaaaacaacacagaaaccccaaacatccgcagtgagcatctgagaactgctgagaggcaggtccgagcaatcatctgttgcagcagcgtgaggatgaggatgctgacccagctgatggaggggtagggaatcgtccagaacccctttggtggcttttttcctcatccaggagatgaagcaccagggaaaagaaagccagggcattctttctgcctcagaaaaacaggaggcctaggtctggtctgaccaaagtttggccctgcttctgtgacggaagcttgcatctccttgagtggtgtcctgtccctagtgaaaaagagacagtggctcctgagggtgacccagggccagagctagaagggacactcacttgtccaagatgaagtagaggtcaaatgagccctggcatctgtgacctgcttgcccctggcgccagtgctgcctccatcctgggccatggtggtggtgggctctcctggagcccagggccaggcggtgaaatattctccagtcaggtccatggtaccgaaggcttcctgctctaaaaagcggtggaggaagcagcagcagcagcaggaagaccaggaagtagggccccagggactcatggctccccattatctggctgtccctgtgaccccacctcactcttgggtgcctgtgccagggcccagagaggctgagcacaggccccttctttgccgcctccccttatgcccggggccacacccctcctcctgccctttcaccagtgcacactatggccctccaccaggtacctccccagatcgcagggactagggtcagcagctggctctgggagacttgcttccagctacctgcctggcccttcccccaccctggggacagaattctctgttatggttgacaggaaggttgacatggtgactttgtgacctgcagctcttcccaatgtcctgcatgttgacaacatcagggggaggcacaggacctttggaggggctacaagaggaagcctccatttcccttataacagccctcacagtgtcccttaaaaccactagaccctgctgtttgttcattggaagagttagcccaggtgagttaggtgaggacattgctgtgggtgaggaggtcaaggactgggaggccagagtgttggcaatgggaggttatttgtgtgacactgaagtcccccaggagatggcagttcgggaaggagatggaaactgcagtgttgccagagtctttgtgaatgagggacattccggttctctactgctgtgtaacagaccacctacatttagggacacagaacaggcccattttattatgctcacaggttctgaggatcaggcactcagggcggagttaggagggctcctcatgtctggggccccataacttgaaggattgggcactggaattatctggaggctgctccactcacaagtgtggctcctaggcaggagggcccaaaacctgggctcagctgggactgtgaatggagaccctgcatgtagcctccccgtgtgacctgggcttcctcccagcatggcagcttcagggtgcttgggcttttacaggtggcccagaggtccaagagtgagtattttcagtgagcacggcagaaactgtagagctttttatgacatcaccttggaagtcacacagtgtcacttccactgtgctctattggtccaagcagtcacagctgccaagagtcaatgggcaggaacacaggccccctctctagggaaagaatgtggacaggttcacatcccagtgtcaaaactgctgtatgaccaacgctttgaatagcagagaggttacagtgtgtggaaagacgtaggcaccaatgagtgagactcaaacaggactcagaaaagtcagactgtaactgttagaaacaccttaatcaattttattttattttgtatgcacaagagtgatatccaattaaaaatcgttctctaataagtctaaaatatatctttcaatatgtgtaatatacaaattacaagtgataaaagtattgggttagttttttgttctttgatttcttttgttttggaactgtatttaatataatagagtatcttaaataaggggtatttcagaatgaatgaagcccagtatatttccttcaaaagcatatttgagctatcttgcttcattcttcttgatacttggtattagcatactttaatatttttgcctggtggtaagtcatctccttgtggtttacttttttcttattttatttatttatttttttgtagagacagggtcttgctatgtttcccaggctagactccacctcctggcctcaagggatcctctggccctggactcccaagcgctgagattagaggtgtgtgagccaccctcactgccctctttgtggtcttaatttgctatttcctaattactaatgggaactggtcacctactcacttgattttggtcgttcatggttcctctttgaagtgcctatttaatgccggcatccattctttgcttcaggtgtttttctctttcacattgactcaataacagtctttatatatcctggatactaatcctttatcacttgctgcaagtatcttcttttactctgtggcttgtttttttcacttcatttattgttttttaaacaaagcctaagttcttaattttaacgtacttgaactgacattttctaccctggccccctcccacccttagttcccagacacctcttatgatctggggtcgaggagcccgccttcctggcggtctcagctggggcctggggagcgaaggcggcgggcgctcgcgggaggagctgcgcgattcggatgctggggaggtgaagctcgcggggccgccaggccgccggggtaaggaaggccgggaggcc

SEQ ID NO: 913369 - DNA, 4001 bp, Homo sapiens
tgagtgctgccaccaagaggtaagtcagaaacagcccccaccctccagagtcagaggacagggcagcgataagccacaccgccacacaaatactatgcaaggcgagagatgagaaccgagtcagtgccagaagggctgagtgagctcagagcatatcccgtccctcctgctgggagcaggcacccggatggctcccaggagggtggagaatgctaggccagacaggggagggagggcattccagtaagacagagagcatgagcttagcatgagctaagccagaaagacggttcaggagaagtgcatttcaactttagctgaaccttccactgctactatttattgacccttacacctgattatttatgacccaggcctgcctcacacactttatggctaatgtgggtgacacccatctgggatacacaagtgtggtgcagcagtcaccacctgttctgactggtccgtacctgagctctgtattgttattaaataaatgaatgcactgaatctcacaagcctgtgaggcagggattactattacccccattttacagatgaaaaaccaaagcacagacaatagtcaaagaaaagatagcaaggtatgcaggagcctgaagtagtgggcacccaatgccagggcaacaaactgccctggcacctcacctggcctctcttatcagggaacaccttgcagcacaaagaatgccttgaggaaaggggccctgttaatcccctggaatccccaacaattgactgccgcataaaaggaatgaggaaagcaatgagagccagtgaagggtgagcataccaggccctgccctgcaaacctagtccctgttgcgtgggcagggcagggcagggcagggcaggggctcggcctcacagctccactccatgcccagcgcagagaacagaggggagagctaccacaaacgccgaatctctacagagaggtcaaggattggagggcagagacagaaatgccccgggctgactgtttccagcttgggctagcactggctggcttaacttttcccctccaaagtctctaggtaacaaacttcgcgtgtctcctttaaaccaacagaccattttacctaagtcttaagggcctggcctgcacccatgggagatacaagtccaggaatcccttcctgaaactggggatcaaggttggggaaggggcgaaggcacgcacagcacctgggatggctcccgcattccctcaaacactggggagagttccttacaaataaactgcaatggtagcagctcccaggaatgtgcgtgctcccagtttcggaggaaagttcctgaagatagccttctctgcttaatctccccaagcctcgcctagaagggcgcgcgcaccctggagggctccgcagggctgcggggccgggcctccggcacccctcccgccacccgttgcctcctgcgcccagggtcacggcccctggccctacccaggcccagactgagaccccgacccctgagcccggggggacggcgagtgcaccccgaccacacatgagggagcagccccagacgccgaggctgatctagggggctgccaggccgacacggcccgcccgcgacccgccgacgccctcccctgccccccacccccacgcctgtagtgcaaccaggaagccgcagggccgcgctgggctgggcgccaggcagccccgggcctcacccgcggcgccgcggtgcactgccgccgcctggtcccaggcccccagccggctcgggaccctcactcacctggccacggggactccggacgcgaggggcgaaatgggacgtgggcgggagtggctctctccgcgggcgtcccgggcgcggcgcctgggttctgcctaggggctgggtcccactcccgctcgcggggcccgcggggcactcggggcactggggagccgcgggcgcagcagccgtcagcgccgggcggaaaactccgcgggcgcggctgccccaggtgccagaggcagtgcaagggaggggcggggcctgagcgcggccccgcccccaagatgaggactgggcacggcgggcccgcgaggagcagcagccttccggctgcggagctgctccaggaagtctcgggctccggaggtccctctgccgcccctaacccctgcggcgcccagtgccgcgcagagccgcattcgccctcctgcaggggtgggcatttcctaagtcctctccagccccgtgtgcgtcggttagtgactctctttaaggtcgagaaaactttttacactgaaaaggtcaaacgcatttcctttatagcaacactcggtggtggtggaggggggaaggtcacgcacagtatgtgaggaagggagcggtcagtgactatcgtggagaaacctgacaaaccacccagccgtcaaggtgacctcgacaggggtaaatcatactgattgcatgcaccgcttgtggtcttcctcccaagaacacctaaccccactgtaatcatgaggaaaacatcacaaatcaattgaggcccttgccatatacatgaccagtactcctgaaaactagcaaggtcatcaaaaacaaggaaagtctaggacactgtcacagccaagaggaacccacggagatataaaaatgacttaagatgttaataataggaaaagcccgggtttatgagaattccctgtattcacactttttctgtaaatctaaagatgttctaaaaataaagcatatttttaaaaggtcacccaggtaatatatgcatatatggtaggtatacaatttttttttttaatgagtggtggctgacgcctgtaatctcagcactttggaaggccaagacaggaggatggcttgaagacagggcttccagactagcctgggcaacatagtgagacccagtctctaaaaaactaaaaataaaaaattcaaaaaatgagtaaaaattgagattcactcttccctccactcccccagcccactcttaggtgtgtccttccaaatatctctctttaacactgtgtgtgtgtgtttacataaacgtattgtttacaaaacgatattgcagtacttttctgcaacatgtttttttactcactatatcttggagggtctttccatacaagtgctcctgaacagacctggttcttcccatccactgcacactgcgcgccatcgtgcgcttcaccattcttcattacctagctccttactgaaggacatttaggttgttgcctatgtttggctgttacaaacaagctgctggttcgattttcctttttttttttttttttctgagacggagtctcgatctgtcgcccaggctggagtgcagtggcgcgatctcggctcactgcaacttccgcctcccgggttcaagcgattctcctgcctcggcctcctgagttgctggatctacagatgcccaccaccacgcccggctaattttcatttttagtagagacggggtttcactatgttggccaagctgttctcgaactcctaggctcaaatgatccgcccgcctcggcctcccaaagtgctgggattacaggcgtgagccaccgcgcccggcccgatttgcgttttaaagtcgctctgaacaataaaatccggaaggactggaggggaggctccgaccttctccctgtctgggcaggtgtgctggtgccgggcaggaacggtgccttgggacagcctggccccggcctcacaacgggccccgggcgctcagtcatattccgtggccgctccaacaccccctacccccaccagcaggcgcggctctctttcggggctggactgcattttttggacatgagtcggcgagtgagggtgaaactcaggccaaagtctccagagccgctcggagaaaacgctgcctggaacagaagagcagaggatcagaggcaccaccagagactctcagagtgggttattaccctggtgggggcgcctgctgcggcgtaggagatggcgggactgggggcgcgggtgtgaagcccccaaga

SEQ ID NO: 913370 - DNA, 4001 bp, Homo sapiens
gagatgagaaccgagtcagtgccagaagggctgagtgagctcagagcatatcccgtccctcctgctgggagcaggcacccggatggctcccaggagggtggagaatgctaggccagacaggggagggagggcattccagtaagacagagagcatgagcttagcatgagctaagccagaaagacggttcaggagaagtgcatttcaactttagctgaaccttccactgctactatttattgacccttacacctgattatttatgacccaggcctgcctcacacactttatggctaatgtgggtgacacccatctgggatacacaagtgtggtgcagcagtcaccacctgttctgactggtccgtacctgagctctgtattgttattaaataaatgaatgcactgaatctcacaagcctgtgaggcagggattactattacccccattttacagatgaaaaaccaaagcacagacaatagtcaaagaaaagatagcaaggtatgcaggagcctgaagtagtgggcacccaatgccagggcaacaaactgccctggcacctcacctggcctctcttatcagggaacaccttgcagcacaaagaatgccttgaggaaaggggccctgttaatcccctggaatccccaacaattgactgccgcataaaaggaatgaggaaagcaatgagagccagtgaagggtgagcataccaggccctgccctgcaaacctagtccctgttgcgtgggcagggcagggcagggcagggcaggggctcggcctcacagctccactccatgcccagcgcagagaacagaggggagagctaccacaaacgccgaatctctacagagaggtcaaggattggagggcagagacagaaatgccccgggctgactgtttccagcttgggctagcactggctggcttaacttttcccctccaaagtctctaggtaacaaacttcgcgtgtctcctttaaaccaacagaccattttacctaagtcttaagggcctggcctgcacccatgggagatacaagtccaggaatcccttcctgaaactggggatcaaggttggggaaggggcgaaggcacgcacagcacctgggatggctcccgcattccctcaaacactggggagagttccttacaaataaactgcaatggtagcagctcccaggaatgtgcgtgctcccagtttcggaggaaagttcctgaagatagccttctctgcttaatctccccaagcctcgcctagaagggcgcgcgcaccctggagggctccgcagggctgcggggccgggcctccggcacccctcccgccacccgttgcctcctgcgcccagggtcacggcccctggccctacccaggcccagactgagaccccgacccctgagcccggggggacggcgagtgcaccccgaccacacatgagggagcagccccagacgccgaggctgatctagggggctgccaggccgacacggcccgcccgcgacccgccgacgccctcccctgccccccacccccacgcctgtagtgcaaccaggaagccgcagggccgcgctgggctgggcgccaggcagccccgggcctcacccgcggcgccgcggtgcactgccgccgcctggtcccaggcccccagccggctcgggaccctcactcacctggccacggggactccggacgcgaggggcgaaatgggacgtgggcgggagtggctctctccgcgggcgtcccgggcgcggcgcctgggttctgcctaggggctgggtcccactcccgctcgcggggcccgcggggcactcggggcactggggagccgcgggcgcagcagccgtcagcgccgggcggaaaactccgcgggcgcggctgccccaggtgccagaggcagtgcaagggaggggcggggcctgagcgcggccccgcccccaagatgaggactgggcacggcgggcccgcgaggagcagcagccttccggctgcggagctgctccaggaagtctcgggctccggaggtccctctgccgcccctaacccctgcggcgcccagtgccgcgcagagccgcattcgccctcctgcaggggtgggcatttcctaagtcctctccagccccgtgtgcgtcggttagtgactctctttaaggtcgagaaaactttttacactgaaaaggtcaaacgcatttcctttatagcaacactcggtggtggtggaggggggaaggtcacgcacagtatgtgaggaagggagcggtcagtgactatcgtggagaaacctgacaaaccacccagccgtcaaggtgacctcgacaggggtaaatcatactgattgcatgcaccgcttgtggtcttcctcccaagaacacctaaccccactgtaatcatgaggaaaacatcacaaatcaattgaggcccttgccatatacatgaccagtactcctgaaaactagcaaggtcatcaaaaacaaggaaagtctaggacactgtcacagccaagaggaacccacggagatataaaaatgacttaagatgttaataataggaaaagcccgggtttatgagaattccctgtattcacactttttctgtaaatctaaagatgttctaaaaataaagcatatttttaaaaggtcacccaggtaatatatgcatatatggtaggtatacaatttttttttttaatgagtggtggctgacgcctgtaatctcagcactttggaaggccaagacaggaggatggcttgaagacagggcttccagactagcctgggcaacatagtgagacccagtctctaaaaaactaaaaataaaaaattcaaaaaatgagtaaaaattgagattcactcttccctccactcccccagcccactcttaggtgtgtccttccaaatatctctctttaacactgtgtgtgtgtgtttacataaacgtattgtttacaaaacgatattgcagtacttttctgcaacatgtttttttactcactatatcttggagggtctttccatacaagtgctcctgaacagacctggttcttcccatccactgcacactgcgcgccatcgtgcgcttcaccattcttcattacctagctccttactgaaggacatttaggttgttgcctatgtttggctgttacaaacaagctgctggttcgattttcctttttttttttttttttctgagacggagtctcgatctgtcgcccaggctggagtgcagtggcgcgatctcggctcactgcaacttccgcctcccgggttcaagcgattctcctgcctcggcctcctgagttgctggatctacagatgcccaccaccacgcccggctaattttcatttttagtagagacggggtttcactatgttggccaagctgttctcgaactcctaggctcaaatgatccgcccgcctcggcctcccaaagtgctgggattacaggcgtgagccaccgcgcccggcccgatttgcgttttaaagtcgctctgaacaataaaatccggaaggactggaggggaggctccgaccttctccctgtctgggcaggtgtgctggtgccgggcaggaacggtgccttgggacagcctggccccggcctcacaacgggccccgggcgctcagtcatattccgtggccgctccaacaccccctacccccaccagcaggcgcggctctctttcggggctggactgcattttttggacatgagtcggcgagtgagggtgaaactcaggccaaagtctccagagccgctcggagaaaacgctgcctggaacagaagagcagaggatcagaggcaccaccagagactctcagagtgggttattaccctggtgggggcgcctgctgcggcgtaggagatggcgggactgggggcgcgggtgtgaagcccccaagaaatctgtgtgaatttcctggggaggtaaggtctccaggcgctctctctgggcccggggattggtccgggaaggtctcctggcgcctacccagcccccactgcctg

SEQ ID NO: 913371 - DNA, 4001 bp, Homo sapiens
ctccctttaaaagcacaaactcccaccaagaaaatctcagtttcttcattaatcctaagagctttcctatctaggtatcactcaaaattcctactattctgggggcaatgggatcagagggtgttgcagagaaaaatccagagaaagtgaaaagtctacttccttggcagtgctggtgaagcatacccttacacagacgcttccccatgggaacaagtgccaggaactgcttcaggcttacgggggaaaacagtggctaagaagagagaggaggccgggcacggtgactcatgcctgtaatcccagcactttgggagactgaggcaggcagatcacctgaggtcaggagttcaagaccagcctggccaacatggtgaagccccgtctctactaaaaatacaaaaattagccgggcatggtggtgcatgcctgtaatcccagctactcgggaggccaagggaggagaatcatttaaacccagggagcggaggttgcagtgagccaagattgcatcactgcactccagcctgggtgacagggcgaaatctgtctcaaaaaaaaaaaaaaaaaaaaagacagcagaagaagaggggtgaatccaggaggaaggagggggtgcaccagaaaggtcccaggacctctgatgttccagcattcagcatgcattttggttccacattcagctcctgcccacaccagtttcttttctctattctacaatttccaagaagaacccacactaacctattctgtctcaactcccactcctgtcatcccaagccacacatcacctccccaatcacgtgaactaggcatcactaatcgatcctggccttctagacacatccacccagggtgggccctttctatagtatcatgcataaaggcgtcaggtgaggcttccactcccacctcttagtcccaattcatctccatctcaccctccccacgtttctctatccaaacccagccttcaaggtcctatattttaaccacagggaaaccacttccctgtgctgtctctgttgttcaactaacgacaactaattttctgagcacctacattaggcaaggcccatcctgagtgctgccaccaagaggtaagtcagaaacagcccccaccctccagagtcagaggacagggcagcgataagccacaccgccacacaaatactatgcaaggcgagagatgagaaccgagtcagtgccagaagggctgagtgagctcagagcatatcccgtccctcctgctgggagcaggcacccggatggctcccaggagggtggagaatgctaggccagacaggggagggagggcattccagtaagacagagagcatgagcttagcatgagctaagccagaaagacggttcaggagaagtgcatttcaactttagctgaaccttccactgctactatttattgacccttacacctgattatttatgacccaggcctgcctcacacactttatggctaatgtgggtgacacccatctgggatacacaagtgtggtgcagcagtcaccacctgttctgactggtccgtacctgagctctgtattgttattaaataaatgaatgcactgaatctcacaagcctgtgaggcagggattactattacccccattttacagatgaaaaaccaaagcacagacaatagtcaaagaaaagatagcaaggtatgcaggagcctgaagtagtgggcacccaatgccagggcaacaaactgccctggcacctcacctggcctctcttatcagggaacaccttgcagcacaaagaatgccttgaggaaaggggccctgttaatcccctggaatccccaacaattgactgccgcataaaaggaatgaggaaagcaatgagagccagtgaagggtgagcataccaggccctgccctgcaaacctagtccctgttgcgtgggcagggcagggcagggcagggcaggggctcggcctcacagctccactccatgcccagcgcagagaacagaggggagagctaccacaaacgccgaatctctacagagaggtcaaggattggagggcagagacagaaatgccccgggctgactgtttccagcttgggctagcactggctggcttaacttttcccctccaaagtctctaggtaacaaacttcgcgtgtctcctttaaaccaacagaccattttacctaagtcttaagggcctggcctgcacccatgggagatacaagtccaggaatcccttcctgaaactggggatcaaggttggggaaggggcgaaggcacgcacagcacctgggatggctcccgcattccctcaaacactggggagagttccttacaaataaactgcaatggtagcagctcccaggaatgtgcgtgctcccagtttcggaggaaagttcctgaagatagccttctctgcttaatctccccaagcctcgcctagaagggcgcgcgcaccctggagggctccgcagggctgcggggccgggcctccggcacccctcccgccacccgttgcctcctgcgcccagggtcacggcccctggccctacccaggcccagactgagaccccgacccctgagcccggggggacggcgagtgcaccccgaccacacatgagggagcagccccagacgccgaggctgatctagggggctgccaggccgacacggcccgcccgcgacccgccgacgccctcccctgccccccacccccacgcctgtagtgcaaccaggaagccgcagggccgcgctgggctgggcgccaggcagccccgggcctcacccgcggcgccgcggtgcactgccgccgcctggtcccaggcccccagccggctcgggaccctcactcacctggccacggggactccggacgcgaggggcgaaatgggacgtgggcgggagtggctctctccgcgggcgtcccgggcgcggcgcctgggttctgcctaggggctgggtcccactcccgctcgcggggcccgcggggcactcggggcactggggagccgcgggcgcagcagccgtcagcgccgggcggaaaactccgcgggcgcggctgccccaggtgccagaggcagtgcaagggaggggcggggcctgagcgcggccccgcccccaagatgaggactgggcacggcgggcccgcgaggagcagcagccttccggctgcggagctgctccaggaagtctcgggctccggaggtccctctgccgcccctaacccctgcggcgcccagtgccgcgcagagccgcattcgccctcctgcaggggtgggcatttcctaagtcctctccagccccgtgtgcgtcggttagtgactctctttaaggtcgagaaaactttttacactgaaaaggtcaaacgcatttcctttatagcaacactcggtggtggtggaggggggaaggtcacgcacagtatgtgaggaagggagcggtcagtgactatcgtggagaaacctgacaaaccacccagccgtcaaggtgacctcgacaggggtaaatcatactgattgcatgcaccgcttgtggtcttcctcccaagaacacctaaccccactgtaatcatgaggaaaacatcacaaatcaattgaggcccttgccatatacatgaccagtactcctgaaaactagcaaggtcatcaaaaacaaggaaagtctaggacactgtcacagccaagaggaacccacggagatataaaaatgacttaagatgttaataataggaaaagcccgggtttatgagaattccctgtattcacactttttctgtaaatctaaagatgttctaaaaataaagcatatttttaaaaggtcacccaggtaatatatgcatatatggtaggtatacaatttttttttttaatgagtggtggctgacgcctgtaatctcagcactttggaaggccaagacaggaggatggcttgaagacagggcttccagactagcctgggcaacatagtgagacccagtctctaaaaaactaaaaataaaaaattc

SEQ ID NO: 913372 - DNA, 4001 bp, Homo sapiens
tggagtgcagtggcacgatctcagcttactgcaacctccgcctccggggttcaagagattcttgtgcctcaacctcctgagtagctgggactacaggcgcctgccaccacgcccggctaatttttgtatttttagtagagacggggtttcaccgtgttagtcaggatggtctcgatctcctgacctcgtgatcctcccgcctaggcctcccaaagtgctgggattacaggcgacagccactgcgcccggccgagacttacttttcaatgtactttagcccttttagaattgtacatatatcatttattcaagaggcagattttaaacgtttttgtaaaaagctaaataacacccagagtgactcaaaaaatttctcaactttgcccaagtgaatagtaagtctagagttttttgggttttttttttttttgtgacagagtttctctctgccgcccaggctggagtgcagtggcgatcttggctcactgcaacctctgcctcccgggttcaagcgactctcctgcctcagcctccagagtagctgggattacaggcgcgcgccaccacgcccagctaatttttgtatttttaagtagagacggggtttcaccgtgttggtcaagctggtctcaaactcctcctgacctcgtgaatctctcgcctcggcctcccaaagtgctaggattacaggagtgagccaccgcgctcgggcttttttttttttttttttaaacattctctgttagcaatcacttttaaaagactagaaaatcatttttggttttccaaaccacctccacccagtgagtcagttagtaaaagggctgggtctcaccgtttctcattgatggcatgaagcccaggaacccaagaggcagctgttgcaaatttatgggggaaaaaatacacgaaacaggaagggtgactgaagatacgcgcaacagcgaatacaattttgcaaaaccggcttctaggtatggtaggatcatttaaatccgtcagtgatgtggagaaagaacatggaggcatggctagtcctctgcacggacaggtaggtagccaaccaccagtgaggactgaaagacagtcctcactgaaaaggactgaaagtttgcagtggccaaaattatctcttttacctattcagtgcttgaaactctttccttgcctggaaggtaactcattacactcatcatctaattcggacacatttagcagattagctggccatcagctggcaaaaatcagggcgtttacggcagtcggaagacaacagcgtcatgtctgtcactttacggtggacatcagccatctacctctgcaccttggtttccttgcgcagtgtttgcacaggatgagctaatttcaacacagatttgctgctggtcggggaacagcaatcaaatctggaatgctattctagaatagcttccaagaactgtaaacgagaaccagtgtacgaccttggcctggcgcattctgtcctacggttcactaaacacagtaaaaatttccccaagtttccctaaattcgctgtgtcaccggaaagtacagccactaccagccagacggctttcagcactgcccgtgcgtttccctactcagcctcccgcgaggcagctgggccacgctccggcctcagcccctccacctgcccgagggcggggcgccactggtccctgggatttccaaacggacggaagggcttcccgtaagccaggccggccgcctcacccacgccaccccaacacaccccggccggcagcccggctacgagacgcgcaaaccgagtcgccgccatccgggaggcccacactgccctccagccgcgccccactagcaccgggacagcagcgcccagagctggccgagggcaagaccaccgaggcagacgaggtgggaaagggaggggggcgccgctcctcacctgaccccagcagcagcgtcacagcccaacccggtctcccgcaagatggagccgggggcgggcccagggtgggcggggcgtctcgcgagcccgttaggatcgcggctgcagccgggaacacccccggagccggagagggcgctgcggggagcgggctgtccctcagtcccgcccctaggcgccacctgagggaaaaagactctcccttcgggtggcccagcggatttttaatcacatttatctgtcgcaaggaccctgcaccaatcccttttaaggctgcctcaagtcacctaggaagttgcagcagtcctgggggtatccggggccccttcagtggcgggcggtagagaagggctgagactgggaggctggtgcagcctccccgcctctgaaataccgtcctccaggtattttctggggacaaagacggcgttttttgttagcctcctgtgaaagtaatatttgtgggaaatcttagttggaactgtagatgaactaatcaaaatcactcccgaaaggagttgttaggtgattttaggctcccctcgtggctacagcattgaacacacattagcattaaacatttgaggcaattacgagggctcagatcaatattttaaactcgttaaggaatttatattacagagaaaaccaatcagctaccttttagagtggtaaaaggtagcttctgggtgtggtcccccgaacagcagcatcacctggaaacgtgttagtaacgcagattattgaactccaccttagacctactgaatcaaactccccgggtggtgcccagcaacctgttttaacaagccttccaggtggttctgatgcacactaaagtttgcacatctgatgcacatcaacttacttattcctctacacacttttctacccaaaagcttcctcatgggggtggaatagagtggattacgattttaaatgggaagagcaagcaaaatatacgtggcttccaaataggtgtgtggagtgaaaagtatttgaggcaggtcattgcctcatttaacaatggtagacaaaatgcacaactctctaggtgaccagcattaattccccggcgcccaacagtctgtctacctggaaaataacaggactttctgtcctacctaccccagagacctccaggatttaagccttccctgagaagcctactctgttcattctagagttccctttgtgagctcgttccaaaccctccctctgccttaaataccaccataacagggtatttgccaaacctcttatttccagcccactttcctgagctgcaggaatagtccaatagtctactacgacatttgccatttcatcctttcaattcatcctttcttcctggcataaaaggcgttacaggatcggagaccctttcctcctgctacctctgcttagaaagcactgctcatcttttaacaattactcatcttaattagacttgttttcaaggttgctcatctccgtcttgctccaataaactcttcctgatcttcttttttgtactcaactggaccattttaattttttaatttttttggagacagagtcttgctctgtcacccaggctggagtgctgtggtgcgatctaggctcactgcaacctctgcctccggggttcaagcgattctcatgcctcagcctcccgtgtagctgggaggcatgtcaccacgcccagctaatttttttgtatttttagtacagatggggtttcgccatgttggccaggctggtctcgaactcctggcctcaagcgatccacctgcctcagcctcccaaagtgctggatgtattacaggcatgagccaccatacctggtcaacatctctgaaggccatggtatgttccagagttcatgtgaaataagagccatcatgcttctaatgtgaacatcccactgtatcagagtctggtttttttttgtttgtttttgtagttttgagacagggtctcattctgttgcccaggctggagtgcaatggcacaatctcagctcattgcaacctctgcttcccaggttcaacgaattctcctgcctcagcctcccaagtagctgggatt

SEQ ID NO: 913373 - DNA, 4001 bp, Homo sapiens
gggtcttcgctagcagctcagctgttgcaggtggggtctacctgtgaacttgctacccctagccagctctcacatggggtatggacgaccagggtatggttttggccctggagtcaggctgttcagattctcacctagactctcacacttactagtgagttcgggcacctgcctagcctacttgtgcctcagtttcctcatctgtggataaggatactggtgtctacttcatagactccttgtgaggttcaagggagatattgaatgtgaggtgcttagagaagggtccggccacagagtagggactcagtgagtgtcacagtgatcctgtcaatttggcaggtccctacatggacagccctttgtcctgctgcactgggtgcaaggcccagtgccagactgccttggccagcaactgactttggaaaccacccagcactgggctctccctgccatgtccacctcctcaaaggcaggttcccagcagtctggttgaagctgcaggcctccatggccccttgtcctggaagaaggctgcttccctgggggccaggacagctgccccacctcagcctggcttcctctttgtcccacctgtccagaacctagcatgtctgaccctgaggacacttgcttgggttgcgacatctatgatccagagactccctgaagctggacaagcctgggtatcccacaaaagctcacagagaacctggggctgggcagagagacccaactgctctctgactggagcctgctggccattggaccctagcaagtcactcagtgtctctgagccttcatttcatcatctgcaaaacagaaagtgcagccctgacatcctgaggctgcctgggaggaaaggaaaagggtgtgcagagccggcagccgggagatgtcacctctgtccccttctggatattcaactccttagcacagcgatggcctcaggctcaaccatagatggaaagctcccgagaacccatcagttctgctggggatgggctgccctgagccccgggttcctccaggctctagcaggccaggtcctcctgcttcccctcttccctctccagtcttgacaaatgaacatcattgatccctgaggtgaaggcattgatgggtccccaacagcaggttcaggttactctcatgctcaaagcccttcagtgccttcccacttctcttaaggtaaagcctaactcctcagcctgccaggcaaggcctttcaggacctggccctgcctgcttccccaggtccatctcctccggtaccaggacccttgagctgtgctgagcagcttccctcgaagccaagctccctgccctctgaccctctgcacacagttccctctgccaggagcagtatgcctgattctccccaaatgcacacgtgtgtgcaccccatacacatttacacacaaggctcaaccatgataccccctcctttgagtggccccacccctgcaagggtccctcccctggactcttctcaaacctcagcttcccccttgcatttctagatttcttcatcagcctgtctcccggcccaggtcccatccctgccgtgggcactctaggcctgggactgtttcttctcggccccttcccaccctccatgcttggcccaggaggcagccaaatgtagactgagccactcccagccaagggcgactttacatttctcaggactccctggtgaccagcacccaacaccatgcaggaacccaaatctcctgccagctcccacttacccaggatttccaccaggccatctctttcacctcgggggcacctttcccagggagatgaagagacacaggttggcctctgctgggactccacacgtctggctcctgcagctgaggagtgagcaggccgctcacttgggtgtgggggtgcaagcccgcccagggcagcgccacacctgcctgccgtcccctcgcccccgggctctgcctggctttgggcatctcctgtggctcccaggccccacccagacactgcccaggcctgctctggggaattacacaactcactggcagatatttgggctgtggctgttacgcatactggaaattcttagctccagcctgcgaaagccccactcagtaaacacagctccatgttgattaggctggtctcaaactcccgacctcaggtgatctgcccaccttggcctaccaaagtgctgggattacaggcatgagccaccgcacccagcccattttcatcactcctaatagccatggagtatgccatttaatcaactgcatatgcaatattattttttttttccgggggcaaggggctcatattcaccacagatgggaggccagttggtgagaaggtggcaggcggcacagccaccttatacagcatgccatactggtccactgtcagaccggtgatggcctcagctccatcaccccccaggctgactctggctcctgcctggctctgcccggccaccacaacccctcgggaccattcagaggcatcactggaggatgtgtggttagtggagcagctggtcatggggaggtctcgtttctttggtggaaggcattcctggttcctctcatgaacaggtttcatattgctttgtggtgttcctggagcctggaaggagttggcttgctccctggggcatcaggaggggcttctctgtagcttctctgaacccctctctgcttctggctggggcacctacatctgagcttccagtggtgcttctgagcagctgtagtaagcgtcctcccggctggctcgggagccagcccatttcaccacgcttcccgggatccacccgctcatcctggagccgctgcaaacctggccgccgccatccccagccccggagctgccccatacccctgtatatgcaatatttgttaaccattcccttttggtgcccatctaggtacaggtatcatttttggagctaaagtatctataatacactggaagtaacagatgtcacctccatattgtacgccaaacctaataagcagagcaaaacttttcatccaagcgatttggttaacattttaggatgtttctaatctctcagtaatacaaatatgctacaatagatctgtgtgtttatcctttgggcacctgtgtgtgcctgtgcatacctggagaataaagtcctgtgagaggaactgccatccaaagagggtgtttcagtctgtactgccaccaacaatgtgcttgtgcttctgagcttgcgtttgggtcaggagaatttgaaagtcatcaggaaccaaaccaggatataaggttcagctgtagctggaaagtggcaagcgttccaaagctaagacattggctatacctgggctgttcacaaactgtgagtccaattctagatgagatccagaagtatggtgagcaactcacttattttttaagcaaaacacctttttttctcatttctgctaagaacaaatagcttccagcaagagaaataggggatgcaatatttttacaaattacttctcttttttttaattaaaaaatgttaagttaaatgctacttaaagatatgtttaacctctatgatactgacttgctcatgagaaggagagagggccaggcatcttgcccactactacccactatcaacacttaggcctgacatcagtctctaaataaatattctgggccaggtgcggtggctcacgcctgtaatcccagcactttgggaggccaagacaggtggatcatgaggtcaggagatcgagaccatcctggctaacatggtgaaaccccgtctctactaaaaatacaaaaaattagccaggagtggtggcgggcacctgtagtcccagctactggggaggctgaggcaggagaattgtttgaacccaggaggcagaggttacagtgagccaagaacatgccactgcactcctgcctgggcaacagagtgaaactccgtctttaaaaaaaaaaaaaatcaacagcagcttctaggatgatgagcagtgactcag

SEQ ID NO: 913374 - DNA, 4001 bp, Homo sapiens
tctacctgtgaacttgctaccccgagccagctctcacatggggtatggacgaccagggtatggttttggccctggagtcaggctgttcagattctcacctagactctcacacttactagtgagttcgggcacctgcctagcctacttgtgcctcagtttcctcatctgtggataaggatactggtgtctacttcatagactccttgtgaggttcaagggagatattgaatgtgaggtgcttagagaagggtccggccacagagtagggactcagtgagtgtcacagtgatcctgtcaatttggcaggtccctacatggacagccctttgtcctgctgcactgggtgcaaggcccagtgccagactgccttggccagcaactgactttggaaaccacccagcactgggctctccctgccatgtccacctcctcaaaggcaggttcccagcagtctggttgaagctgcaggcctccatggccccttgtcctggaagaaggctgcttccctgggggccaggacagctgccccacctcagcctggcttcctctttgtcccacctgtccagaacctagcatgtctgaccctgaggacacttgcttgggttgcgacatctatgatccagagactccctgaagctgtacaagcctgggtatcccacaaaagctcacagagaacctggggctgggcagagagacccaactgctctctgactggagcctgctggccattggaccctagcaagtcactcagtgtctctgagccttcatttcatcatctgcaaaacagaaagtgcagccctgacatcctgaggctgcctgggaggaaaggaaaagggtgtgcagagccgggagccgggagatgtcacctctgtccccttctggatattcaactccttagcacagcgatggcctcaggctcaaccatagacagaaagctcccgagaacccatcagttctgctgggcatgggctgccctgagccccgggttcctccaggctctagcaggctaggtcctcctgcttcccctcttccctctccagtcttgacaaatgaacatcattgatccctgaggtgaaggcattgatgggtccccaacagcaggttcaggttactctcatgctcaaagcccttcagtgccttcccacttctcttaaggtaaagcctaactcctcagcctgccaggcaaggcctttcaggacctggccctgcctgcttccccaggtccatctcctccggtaccaggacccttgagctgtgctgagcagcttccctcaaagccaagctccccgccctctgaccctctgcacacagttccctctgccaggagcagtatgcctgattctccccaaatgcacacgtgtgtgcaccccatacacatttacacacaaggctcaaccatgataccccctcctttgagtggccccacccctgcaagggtccctcccctggactcttctcaaacctcagcttcccccttgcatttctagatttcttcatcagcctgtctcccggcccaggtcccatccctgccgtgggcactctaggcctgggactgtttcttctcggccccttcccaccctccatgcttggcccaggaggcagccaaatgtagactgagccactcccagccaagggcgactttacatttctcaggactccctggtgaccagcacccaacaccatgcaggaacgcaaatctcctgccagctcccacttacccaggctttccaccaggccatctctttcacttcgggggcacctttctcacggagatgaagagacacaggttggcctctgctgggactccacacgtctggctcctgcagctgaggagtgagcaggccgctcacttgggtgtgggggtgcaagccctcccagggcagcgctacacctgcctgccgccccctcgcccccgggctctgcctggctttgggcgtctcctgtggctcccaggccccacccagacactgcccaggcctgctctggggaattacacaactcactggcagatatttgggctgtggctgttacgcatactggaaattcttagctccagcctgcgaaagccccactcagtaaacacagctccatgttgattaggctggtctcaaactcccgacctcaggtgatctgcccaccttggcctaccaaagtgctgggattacaggtgtgagccaccgcacccagcccattttcatcattcctaatagccatggagtatgccatttaatcaactgtatatgcaatattatttttttttccgggggcaaggggctcatattcatcacagatgggaggccagttggtgagaaggtggcaggcggcacagccaccttatacagcatgccatactggtccactgtcagaccggtgatggcctcagctccatcaccccccaggctgactctggctcctgcctggctctgcccagccaccacagcccctcgggaccattcagaggcatcactggaggatgtgtggttagtggagcagctggtcatggggaggtctcgtttctttggtggaaggcattccaccttctctcatgagaagaaagagagagggccaggcatcttgcccactactacccactatcaacacttaggcctgacatcagtctctaaataaatattctgggccaggtgcagtggctcacgcctgtaatcccagcactttgggaggccaaggcaggtggatcatgaggtcaggagatcgagaccatcttggctaacatggtgaaaccccatctctactaaaaatacaaaaaattagccaggagtggtggcgggcacctgtagtcccagctactggggaggttgaggcaggagaattgtttgaacccaggaggcagaggttacagtgagccaagaacatgccactgcactcctgcctgggcaacagagtgaaactccgtctttaaaaaaaaaaaatcaacagcagcttctaggatgatgagcagtgactcagtctctccttgaccagattctgtaactgtccagcagaaatgcttatctgatctctgcgagaacaggaagcagctcagtgggggccttccttgctaaattcttcatcaagctggtctgttatctgccctgagtcctgcaagaacatctcaagaaaaatcccaaaaacatgcaagacaaatgagggtcctcccttagcatgtcttgaagcactgaggcacctgaaagctgtatatagtttctggggaaacagttttttaggaaatgtagcacagacactaactattcttccagaagagccccttcctgacatgaaagatcttacttagcatgacagagaagcatctgtttcatcatgaggacctatccaaccagcagcaggggccccagtgccagtgtccacctcagcagaggagacacgggggacatgcaaagtgtttctgttgaaaaatacttcacctagggtgactatagttagcagcaatgtattgtatatttcaaagtagctagaaggctaggtacagtatcccatgcctataatcccagcattttgggaggcccaggcaggcagatcacctgaggtcaggagtttgagaccagcctggctaacatggtgaaaccccatctctactaaaaataaaaacaataaaaaataataataataaaaattagccggacatggtggcctgcgcttgtagtccaagctacttgggaggctgaggcaggagaattgcttgaacctgggaggcagaggttgcagtgagccgagatcacaccattgccctccagcctgggcgacagagcaagactctgtctcaaaacaaaaacaaaaacaaaaacaaaaaaacaaagtagctagaagaagggacttgaaatgtacccaacacatagtaataccaaatattcaaggtgatagacaccccaaacaccctgattgatcactattctgtgcatgtaataaatacttaaatgtactccataaatatgtaaaatatgttatgtcaacaagaaaatactttgcctagtgtttccatccaa

SEQ ID NO: 913375 - DNA, 4001 bp, Homo sapiens
ctccatatttgccaggatggtctcgatctcttgacctcgtgatccacccacctcagcctctcaaagtgctgggattacaggcatgagccctaccgtgcctggccgtatattatattaaatggttagaaataaaaatcataagattaagtaagaaaatataatcttgttgcaaagagagctttcctaaagatacgtaaggtttttttttttttttttttttttttttttttttttttttcgaggcagagtctcgctctgtcgctcagggtggagtgcagtggtgaggtctcagcttactgcaacttccgcctcccgggttcaagggattctcctgcctcagcctaccaagtagctgggactacaggcgtgtgccaccacacctggctaatttttgtatttttagtagagacagggtttcactatgttggccaggttggtctcgaactcctgactttgtgatccgcccgcttcagcctgccaaagtgctgagattacaggcgtgagccaccgcgcctggccaagattcgtaaattaagataattcttcattaacctcattcacttcacttctcctatagtgtcaattgaaagtgtccctctgtctttcccaaattaatcctttcacttgtaacttgatcccattcctttccttctcttctgggagacaagactttttcttgaatcttcaaatagttgcttgcttcctgcccccaaatagatatcttgtattctttaaaacaaaccccaaactttcccccaccttgccactctcaataatcttgcttcatgccccaaatgatgaaggattggtctacacttgcagtctttcctcagttactattaaagcatctctctcaaacagctcaatgactttctaattataaaatccaacgacctattctgatttcagcttcctcctctgaccattgcagcattttatgtcattgataactttctcctaaacaaaaatacttcttacccttttatatgaaacttcatctgttttgggtctcaccttgaaagtctttcgggcttaattctcataattttttttaaagtctttctacaatctccatgtaaaccactgtttcaaattcgataaaactcaaactccataaaatacctcctcctgtcactggcaccatcttcttaatcacacataaggctgtaagtttcaggttcaaacaaatctaccaaatacaaacagccacatcgcccgtcactcttccacactcactgccacctgctcagcttagaaccccgttacctctctcctgaagaactgcaacacccttctcactgcattcctcaccccaggctcttccaggcaccacccgctaacaggacgtctgctcaggtccgtttggggttttgtcctccaaagcagaaacctgggactgagattcctgccgtctgtactccagctcactatagagggggaacccagtaagcttgacctccggggctcaggcgcctgagaacactgggctgcaggtggaccgctcccttctggccttgctggcgagaaagcccggaaggccgggagtgggggggaagcgaggcccgggccaacagcaccaaagacgctcctagagcccagatcggagtcgggggccccagctattcagcctactcccgggttttggagctgtccccagtccacagatttcccgcccctcacactcaccccaacacctgtgccagtcagtgattcggcgccggatcctctcctaccgaagctggagaagccgagaaggccgcgaggacccgcagctggagtgcccaggaaattgcctgattaacagcttcaaagacaccgactctgtctaccgtattagaaattttaaatatgcaggaagaccgtaaatgagaggaaagacgtctcttgaggcttagtatctaaatcttctacataatccagggcctagaaaaatggtgggtttctctccatctagattcaggcggtcatctgctgcctaacgcagtctggggtccctcatggtaggggaggcggggtcaggaatgggcggggcattcgctgttggtgccgacggatagagccaatgattgtggatgacagcggcacagaatgggcggagtctggaggggcgggatttggagaagagaaagcggtgatgcgaagagggggcgggaccagagagtggatggcagaggtgggctgtagagccaaagtggggtgggagcgcgaagatggcagctgctgaggaggagccgaagcccaaaaagctgaaggtggaggcgccgcaagcgctgaggtgagcgctgccggacttggggaggagggtgacggcgctgcaagcaagccagggcccacgtggggttgcacggccccgacgctgggtggtgtctctcactgccagcttggggccaacacgcaggacctcccccagctgcccgcttggccgcgaccccttgccagacgttctctccgtttggctgagtccccgcctgtctggtgcagctccggctccagcagcccttcgccagtcgtggcccgcagggggaccgagctggctgaccgcgccacctgcgagcaagcccaggctgggctggtgcgaccccggagggtcggaccggagcagcgtctgtaggcggccgccttctcttcccgggggatggcgggaaagaggctcggcaactgctgtacactggggcaaagtcagaattcttggggatttttcagagtgttgcggaagggcacgttgaccttccttttcgtgcacattctgaaagcccgtacctttgaggaccctctaccagggacccagacccctccgatgctttgcaggggcagcatttggatgaatggataggaaaggttgatttctcttttttatttacactttttggcagcaacggggacagtgctgcccctaacacctgcctcacatgtgattgatgttgcaacttttacttatgaagagtcatttgttaaaatatcccttcctaataagtataaagtgaagcaggcagtctttgatgatttggaaatgttcgctgaaaggcagcgatttttttttccatcttaaaatagacatatcaaactgatttaaaactattaggacactcctgattaaacaggacatatcccatttcttccagtatcactcttcttcacctccaaaggaaggaatcactcacaattgaaaagaaaaggacacttaggggcctggtggtgtgttcatgctgctttgaatggagggtgaacaaatccttgccagttcctttaatgtattcctactaccctcaaagggttagtgtgcctaccttataccaagaacataaactttaaaataaaaaccctcaggatattctatttttattttaaatattccaactatatgcagaataaaaagcaacggcttttgaatcagacctacctgagttcaaggcatgtgctttccctactctgccctttattagagtatttccttataaggcacctccttcgccaaactggaagacagatgcaacttttccctaccatcctactgaacatataacccttagatttccttagatttttccttaataaaaattattatatataatgctgatccattttcactgtgttttcctatttattatcttgttggacagttctgtgatcaaaggaaggcaagaattatgcctattttacaattgaagatattgaagcccaaataaaacaattagtacaggaacagaaataggaactagctgagcatgttttcttatacctgcagtcctggtgctttgtgaggctgtggtgagagcattccttaggcaactaaaattcactttatacaatatgaatttagtgccacctgtagacatgaagttaaaagattagacacttgagtactgggacaaatctctaattttgtggggagacattttaggatcggctattattacttttattatattaatttgctttcagactcaaagtgtgataatgcattgagtatttacactgaatttatgatgacttgcttgaca

SEQ ID NO: 913376 - DNA, 4001 bp, Homo sapiens
tgggaccaattcaaagaattatagcaactcctcaattgctattttaagaacagacataatgtagcccaatcatctcactttactgacgttatctgaagtccagggagaagttatgcaagttaatcaatatcatccttatctagatgggggagatataagagccagaacccaggtctcccaagtgctgagaaaaaacccaaatattagtaattattaatagtttaaggattaatagtttaaggacacacattattaatagtttaaggatgaagttaaatttcttagacctttcacaacacacgttgagcagacaggaaataccactagaagactttataaagtatttctcagcagatccttgctaatttcgccagccagcatcatcgtcctggcccatgtgccacccattattccagtgaggccagagggaaaatcgctgctctaggtttatgaaaaaggacaaagttttcctttctgaaatttctctctggagacccagattttaaaatgaatagtagctagtaccggcacctttgtttaaaccacgttatgccaccagaaaaaaacatctgggggcataataaactcacgggcccttttcttttgttactttcctctagtactccgtctcgtcaaggatcacattaaaagttcttttgaaccgctatgccctgagtgtctaggaaacacatttcacgttccacaggggtatgaactaagaaataccttagcaggaaagtaagaggtacaccgggctaggtctttggtggaacacctgcgcagaggttcttggagacattaggacaccctagttagtttcctccattctgtaaaaggccctctggatattcatttcaagccaaattatgaaacttgtgcctggtgtccaaatctatctttatggtattttaaaatgaaaatgagaatattcgggggaaaaagttatttttaaaaagaggaaagagttgtccaaaagttttagaggaaggaaacactctaagatgcatcagactgcgagccacactcaaattctcacacggctggcatttaatccacatctaatcttggcccctcaagaatccctccaggttccgggagactggggctcccggacctgctgacctgctgacctgctgacctgctggacgtgcaagggttcatagcagttccccgtttgaccttgcagcaatttcctgggcaggaaatctgtcaaatctgttgcaatagctcgggaaaaagcaaacccgaaccccaaaccctcacacccccaccctcgcgagccgggtccagagtggagatcagcggaggggaccctggggacccgctgcgctcgagggccacgcctgggggcacgcgttcacgaggccagatcctggagctgcccccggcgtcggacccgacgggcttgacaaacgggttcctgacagccccgaggggcccgtgctggcgctcccagggctcccgggactgggagcgccacttacctcgactgctctgcggggcgctgcggggcgcgggaaggcggcgagactccggccgggaaagcgacgcgcggtgcagactgccgcacccgggctccaggtcgctgccccggggaggaagtgctgtcagccctgcccttcccacgcagcgcgcagacgtgtggcgctatccgagctgctttgctccgaggtgcaaggaaggcccctggttagagacagtgggacagacaaacatatgcgtaaaggactccgagttaggggctgctttctccaactcatcgagtctgcgcctgattttctctcccccatcccacccctactacacaaccaccttgaagggatttttattttattttattttattttattttaattctgggaaacgttgcgcctccccctacctgtgccgcgcgcgcccttctctcaggagcgtctcctggcgaatggaaccattttgcagcctcgacgcaagagggactaagggattggggcctagtgatggttccaccaaagactgagaggccgctttatgttgcaacggtctcccaaagtgtttacttcagcactttctgggcttcctcttttgggccggttgtgcaaggcttcccggccgcctgcagcccgccctcaggggacgcggtgcagggctggactggcaacacgcgcgtcccggccggagttcagctgtctctcgggtgggggtggaggaagggcgcgctgggcggaggccctttctcaaccatcaggttggtaacctcaccctcctccctccccacgtttaaccacgctcagttggccggccagggtgtagaggaatagcactgtcttcattgctcgtagaaatccaaaatggtctgaaccccgtggaagagaattgagcaatatctatttaacttatgtatggattcgccttttgaccccgtcatcccacttccaggagtgtgttacgaagatctgctgatgaaaataagtaatgcacacggcagagggcattcatggactcactatttgcaacagcataggactggctggaaatagcacctgtcagttgggagtggagtttcctgagagaaagtcgctggggaggtctgaaaatacagaagttaaaatcagttatgatttgtaaatgcggttgaataaccctccccttctcctctacagctgtgtcttcaaaggcttatatgtcagggaaggtggtgaagacataaagacagaaattaggtgcatgtgttaattaggcaatttcaaatagttctgtcatttatttaatgagaaactattcgtaagcaccaacacttctaagaacaatgaaaatagttagaggaaacaatttctgctctcatgcatggtgcattctagttggtagaaagcagacaataaacaaattaatatttaacatgtcaaggaatgtaactagttttgaaggaagttaaaaggtgagggatagagagtgatgggcatggggatggggttgctgtattaattagggtaaataaacgataaataaatagaaaatatattttctcctcatgattttcttaataacagtttcttttctctagctttctttattgtaaaaatacagtatttatctaaatacatataacataatatgtgttaattgactgtttaatattatcagtaaggcttctggtcaacagtaggctattcgtggttaagttttgggggagtcaaaagacatacatggattttcaattgtgcagcagtttggtactcctgaaatctggcattgttctgttacagtaggtagctagtcaggcatgagcagggcaggagagggctcctcccaccccctaccaggaatgtcaggtgaccatcaggtgatgatcaagcagttgttatcagccttactgataacatagtcgattaactcatattattttatatatattaaatactgtatttttataataaagtaagccagagaaaagaaactgttattaataaaatcataaggaagagaaaatgtatttttcatttatttatttattatttatttatcctaattttttttaatatagcaccagggaaaggcagtctcccaatagacagaaacacctgaaactggtatttctgtctgataagtgacacttgagctagatctaaatggcatgagagattaatccacactgggtttttagatgggaatattccaggcaaaaggaacagcacattcaaagaccctgagttaggagagcacttaagatattggaaaaacaccaaggaaattagtacggctgagcagagtgagatgggagggacagacatgagatgggatcaaaaggaaatggtgcccagattgtgtgctatttgggagctgtggaagagaatttgatgtgagtgagatggaaagccagtggaaggttctgagcagagttgtaagtgctacataaaatataaaatcaaacaatgagagtgactttcttggggcagggaaagtggtcaaggatcacctctttacaaagtaatgagaaggggcagccattcagaaacttggga

SEQ ID NO: 913377 - DNA, 4001 bp, Homo sapiens
gatgcaatgtattgataattatatatgaacaactaatatatatataactaactatacagacggcattatcttaacaatcaatgagtcatcagtcttctccagcttgatgaagtacgaacagaaatctatcaacaaatattggcgcataaatatacatacacacattatattacacttctggggtttctttttcccccacagagaaacacttttagaacagtggagccgcatgcaaccaggggtcgcacatatgtgcgcagacggtctggctcgtcaggtggcatgggtgggggtcacgctttcactgcctgctttgggctctcaaaacccagctctgaaacgtttccaaggcaaaataaaaatagccaaaatgcctattcagaccagaggaggtagaggaagatgaccgattctgtaaaacaccctcctacagataaagaaaaggcgatatgggcaagtacacacacatctaggccatcgttcccgacttttaagtatgaaagaggcgtggctaggggctagatacttatttttaacacttccattgaaacacccggagtctcccaaggtctaacctctagaagtcgggtggcagaacctgaatcagaacccgagtgagccttccttcctccaccacctccctttaggaacgcatgcctaaatagtcgataaaatctacttctcaatgtcatgattaacccaaaagccagccacaaccaatcgtgttattagagtgctaaaagcctctatccacaacaaacactccacttgggatgacattaaaactttcgataaaggtgtactttcaacgtcgtgctttagcctttgaaaatacatttacaaaactgcagctgcagtcaaaaggaaaacatcacacgcctcgaaagctgaagggcgtgcctttttctctaacgaagaccgtgtggccatttcttctcaaagggtctgcagtcacttaagatagcaacgcgtaaaggacagccgttctgagaagacaaccagctcccctgagatgggaggcgggctgcacgctggtaaagaggatttttcaattcaaggactttgaggagattccgcccagataagctggaggggagcgaatgcacgtccatccagcaggggcagggcaccgggaaagaccgcaaagaagaaagtgtccggtttaaggtcaacagtcctcgagggacgccccaggtggattccccgggtgggctccccgggtgggtggaggcctgcaagccccaccgcgattagggagtgggcccagggcgcgggaggggccgggccggccttttgcgcacacacacacacacacacacacacccgccttttgcagacacacgcgcgcgcacacacccgccttttgcacatagacacgcacacacccgccttgtgcacacacgcgcgcactctcccgcactcacacacacacccgcgcaccctcacactctcctccctgggggcggggcgggcgggcgctgccctcacacaggaagtcaggaaacccagggggcagagaagccacaacttcgggccatttaaaccctctcgcccacgtcagccaataggctgcgccggccccctccccctcggcgcctaacccccgcgcccagagcccctcgctgcgcgcccgacctccctttgcgcgcacctccgcggcgccgccgccgccgccgccgcgcctcccgcacacgcctccccccgactccaccgccctcggcgggcacagcccggccccggcgcgcctttgtgcagcgcctcgccaacctgccctccgtccgccaggacccgcgccctgcacctcaccgggagcccggcggcctcgcagcaggcggctcccttcttagtccgccccgcggctgcgggtcgacgacgcgagcccgaagagcgttcacacggctacggccgcggccggcccgtccccgcaggctggcctctgagggagggtaagttacagggcacgtcggagcgcgccggcgcgggggcggggctcacgtgacgcgcgggggcggggcgggaggctcacgtgatggcccgggcgagctgggcgggcgcgggtctccgggacggtctggggtggctagggggtgcggcgcccggcggggatccgaatagggggcagccagcgtacggtgtgggaactcgggccggcgcgggagcctgcggtcaagggggctcagcactttgtaaacaaggagtgggaagcgttaaaaaaacgctcgtagggaaaaccagggaagggcggacatagcgccagggtggcaggaatggagcccgggcaaagacggccctgccgtgggccctagcgctcccttcgtcggcccctggagctgcggccgggcgtgggtcagtcgttcacgggcccggaaattccactgggacacccgaaaaagtgctgcacgccgcctgagggagacggaaagggacccggggcactgagtccattgctggggtcgccagggtacgtggcaggacccgctgtgcacactcgggactgaggagacccctgggacgcggagagccgctccagggcagaaccagtccgtcagcatttagccttccacgggcctgagggtgcgagccctgcgggggccacagggtcattgtccaaagtcatccccgtttgcactgtggcagcaccgaacccggaagtaacagctttggcaggtctttgatggtgatccagtggcaggaggagctcagctggaatgggaatcaggaaagagacctggcttctgccatttattggcacttcacccttctgaacctcagctttcaaatgagagctggcttctaggtctagaatacagtgagtgtgagaaaaataactgagaggcgttgggacttcagtaactactcattccttaaccagttgttgattgtgcctgttgtgccaggatgaaatatttgttaataatagagaccagaaaggagaggggggaaaaaacaagcatatgtatgattcaagcaatgaagagctactctccggagttggctctttcctgtgcttcacttcgtacttgaagatgccacaatgcctggcttccttatcaaccagctgaactccgaattgtgccttacaggatgcgaagaatccggtagggcagtggcaagactttaacagctgtggtttacaaccttcttattaaattaagtctaatgcgagctaaagtgttaagatagtctccatttagaaaggaaagaggcttacaatgagaatttttgaaaaataagcctgagactgtgctgtctctatcgttgcatttgcttttcacagtccttggcacccactgcctttttgtctccctcggtttctaacccgttctgttttcttgcatttgttcagtataaggagtatttcctgtatgctttggcaactattttccatagactctgcttgtgttctccttataaaaccagaacaagagcagtgcaaaaaagaaaacgaccctgataggaatgcgctgataaccttactttccctactctccaaacctgaattgggcacccttggttttagcaagagatagaactcaacagtttgcatacacttgcggatctgcctgtaaccccacttcctatttcacagcctaatctcggatgataccacaatgcccacagtatgctgatcaccaccaacagcagatggaggcggataaaaagagctttctcgctagtgtgttgttttaaaagaacctgatggagagctatgatcatatgtaacactgcctctagttagtttttaaataacacttgtagcatatgtctggcgcctgtgctcaggatttcaacagatcattttcaggattttgacatttaactggcttcttatgaagtagcagagagttccaaaatgtagaactgaaatataagctccacacacaggcagagatttgagtctgatttgtttgtgtgtatatcccaagtgcctaaaagcacttggcatacggtagatgcacaatagattcctgttaaatgtatttttaggtgaaaatgtagtc

SEQ ID NO: 913378 - DNA, 4001 bp, Homo sapiens
gtatcacataaagactgaacaaaaactcactaagacacacaatgataaactgacagaggtacttcacatagcttccttgatctcaaacactagaagtttttctaaagtcttccctttttcctatttccattccaaaatgtcacaagaaaaattacaacctacagaaagaatatacttccatgacaatcagaccacacctaagggcacccctcgcaattattcccagacttgatgaataatcttacaacagaacttcaagccaaaaactcattaatttttaaattcacttaaagttagacttttcaaaatatattcaagtttcaatttcacgtatgtacttttaaaatgtcttcacttcacttgagaaataaaatggcatagatctaatctcaaaagaaaggtttaaaaagaaaaaaaaaagccaggtacagtggcacacacctgtaatcccagctctctgggaggccaaggcagaaggatcacttgagcccaggaagtgaccagcctgggcaacacagtgagatcctgtctctaaaaaaaaaaaaaatttttttttaattagctggctgtggtggcacacacctgtagtaccagctactggggaagctgaggtgagaagatcacttgagcccaggaggtgaaggctgcagtgagccatgactgttccactgtattatagcctaggcaacagagcaagaccttgtcttaaaaaaaaaaaaaaaaaagaaccaggaacacagaaaaatttttccagactaatactcagtgaaatcaagtgtggatacttagacacttaagacaaaagttagcagttaatattccaaggacatctttcctcaaataaccattattacctgaagacttcttggaaccaagtcaaaatgggtacaggtaaaaaagagtaaaaattttttctattagaagaaatatcatcactgagtaaattaagtaaatcccctctgccttatacataatcaatagagaaaagggaaaaaaagtttcctcacttaaagtagatctagtcctgtcatggtataagaataattatgaaaaccaaagtgaccctttatgaactccacaagttatttcacatattttctagatctctaaatcaggatagaacccatgtactctgaaaatacaaagcaaaacaagtcttaactcttacaaatatttcaattaaaactataactaatattttcactagggtggtacagtgtttcctcattctatttttaatcttacccttatctgttcagtggagctgctgctaagttcatcaccagattcagaatcttgatgtattctttcagagccttctcctgcggaatcacaagattgttcctgggagaagctagttttctctacatccaagaactctggaccgggaaaatgaccaaatgagcgtgtcctattctggctggaaactttaggagaatgtgagtcattgttaaactttccgttattatgggtcaggtccaggcttaggttgacagtctgaccttgattataactgggtccaaaattctgattggcatcacgaataagacctgttccttgaacagatgacgatggctttccgaaacttgaaagctcaggcaatttgttcacattttctgttgatctctgaagatgcaaactctgcattattttcgtggagttatttggcagaccagctacctgcttaacaggtggcatgagagctttgcgcgtgacctccttcacatactgggctggcacataaaacgctttggagttttcatctggcttgacttgccaccagtcatcattggtctttttcaccaagatgtacctctccccttgttttatcacaatctttctgtcctttgcttcatattcataatcatattccacctcaatatacacttgtcctggaataatcttcccacttctgtcagccattttcattcaataatattcacctctcaaaaaggatgttataccacattatggctttatggcttgttggatgaatatagctgttttatttaaatggagaaagagaatgaagaaaaaagttaatgcaatctggatttcgtatttactcacaagcatcatatagtataggccatttaaagaacattacttcaaatctcaaaccccaaaaagcaaacatgtgtctactatcatatgcactgccacattaaaaacactttcattctaattgtaatctacatttttcagtcacttatgaccaaaacaaaagccgataactggaacagtaaatatacactaaccaggtagacacaagagttgagaagaactttccttcctttcattactccctcaaacctccttcaccttcttagaaaggctcactaataactaatatgcatttactttcatttctataacaattccaaaatattttagtacctcctagaacacggcattacgggtttaaatgatcacctcctagaacacggcattacgggtttaaatgatcactgcatcctcacatcactacagcatgagccagttcccacctgtttggggatgaattgtgttcccccaaaagacagttcaagtcctaaccccaggatctgtgaatgtgactttatttgtaaagagggtctttgcagatgtaatcaagttaagacaaggtcatatttgattagggtgggccccaaaatccaatgactggtgcctttataagtagagggagattaagggcacagtggcttacacctatattcccaacactttgggaggctgaggcaggtggattgcttgagcccaggaatttgagagcagcctgaccaacatggcaaaaccctgcctctacaagaattacaaaaattagctgggtgtggtggcatgcacctgtagtcccagctacttgggaagctgaggtggaaggatctcttgagcccaggaggctgaagttgtggtggaccaagatcacaccactgcactccaacctgggtgacagagtgagactttgtctcaaaataaaaagaaaaaaaggaggagatttacagagaggaaagctacagagggagaagaccatctgaagagagaggcagaaactggagtggagtgaagcagctaaaagccaaggaacaccaaggactgctggcaaccaccagaagtcaggcaggggtgaggaaggaagggttctcccctggagccttccgagggagcacggccctgccaaaactgattttggacttctagcctccagaccagtgagagaataaaaataactgtctgctgtttaagcactccagtttgtagtatttgtcacagcagccctaggaaactaatacattcaacccaatgctcaaggatcctaaggcaaactgagatttaccaaaaatgtgcaaacccaaggttccataacaacctactaattttctatagcaaacaagtactgagcatattattctacactacaggtgtagtaaccatcattctcctgaggataacaatcttctctatgacagataacgcctataaggccaggtggtaagtcaattagtcactgatacaattttgttaactgaaatttactttctagacaaactacttgactaacaaatttaatacaacacattttcaaaaaataaaaaattaccttagaacaaggagatctacaccagtatcacatttaaacctgtaaaaaaataaataagttcattaactcaaaccaagatcgctgaagactaagaatataatgttgcttacatttttaaaagcaaaactttttttataatagctataaggaatcaggaaagttttatacatcaagattgtggtcagcaccgccctccaaatacatgcaaacacaaccaccaacagccactgaggctggctttaccactgccctctcccactgtacttccacactgtctcaaacttcattttgtcccttatttttaattctgacaagcatctttctaaacttctgattatacaacaaacatctcttctattataaaactgtgaggatgaaataactgtttttcaagtttatgtat

SEQ ID NO: 913379 - DNA, 4001 bp, Homo sapiens
gtttgtctcttccagaattgaaactgtaaaactacaaatcattcttcaaatggagccccagatgcagtctatgactaagatccaccgcggacccctggaacagcctgctagcccatgctccgatgttaatgacatcgaaggcaaccctcccgaggaaatctcaactgcacaacccctactacgccccaattcagcaggaagcagttagggcggtcatcggccaatctccccaacagcacttgggttttcctgttgagaagggggactgagagacaggactagctggatttcctaggccaactaagaatccctgagcctagctgggaatgtgaccgcatccacctttaaacacggggcttgcaacttagctcacacccaaccaatcagagagctcactaaaatgctaattaggcaaaaacaggaggtaaagaaatagccaatcatctcttgcctgagagcacagcgggagggacaaggatcaggatataaacccaggcattagagccagcaacggccacccactttgggtcccctccctttgtgtgggagctgtgttttcactctatttcactctatgaaatcttgcaactgcaaaacaaaaacaaaacaaaacaaaaaagagtggaaaactcttccatatcatattttattttatttatttatttgagacatagtcttgctctgtcacccagggtggaatgcaatggcgcatctgggctcactgcaacctccgcctcaacctcctgagtagctgggactacaggcgcccgccaccacacccggctaattattgtatttttagtagagacgggctttcatcatgttcgccaggctggtctcgaactcctgatctcaggtgatccgctcccctcggcttcccaaagtgctgggattacaggcgtaagccaccatgcccggccccgtatgatattttaaataacacactcaaccacgctcatctgggctcaggaagaagccgagtcacaaagttattagtttcccaagattcttggaatctcttattcggtacaaatggaaccaaaagacgccaaaccgaagtattttactgagttacactgaggcaacgtaaataaactcaatctattgaattacaccaaaaacaaaattgtaatcaattaagacaacttaggtctcaaggctaaggcaacaccacctcgaaattctctcctgaaaacgctaaatctcggtgtggctgtttaggaaagaacatcctgtggaaataaagtcatgatgtcctggactacagatccctctcccatctgctccttagctgttctactaggaagaagaaaatctattgcgtagagttgtcattatcggctaaactcagtgctagctttaaatggattgtcttattcaatcttgacacttggaaataggcatcctcacgtccctttgcagatgaagaaactgaagtcgagagaggtttaaaaactggcccaaggactcaacactgtttctaattgacactcaaatccttgctcggacctgaacgcacaaagtgcctcggagaagatgtgaagcgctgtgtgcaacagtgaggaattcgctaaccagccctggacttccgtttcctcgccatcaagaggtgtctcggcgccaaagcgatcagcgctgccacccccagctggacgtctgcagccagcgcagcgggaggagccccctcgggcaccggcaggaccgagcggggggtttggctggagtccagcgcccaggcccgacccccgcgcctcagcccccgcaggcgcgacgatgagaaacgccgtgggagaaagaaacaaagcccgaaccgtgcgcctccgtgacccaaggcaaaggcggcaggactaccagcccaaggccgcgtttcccaggaaactggaccaaactcagctcacctccggccggattcgcgggctggcacctccccttcactctgtgcctcagtcgccatcttcgtcagcaaacttctttcaccgccccaccttacgtcccgcccccacatatttggattggctaatatgttttcacctcttccgtgcgattggatgactcgaccgcccctcctcaacctgaaccgtttaatatattattggtctattcaaatgactaaccgtcattggtcgttcccagccctggcggaaaaagagggaggggcggggaagaagacccagccccgaggcctgccgggagttgtagtttctcattttgatgaacccttccgattccacagacctttaggttcaagtcagaaatcaccagcctatgctcaaattttgtcctgatatgtaaatcagggaattatagaactgtcaactttgaaagtgactcatcactttctaaaatgcaagactccgtaccctatatctcagcatcacacaatatacccagataacaaaccaactcatgtaccccctaaatttaaaataaaagttgaaaataaataatttttttttacaatttttttaattttttttttctgttgagacagggtttcaccatgttgcccaggctggtctcgaacccctgagctcaagcaatcctcctatgtcagcctcccaaagtgctgggattacaggcatgaggcactgcacccagccataaattaattcatttaatttaatgtaatttaatgcaagactcgttctctgtcttgacccagagataaatccctcaagtgcaggcagggagtggcaacctagaagtacttgcttttaaacgtatagttcaaagccttctttcttcagatactcagcatagccctagccataggtcatttctttcttcctttatttctttcttttttttttttttttgagataaggtctccctctgtctcccatgctggagcacagtacaatattgcagcataccaacacacagggcaaatttttgtactttttgtagagatggggtttcaccctgttggccaggctggagtcggtcatttctgcttcaatacattcactcccttccaacttcccagagaacccacagagtttgccttgtgatatgaaccatggaaccaaaagctgcatgactttgtcccaaactaaactttaatcctcaatggtaggaataaccataattatccttgtcctccctgcggcacacacttctcctagggattaactgaggcaacatatgtgagaacattgtaaattttgagcattgttgttttttgtttttccatattgttttcctatgctggacttttctcgggaatttctgtattgatccttctgatatcctgccacctggggctctccctgcactctgcctcctttttactaaactgtactgcacatgcttcactttctgaactgtcttagggcttttgcacatgttgctttttctggctcgtccatttttccacttttttggctttcaggtcgaagcttaaatgtcactggctcaaagatcttccatgacccccattgtataaatcaattccctcagtaaactttcacaaagaactctgtactattctttcacagttcatatcacaactcacaattacatagtcatttgtgtgactatttatttcatgtgagggttcccagctaggcttcctgccacaagtgggcagagactatatttattttgctccccacagtttctggcacataatggctgtccaataaatatttttgaaaaatataagcaagtcctcaaactattatatccaaataaaaaatcaaatcatatactctaatagatttttttcaattgatgaattaatactaaaagtttgataagggctaggcacagtggcctacacccataatcccatcacttttggaggctgaggcaggaggatcacctgggcccaggagttcaaggttaaagtgagctatgattgtgccactgaactccaggctgtgcgacagaatgagaccctttctctaaaaaagaaaataaaagtttgataaatgtgtccaaataaaattgcatttagtttgatgttttttatgttttttgtttgaaacagagtctcactc

SEQ ID NO: 913380 - DNA, 4001 bp, Homo sapiens
ctgtcaagagaacagcacaggaaaaacctgcccccatgattcaattacctcccactgggctcctcccacaaccgtggggattatgggagctagaattcaagacgagatttgtgtggggacatagccaaaccatatcaacccctttttacttctaatatgttgttatatttaagaactgtataattgaaactcttagagcagacacatagtttgtatccattaacaataaattctaatggcttgttctaatctttattacataagcagtcatctattatataaccaacaaatggtcataacacataagctagaaaggacaagttatcatatctcagtcgggcagaattgaaattcacctgactcatacaaacatacccacagtaaaagcaatcacaacttaaaagtggtccattataccctaggtaccaaagccctgttccaggaaaaatgatggcacttctaaatattaaatataactaatctacaaaggacattgtcaatactacatggataattgttaataacagtatagtgaaaacaaggcatgggtaaacttcaaaattcgtctctatttccttgaaaacttattacatgatttaatcaatagcccacatcttcagctggtggctaggagattccttcttttctctgaaatgacaatgtattatcagaaataccataaaaattaaaaactaggaatgtatgtcctcaagccaaaaagtaactaaaaaaactagaatttaaaatgcttctctcttcaacctttttacacgctaggttatttttcctgttcaaatgccaatgatgataaataaaagccaattagaattagaagcaacttcatcttaaatcattgacaagagcctctttttttaacatcagcttatttcagtcaagaagcacgggtcaatataagactattgtttataatcactgccaatgagaaattactaccctatcaggagggccagaaaaatcataaaatgcgtagcaccaaaaagagtcttataatttattgagtctaaactaatcattttctggaattcacatcccttttaattctcaataactgattcagatcaaattagcattaacataaaaatgtgtattaataggaaccattatattcctgaaacagaaacacatacatacctaaaacttacacttttattaatatccagagcaaaactcaggattctaacactttcaacacagttgacccttccagcactaaactggatcaaatactgtacataagtgagaaagaaactagaagcaacatgtatcgtttttcaatagaatccttcctacttggacatcatccccaaaactactccctcctaaacagcacaaacaggtagaagaataaacaggttcaagactgctcctactacttataaggaatacaagaaaaaaaaagataccttggatctcctaacacataagtaacatgtaaacaatctcagtttcttttcccctctgttttttctcccctttcttcccatgttcattctttcttgttatgtcacactttaatttccttaagctagttcttttcttttcccctacttttcttttctcactttttctgtgtggaccacctggtaaaacaatatctaagagatggaaatagttaaaagagaaatcaaatggaagatgaaagatggaaaagagttacagcgggttatttttcttaaagttattcccatatcacaaagcccactaatccctttccaaagaatacacaacaccacaatataaagctaaaaatatcaagaaacatatttaagaacttaagaaatgtataggactaaagaaaaaactactatatttaagcaaaaacaactttctactctacaatattgtaaaacaaacgaaatatactaaagttcaagaaaataaatacatttcttacataagtgctgaaagtttctgatgaggcattggtaaatcgaagagacaggaagaaagctttccccttgtttgttgtgacaaagaaactctcctttccctgccccagcacagcctacgcaaattccagacatgttagaggatacaagggcacattatggggcctgaaaggcagtacttaggactctgagcactcatctgcaagaaggaaaatagagataaaaaactagaccagttaattaactgtatttgccaatgcatagatgaagctcaaaagcagactcccatcaccacttaagctatgctagatgaaacagttacaaatgtaaaagcatataacaggtagttttacaatatgggggaggggtgatccctacctcacatcacagacaaaaaataaattccaaacaaagtaaagatctaaatatgaaaagccaaatttaaaaacattaaaaaacaatatagaataaattaatgcaacagagaaagagtttcttaaacaagacataaaaagcacaatctccaaagaatcataaatttaactacattaaatttttctgtataacaaatgacattacatactaaatgtcttaaaaatgaagtcacaatgcctctaaagagaaatggataaaaggggaagaagagtgggagagaaagttttcactgtatgctcttttgtattttctggattttatattcatttgaacgtactatccattcataataaataaataaataaatagataaataaatctaaaactttaaaagtaataataaaatacaagacaagccacagactgaaaaaaacatgtttgctatgcatataaccaaggatcagtattcagaatttaccagtaagccaaaaaattaataaggaaaagacacttgactcaatagaaaattagtcaaatgacatgatcagtaacgcagaggaggggacctaatgactaataaacataaaaagaatctcaactttacaagttatcagaataaagcaaatttaaaaatagtatctttccctactcatcacttagcaaaatcaaattcaggtggtatatttttattctcagtttgctatgttatttatttatttattttagacagagtctcactcttgtcacccaggctgcagtgtagtggcacaatcttggctcactgcagcctctgccttccagaggagatatatatatttatttatatatttacttatttaaaattgtgtattggtgtttaattttatcaaatacttatcaaaaattttttgtgcctctattgatgatcatataatttttctcctttatggtaaataatacagattttctattgttaaaccaaccttgcatttctcaaataactcaactttgttatgatgtattatcatttttacatgttgctgaatttggtttgctaatagtctagatttcccattcattcataagtgagattggtcttaaattttccttgtaatgtcttcattaggttttatatcaaggttgttctagccttatacacttaggtgggaaatatgtcttttttttttttttttttttttcagacagagtctcactctgtcacccgaactggagtgcagtggcacgatctcagctaactgcaacttccacctcccaggttcaagcaattctcctgcctcagcctcctgagtagctgggactaggcacacgccaccccacccatctaatttttttgtattttagtagagatgggatttcatcgtgttgcccaggctggtctcgaactcctgagctcaggcaatctgcccgccttggtatcccacaagcatgagccaccacgcgtggccaatatgtcttatttttctattttctgaaaaaatttatgtgagattagtgttatttcttctgtaaatatgtgacagaattggcagatgaagccatctgaacctagaattttctttgtgaaaaagtttttcattacacattccacttattttgtgttatgggactactcacattttcctttacttcttgtgttaattttgttaagttgtagatttcaaggaatttgtctatttcacataaaccttcaaactttattggtataaatttgtatat

SEQ ID NO: 913381 - DNA, 4001 bp, Homo sapiens
tgggccaggcttctcctcgctactggttaagctggggcgctcccgccaacaggctcaaagccccgggaagcccctagtgaggccccgtggccggtaacccccaacttgcaggacgctcaagacacaggccaccgccctgccggccaggaacgctggctccgcgcttacctcgcaggccttgagcttgtcaccatctccctcagacagaccagtccgacgcgtggccatcatttcatttcaaatgacaaagaagggacaaatcctttggagtccacattggacgtggcggggaatgccaccacacacccgaaggggaagaattccacaagcaggctccgaggaggggcagggctgttgaaacagacaacgtgccagggaataaaggttttcaggaagcgccttcaaatgcctcgctgatttctcgtgacttcaactgacttcgccttcttcttccatttctggagacttaaaaacaaaggcgacaggtcttcttggcagccagtgtcgaggccaattgcagaaagcggtccccttcttcccagtgccactcctgagtcctggaaaaatccgaatgggtcgtgaaggttcgagtgtcagctcctagagagatcctaggaaaacgagaagttaaaggtcatgaactttctccaggcgcctatcactgtcttgcccacatgtccacaccaagttcgcgtttcctcccgagcaaaacaaacaaaaaaaaattttaacgtaaacaaacaaaaagcctataaattcgagggggtgtttaaaaaagagaaatctcgaaactgcccagcggttgcgtcaaacacacctggctgttatgcagccttcaagaaaaaatgttccccattcaagtgcattttaattcatgtctttcctgggtagagcagagggctgtgcatgttgttttctgcatcacccagacagggacacttcggtgaagttttctcccccacgaggctgaaatgggatcacactttccaagccccctcttcgctcccctccgccccccaaaaacgcaagcacaaagccagcctggctggggccggcgtgggctcggcggcgtctccgggtgactcgggcgccgcccctccgcccctccgccccggccggcgtccccgaggaggcggctgttttccttggcccgcggcggggctgggtggggacggccggggaggcgtgcgcggccgcgggtgggacgccggcgccgctcccgctccagggcatgattctggagctacacccgagcaactctgaagtcgcggcttttcccccaactaccactcgacacggcttcccttcccctgtggccacctagggggaaaaaacgagaaaaagcaaaccaccacccacctccccacgattcccccgccccttcctgaggcgggtcggggacctcgagctcccgaggagagcggccccaatatggactttctcaaaggtgctaggagccccggggcgagacaaaaccgggggccttacccttcccgcccgctcgggcccggcggccgaagcgcggcggcgagctgaagcggagacgctggccgggcgccgggcccggccgggacgcgctaggccgcaggctcggttaatattcatgagcggccccaggcgcccctcctccaaggctggccggccggaccccagcgcccaccgccggcctttgtgcccttccctccgccccgccgcccgcccttgctccgcacacgcgggcgcggcccctccgcccccgccgggcgcccgccgcgggctccctccggccccgagccagcgcccggccgggtggcctgtggcgggaagggagagagcccgcggcaagccgggcactccacggcccgcgagcgcagcgccctctcggctgagacggaaaagaaaccagacacgcaccagaggaagcgggacgagtggatccgcacggggctggccggctccgggacagcgcgccccgcccgcccgcccggcgtgagccggaccccgcagccggacgatcccgcgctgcccgccgccgccgccgccgccgccgccgcgctccgaggccgccgcccccggccggccgctcccaggcaccgccgcgacctgccccggccggccccgggctctcggccgccgcaggagggcgtggggcggggcggcggccgccggactctcccctcgcctcgccgggccgggccggggcccagctccggcgcccgcgaacgccaagtgacagaagcgcctcgctccgtggccgcgcggagctgtttcccgggggcggatttctcgcttcttcctccctggatccacctcctcccactccacctccttcccctcccctccccaggggaggctctggggctgaatattttctgtcttgaataacacgggaccggggaaccgacgctggagaagggggattagccggaggccggagcggggtgctcgcctgccccctccccgtgggtcgcgggacctacaagccctcgccccccagcaccccaaaaccaggcacacaacgctccccgcccctgcagtctcccaagcgctgaacggcagcgtccagggatgggcttgctcccgggaaaggagacctggtggtagacgtctggggtggagagggggacaagcctataacagcgacatctgcagactccagggatcaaaggtcctagattgggggacagggcttggcaaattgtgcccccaccccttttttgcagcgggaaggcaatgaagctgcgacgagacgtgggacttccagataagggagtgtcccctcacgcctcacagcaaaaatctcttcctgtggtgggaagggggaagttagccaagcgttgctcattcagttctttcccttttataaattctgcagagcggctgagcgaatttggcgcggctagcggaactgtggagaggcggctgcgcttctctgtccgccacactccaggtcacagcggctccggagccgcggcacaaccgccaccctccccacccaattcccgggccttgtcacagaccccggcagctcgctccgccccgccgtgcctcacaacatctcccgctgcaaattacccaatcgggagacgcgacgagagaacgcgaaccaatcaggggctggtaaatcaggcttccctccgccctcttccccgcccccgggtgaaggccaccgccccctcggcctctccttcccaccccgccccgctccggggaggtggctccccggctccgagcctcgcggggctggagggggagttgctcgcagtcagaggcagcgtttgtcaccttgtcaccctcatcctcgccccctcccatacacactcccctccccttctcggtgctcctgctggtgctgttgagggtcatttttatcctcactgcggccggggactgccagctattgtgtctgatcagctgccaccgctgtccagagggaaaaaaagaagaacaaaacctagaaactgtggagtcctcttaccttttccttctttctttctacactctcccctgtagacttagaaacatcccttctccttccccgcccgcccaccacctgaggtcctgtttctttatgggggacaggggagcggggacaaaaaacactccctgcagctggagtacctgcgccttagtttttacatcttccttaaagtggaaggtgccaaaccaaatctacaactaaatcctccgcttcaattcgagggaagacgttgacgagatcatttttatatggccatgaaatttgcgtgttcttgacagcctgtcaccaaacaagtcagctaataatcaagaaaagaaaaatagaataaaatacaaggactgtatttcagtcagatggtaatttactaaatagcccagtggctgtagcagtatccagtgctagatacaattgagtaaattaacaagaagtgaatagaaattcagggttcaagtagctcaccgcttgtgggcttatagaatatgtccagaaaggaaaaacaacttacagcacaaaacaactccttgcacatgcaaatgtgcat

SEQ ID NO: 913382 - DNA, 4001 bp, Homo sapiens
taaccaaaaatactccaaacaatgccaaatgttctctagtggggcaaattgctcctggttgagaaccattgacttaaaacaaacatttatgagaaatcctggatttcaaagacaggctgcctgtaagcccctttgctgaagcactggtctcttactagcactgtccaatagaaatataaaaaatataatatgagtcacatatgtacttgtaaatgttctagtagctatagtaaaagaatgtaaaacaggtaaaattagttttaataatagattttatttaacccaatatatccaaaatactgtcatttcagtaaaataattattaatgagatattgtacattctttttttgtactaaatcatcaaaatttggtgtgtctttttctcaatttggactagtgacatgccaagtgcttagtagccacatgtggccagtggccagctcattacacaggagtgggagggtggaactaagctctcgcagaggtatctggcttgtcctatcccttgggtcatcactagacttgccccctcctcagcagagccatgcaagttcctcctttgcccattggggtacacagggttcagcccatgcgaaagcaccccacagaggggtcctgacgtctgtggaacacactggaaggctggtcccatccaggaaaatcatccaagtgcttgcagtgtgctaataagatgggtgtgttccctgtgaatccacaggaggctggaggccccccgctgcaaacacctggtgagacacaaactgtttccaagctcccaggcaaatgctccatccacctccaaagacccatcctccacttcattgtttacaaaaggagctcagccctcccagatactggccacctgaaaagacacattctatttttgtaaaagacagatgttctcattcaaaatgacactttccgtggctaagaagttgttgtccatggagatgctgtctctagccccatacagtggccaagtcttcaggtcactgtgctgggtcgctggctggacacaggctggctagcccagtcctggactctcctgacccccatctcttgctggtctgagtctgctcccgcatccacccgtcctgcccccagaccctgcagctttctgagtgttctggcaggaaagcctgcctgcccctggcctgcttgaggaaatactgtctgcaaagcagcgggaacgaagaccctcgcttgcacccagctgtctctagaagccagggcatggccttccctggtaaggggtgcttctgtgttggccacagggcaaatcttgggcatttcctttttagtaaagaagcaaagtttccttaaagttgccaccaggtcacctggagcgaccgagggcctctgtaaaatgtggaatgtggggcgaagtgtgcacacccactggggcactaagccggccaccgcccttttgcaacttcaggtcgtgtccccacccagcccaggagtttcacgaggaagggcacttcctcaggaggatgctcactattcagcggcaatggtcccagaacgcccgccccatgtgacacatggcgtgacggctggccaagtgtccgcgcacgtttgccaagaggcacatgcggtgcccagagaaaccccagaaagttggacttacccctcctggcctgcctgatctttgggctcagcatgttcttgcagccgtccggccagccccgcagggccgttcatgctgtcatccacttgcttttgctcgtcctcgcgcctagtcgcccctcatgtcctgctcgttcggggccccgtggccgctggcgtcacccgtcaggctccctcggctacctctcctggctccggacggacggctcgccttggactacataaacctcgatgcattatttatccatcccagaattaattcccatccaagcggaccattaaagcctcagtaatcactgctgatcaatcactggaccagggcggggcagtccctccgcctggcctgggcgcacgcgtggctgtccaagctgagcgcgggggcggggcggggccgagaggggcggggccagccagagacgcggggcgcggtcctggcccgggagagggtactggggttccggccatcctttgctgaggctggaagaaatgcgcctttcagccgccgcctgggagccgcactccctgccaagcccgggtgggatagcgctttggtgagaaggtagccgagaccccccccccaccccagagcccaatccacggggacccgcttatgagctcactgttttacgtgttgaaagtcaggtgtgtctgggaaggagcaagcagcccggcaatgtaaactcctcaggagactcccaacaggaagatgcctgttagggatactatttatgcctctttagtaaggtgacaggaataagagggcaggaagcacttaactcagggctcttcataggaagatctgaattgaatagtgaatctctgctaattgccatgtttctgtttgatgctggcataattttaaagggtgtatactggggctttgtgaggagcggaatccagcctcaagatgctaaaaattacccaaggaatgcaatcataacaatagctatcatttattaggcacctactatgtgtcaggcactgaggctggtgctttacattcaatatctcatttaactctcaaactcctgaagcaggtgctatatatatagcgtttcaaatctggaaaataaggcacagcaaggttgaatcacctgcccaaagtcatacagtaccgagcagcagggcgggcaccagaacccagggctgtgtctacagctcctgctgctctgtgatgccagcctctccaccctattcccatcactgcatggtaacagctcctggcttgagcccccgatgaacttgctgaacggtgacctgcctctgtgcccctgataatcactccgtgtatcctcttaggcatctgagcttgggtctggctatttgggcctgagaactgtgtgaccctttcagtagctggtaaagagggatttgaacaatgccctcccctgctcagatggccatagcctccatctgaccctccacactccctcgagtgccccatgtccacagatccccaagtgtcctattggtatgtaatcaactttagcagctgtagagggagagagcccaccaggagatcactgtggcagtcctccctagggaacagtgtgccctatggagaggggaggactgcagagtaagaagaaagactcaccaggatgtggtgagccacatggccaagctggtgggagaaggtagagtccatggacacaaagctgtcttactcagcatcaagtcacttgttctggtcttcagctactcctcagagggatgaatgagtaccttggcataacattccaggttctttcatggtagcatccatggactcctctctgacctatctcttgccgatgctctatacaaccatatgcacatacagcgcctgctcctgtgtgccccagtgactttgcacatgccttgctcctgtgtgttcctgttcttgcatgtgcagcccctgctctcctgtgcctctgtgtttttgcacatgtagctgtgtctttgcacgtgcagttccctctctctggaatgcccttcctcacattgccttgtcctctttgggcaattccccaatgaaattctcctgattccaccagcagaatgagccactaagcacttcccctgggcccttatctatgtccctgtactgcccctcttgtacgccctccctgagccccaggctgactcaggccagaagcctcacaggaaactctggcttcatgggcagatccaagaaacaccactgaatgacagaactgacctccttttcctttaaggccaggtacaagccctggttgggacaggggccacccatgaggagtggggagaatatcaagctagaaaatctcatgtcgacaccagggtcacagggcaagtcctgtggcttgtgacaatgtcttgagcaatcaggaagccatttgtgagtaatgca

SEQ ID NO: 913383 - DNA, 4001 bp, Homo sapiens
tgaattgccactgacttttacacttcaaaatggttaaattcatgttatatacatttcatcttgataaagacattaattcaatcaaattcattaagttcaggtatgtcatgcagtatgtcctctgtccctttctcaaaggatttgcacctatgctatgaatctggggaagaatttatttcatcatagaaatctggtggctggaacctcctacaaaagcaagtgactgttccttccaagccagataatgcaataaacctagcacagggaaaataatacctggagatattaggtattaggcttgaacagttaaaggttaatctcagctgctcccccaccccctattttctcctgtggaaagtgagatccagggaagttgacagtgtgagaagtgtctgcagcacgaggccggcccaggggtcctggcttctagcccactccgttcttcatgaacacagagctttactcctcaccccatgaatatctactcagaccacagaaaaggggctctgtggagtctgagcccaccctgggcttggtccactatatcctgaacctggtagcatattacattacatcacatcacctgggactttaaaaatatgctgatatcttggattcatccaagaccaattaaacctgcatctctggagggggagcctgggaatttttaaaagcaccttgggtgattttaatgtggaggttgaggtccatgactgcatttcacccactagcttctagaatttccaatctttaccagtcctggaggggctcaggcaacatcatctcataactgagcccatcaggtcatgcatatgacctgactagcaactgccaaccatcacctacacagcccatgcagcccagcacctgcacaacccatccaatcatcacctgcatagtccacccagccagcacctgcacaatccacccagtcagcacctgcacaacaagccgaatcctcacctgcacagctcacccagtcagcacctgcacaatccacccaatcatcacctgcatagtctacccagccagcacctgcacaacccacccaatcagcacctgtacaacccatccaaatcatcacttacacagcccacccaaccatcacctgcacaatccacccaatcctcacctgcacagcccacccagcgagcacctgcctgtgacccaaacaaacagtcatcccacttggtctaacaattatctcccaggcactttactgagggacccaaacagacagtcacagccatcccatttggtctaatagttacctcccagacactttagtgagggttactgagatgtcctcactatttctctactagccccttggctggatcctttccaagcagagatgcagagtagccttcagctgcacacagcgttcccctgtgaaggacttgcctactgccccagcggtccttggacataggagtccttacagactctgaatgcaatcagagccctgagtcattagagcccaggaccctgaagtctctgtttttcaggcagacacagagcagctgccatagttcaggggtggggtttgtgccatcagccatttccaggagctgaaggaggtcagaaccctgaccacagatgccgcctggtgctctcagccacaagaccaagacagcctccggggaccccatccctcaagcaagaagtcaaatgcaaaggtaatcatttcccacatagaacataaaaaaattcttactgaaatatctggctgcaaacgtcctccttttgctggaagctgtcggcagcataatgaagctggcagtctgtgcaaatttcttctgtatcctttttataaagaaccaaccacatcctcaagcagacaagctaattcctgttttccagtaacaggagatccacatctatagaaaagaaatatatttagaatgccctttatctggtattttcttggattttaagcaagaagcctcgctgtgaagaattagttcattaagcgtaagtgcatctagggatcttggaatggccttgagaaagtcacggggtcttggggtatcagttcctcaaatctgtaaaatgggaacaatagtgacaaccacttcacagaacaaagaattgagaagtggaaagaaggggctttgtgagcaaagccctcagcacacatcggatgctatatttgattttttttccatgagctgacctggattcaaggggagctgggtttccagaaagccttagaaataagtacaaacaacactgcaaatttgcagtgacttccaggatgcatttatggcctttgtctggtgggcacagcagtcctgttagtggggagagcaagtcccacagagggacagtcaaggcccaggagcaccccatgtgagaccctcaccaggcacacaggctgctcatggcatggcttctccattccatttctggaaatttagcatcattacagcataatttacagttgtggagaatcaaaaagaaaaatcccaattatgaaacagccaagcgatatttatgcagccatcagcatcattgacatagtggtcctggcagtccaaggcaaaggcaggctccaaggcggtggatacaatgttatctaaatgagggcagcattgattcagatggagcagtgactcctgggagggcatgcatcaggattttcttcctagcaccctccttgtctcctctgttctattgagcttgcatcacatttattgatagtgacctgaaacacctttcaattgcagagagcataaaagcagttaaaaaccaatcactgctataaagataaaacaagcatagccagtgctcagtggctcagtgcaggctagatccttcctacacctgggcttgtgggtgcaggaattggggctgtcaccactgcaggaaggtgcaccctgggctgcgggacagcgcttagtggggtgtgttgggggaatgtcatcttggcccatgccttggggatctgtggacagttcctgctgctaatgttctcagaagggagcgctggaacagcacagagaacggggccaaactgagcctctggggagtgaccagggatagctggaagcagaaggaggcagcaggcgagcactcaactgcttgaagagagcagcaagggccaaaacccaaggtgccagcatgtccttgcaacaaagcaagcagtaatttgggttgcaaaggccagagtgcaaggctgataagagcccacaggtacagaggcagagaggagtgagaggaagcagcccatcccacgacctggtgtacagggggctttggaactaaaactctaggacaaagtccaggttttccattttcgagtgcttggaatttagacatgggctagatttggcaaataaaggtgtaggatgcccagttagttttgcagtgtaactgtgttctaaatattgcgtgggacataatacctgctaaaaaggtatgtatagttgacctgaaacactattcagatttaactgggtatcctgtattttatctggcaaacgtataccttctgaatatccattttctctttgatcaaaaaagaaaataccaccaggtaagaaactttcaattgcagacaataagaaagtcagttaaaaagaggggatttattggctccttgagcaggaaagccctcataatatggacttcaggcatggctggatccagcagcttgacaatgttaaccaagtctgggtttttttttccagttctcctgtttgcttctggaatgcctgcttcattctcaacaaagtcccctcattattaaaaaatgctggacaccagctcgcttcaggaactaatactctttctttcatgaccaacacaaagaaagagcctatcttccagtgtctctctcagaagtgctgggaagctgcccctccctactctcccaaacatctcttcttgcctcatggccttggttggtccactcacccatccctgaaccacccaaaccaatgcaatgtgctgattggctaaagccaacctggtctcatcccaggaatagggtggcttgg

SEQ ID NO: 913384 - DNA, 4001 bp, Homo sapiens
cggcagcggcagaacaaaggagactggcacacgtgaaaccctcgcgtaaggcgggcatgacactcacagactgatgagcgtgagtagtgtgaacacttgtgggatcttgagggaagcagtatcactattcccattttaaagagaggtaactgagcccagaaatgtttagaaacagccccagctctaactatgagctgtgtgtgtatgtaccagggaactatgaccccgggaagtctggctcctatccgaaccccacttttctcactgcttctgcctgtggcttgttcaagggcaccagccccaggtgaccagccctttttgattccagccaggctttctcccctctgagctcctgaacttaaggatttccttttgagacctggggagagggggaggctcgaaaatgcaggggtcgcaggacaagaactggctttcaacttttccatataaacattttcataagaaaaagaaaaaagggtaactgatatgtgtgaaagcattttgtaagctgctgggacttattccattatgttcaggtgaaaaagttgtcaattgatcaaattatatatctgacttaacccttctttaccaaggtttattgaaaaatattttttaaaacttttttttaaaaaaatattttttaaaagtggcagcagcaatgtatgatttgtcacagggcccactgtcactctcctggctgcctagagcacagaagccctcggagggccctagcagctgggtgtcaggggtgaaggccaagtgtctagatgcagccgtctagagcagtgtgatccaacagagatataatgtgagctacatgtgaaacttcaaatgttttagcagctacactcaaaaagtaaaaaggaacagctgtatttatgtttaaagtatatacaaaataaattactttctttttttttcaagatggagtttcactctttttgccccaactggagtgtagtggcacaatcctggctcactacaacctccgcttcccaggttcaagtgattctcctgcctcagcctcccgagtagctgggattatgggtacctaccaccacacccagctaaattgtgtatttttagtagagatggggtttcatcatgttgaccaggctggtctcaaactcctcacctcaggtgatccgcccacctcaactcccaaagtgctgggattacaggccactgcactcagccaaaaataaattactttcaatggcaaaaacagcaattacttttgcaccaacctaatattttgtttattccaatatatctacaatagtagcattaatttcaacatgtcaattaaaattattcagatattatacatatatttgtacaaagtcttaaaaatctagtgtatatttagcactaacaacacatctcaatttggactagccacgtttcatgtgcttagcagccacatgtggctggtggctacagtgaggaacagtgtggactggggctggcggtgtatgttgcctttgatgggccattattttgccaaccacactctcaggcatcctgagacctgcctgtgtgtgtggtgttagccctgggcaatgagccagctggaggttcctgcacaggatccctagcggcggcctcaccctgccagatgtaccaggctgaacctccctgctgtcctcccagtcttcattcatgtctttcatttctctttacctggttgcggccaccaaacaccacttccctttcaagggttaatcgccctccccagtctcccagcctggtcctcacagcctgccagtgactccagctatccacttacccctgggcatacgcctgctcctcttcagacacctgatgggccagaagggcatggtgtggagcagcgggggctgcagtgagaggagcagtggccagacacacctgttggggtgcagaaaaccaccaggtgcacgaggcactcctccactgcagggctgcggccactcggctgcctgtgtgctctgcctgtgggcatcaggctgaggccttttgtctctcctggggaacttctgcatttatcagtgcccgaaggctgggactgtctggggcggggcaagaaggacttgctgggatccccgccagtgggaggtcggcgtggttgttctgcatccgcatctgtgcctgccaccctgtgcacttgtcctgctgtgttcttgactccctgaggtggggggagtgtccatcctatttatctggcatgtgggaaccccagctcagtgccactagctttatgcctcagggttctctccaggtggacccacccaccaggtattggagattaatgaatgcatgggagaagcctgatgtaagtgcttatgccacatggtcttgagatagttacttaatctttctgtttccattttctcatcagcaaaacaaggccaataactaaacccacctcccaggactgtggtgaagatggaatgagaccaagaagccagaggctgggcacggcacctgcacgtggtacttggtaagcacctccgtatcctctaaggtagacacatggtctgtgtcacagacagagaagctgacgctccgtgagctttcagtggcccagggtcaccacgctgggaaatggcacagccaggatttgaactcagctgttgtggattctgtgcgccagtcagctgctgcctttatggtgtctcccttgcctctgggacaaagggagcaggaagcagctccttcacctagcctggtctcctctcctccagcagcagtcgcccctcccaggatgtggtttcaggagctcacacctcaggcagccctggagggcagagggaggcaatgagcaccaaactttgctcagtaagtacagagcaaggggctacgcctgtgccgatgccacctgttcatctgcccatctcccccatttctccatccatctgtccacttgttcatctgcccatctatccatctgctcatttgtctacccatctatctatccatccatctgtccgtccatccatccacccatctatccatccacccatctgtccacctctccagcaaagaaaagcagccccttaagggcaaagcacaactgctggaaacccttcagagggcctactgttcttggaataaaacccaactctgatgtgactgtgggcctccaggtccctcggaccacctctcctcccccggcccatgtcctgctgtcagccactctagcaccctctctccctcaagctcaccctcttcccaccagaaactttgcattctctcaggtgctccaaatgccctcccacctccttgcatggctgactccctctcatttaaagcctcagctcaaatgtacattacagaatccttccctgggtgagagccttcgtcaaggagctgcgccctcccacccaattagtcttacacgactttctctatagaacttatcctgattggaaagcagcttgtttgtctgcatacgtgtttactgcctgtctctgtgaaaggaatgtacgacttatgaaggaatgtatgactgttcttcctggtgtccccaggtactagtctagtgcctggaaaaggctcagggttcagtgaatggcagcagtcacagagggggatgtggagggctctgggaggtaacaggcaatctctcttaattaaaatatccagctttgattgagtgctcaccatatgctgggcatcatcctaaaagctttcgtgttttatctcgatgtcctcacaaccacctgatatggtgttacaatgatgataccccatttacagatgagaacacagaggctacagaaggttgaataattagtcgaaggtcacatgactaataagatgtatcttcccaactgcccccggtcacccaagggaaattagttgccaactggtgcctaaagcactggccactcacagcccactcttaatagctgaggatctgaatgccccaggcagtctggctgcagagtgggtgctccaggctccatcccttggtgggcagcctctgcaatggcccccggtgaaccttcctcctggta

SEQ ID NO: 913385 - DNA, 4001 bp, Homo sapiens
ctaatcaaaatgcctacctcccccagcccacggcaaccaggggaagggaggtggcaggaacaggcacagcatagagcttcaaaagctctgaataccaaagtcagatgctgaattgaaaactgcctccaagacacaggcacagagagataaagagaaaaagcaaaaataaaaagatgcaacgaaatgaataccgtggagtgaatgaccgtaccttggcaacggctttgccatcggaattgttgttggaatccttaacaccactgaatgaatctcttctttgtgggcatggtttctttttgcgtggtctgcctttaagatttggcgctgaaaacaaatggaaaacaattgatatacattttcacttgcatgggtttctttattaaagacccagaatctcactacagtgatcccttctaattgttcagagaaatgtacagatctgtggcaggcagccctcattattacatgcttctctctctgaaggcttgcatattggtagagtatacatttctgtacacgtttcccaaagctaatctatttagctttaacatgtctaattaatagaagtaacacgaagctcttagctctaaaggatcatgataagaaaaatgtccttccacgttgttagacaagaagcatttggtgctgaaaaactgagccaggctttgagctcaatctttggtttttgttttgtatcttgctttccgaaacctaagtgacatgcctgcccttatggtatcatagtaatgaaatgtttgaaaacatctcttttacaaaatattcagagacaagggcattctctcaaattaccatacagataagtagagagatagctatagagagaggggcattcacaacagcaagctggaaaacattattacatatatttactaacaatactgcaaccagcaagtttcaaatctcaacaaatctgacagatacatttaaatcagcatgctgtcttttccttttcaatatatttttatgaagatcttaaggcttatttaatataacatccaaagattacactggggttagcctgattccatgggggttacacttttgaaaagacaagatacaaatcaaagttctatttcatccttgatgctgagcttgttccttttaagatctacacagaaagtagggggaaaaggctgctgtttattgagagctatgactatccggcatcagctttcacatttaacttcatcagtcacccaagtcaagcaaaattaaaaacaaccaactaaccaaccacccctagaatgactccaagctaatgaattataccctaaacaatttccttcagacctttcaaggcacccacactttttattacttaaggagtgattatgacaatgtcaaatctaaacaacatgaaccttcttgattgttgttaatcttacttaggcagttaaccagtggttttaggacatttttacactgtactcattttacaaacacaattaatcctactaatttgattttctcctccggataacagttttactgttggtggaagctcagtaaagcagaactgcctttaaaatcagagaggcaaaagtttaaaaagaggctttagggcttaggatccccttcccacacccgctctctcctctcattcccctaaacgctggtctgaaagtccatcccagaaagccagcctggaattaccaaaggtaaacaagctcacaaacaaaaatcaagcaaagagaaagtagcgattacccattccagtcgacaaacatctgcctgactgatgcctgtgctcatgaaagctacagcatgtgactgctccccggccacatccctggaagtctcgacttggtgtggatgtcagcttccctccgaatgcgagctgcgaggctcagcgctctgcttacaactcccctcccccggcagctccattactcatgtaaacacacagcagtgactagcaccgagtgtgtgggatgagcctgaggactttgctggagttgccagactggcagggagggctctgctctctccacctccccgcacggagatggtgatttcatccggcctgttttgtggatcctgacctcttgctctccttgtcagagcacgatgccacgttccatgaatttgacacggtccgcagcctggagccagggcatggactatttgttttgtttagaagactttgtgtagcacagaagtgtttccacaactgacccaagtgctaagactttaatgaccgcgagggaaggatgtactttcaagtcccttatcaaaataacagctgagcagaaagctgacaaacaaaacttggggtagcaggtcgcaggcatttcattaaaacaaacaaaacaatatcccctctgttctaagacttgttactatgatcttcccttcctagcattttggtgaaaagcacttagacctaaaaggcatttatttctagaaaagctttcaaatcccaaaggccttttcgacagaacttgcatcgaacatgctgtttttaaataaaggcaaaggttccgggaactgacaagaagtcatccccaaactgggtttattttctccattctttgagctgttttcagaacccagagaagcacatgtactcccccagcagattctgagaattacaaatttagaacagactagcacctaatattctggtcacacaaacgtaaactctaaatgggatttgatcaagagaaaaagccctttgttcttagtaaggcaagtacttgcgtatttcaggtatggttaggcaaatcctaccagtcattcaggactcaaaatcaaattcctctcctactctcccctctgaactttttttccctccttctcttatggaacatatcactgtactccttgtactttagctgtggtttttggcatattattataccagactggagaatccttaagggcaagaccctgtgggatgtgtcttttatctgcccagcacaacacccaaaaggctgcattgcataacatgtatttgttgaatgaaaaagtgactaatggaaataaagatgcccacatactgttctttcctgtcctcatagactggtcccgccaacctcacacgtggtatacttgtcacactgggcacttgtaaaactgcattcacctttactacttatgcttatgctctggaaacataaactggtgacttgagtttgcactgggaatggagacaggaaaccaaaggcctttggtatctcagtaaggctataatctagtccccacatgcaatgcacaaacaccctgaagagcacaaatattcaaagtacggggtggggggaatggaacacaaaggactgggtaggtgcctctgcaatcgaatcagagaccttttggattcagaagactccaggtaaagttttggtattgaaggactggctttggggacagcaaaaattctggtccccaggccacatctttgtccctctagagtcataatctgtcatttgctaggtcagtgagtgaaaacaggtgcattatggtgtgctggtgggcaggagtgggatgggtctgcggactttaattcactcatgtaagagacagccccacctccttccagccaccctgcaaggacctacacctgccctctccttgaaagctcagtgctatgtacttactgacagaacctaaatcctaagactccagaattagaccagctcttgttctttaggtgagactgatctctaccaagaaaaagctctgctagggagagagcagtacccttactgatagcatatctggcttcagtcagttttattagaaaaaaaacagtgcaaagcaatagacgtactgttacttttacgtgtgtatatgattcactggcctggcttatcacagagttcagtaaatgctctttgcatgaatgttttcagtattatacatgaataataagagtagctaagtgaataataatagtagctaaccatttctgagcactttctctgtacaagtcactcttctgagtgctttgcatacaataattccactaaaactcacagcaa

SEQ ID NO: 913386 - DNA, 4001 bp, Homo sapiens
gccgtctgggcacggagaacgctggacccgcagggccagtgggcgagcacacacccctctgccctcccctcccccgcccccgtcccacacacccccaaagatcgcgcaggaggacgtccactttgcgtggagtaattgcaaactagaacatcaaatggcttgtccggggggagggggagtgggcgagagatagttgttaatgcttaacgtgtttgtgcctgttacaccaccgctttgaaatccgcccgggcagatctgcaagttatttgaatgtattattccagtacctgtcatttatcactttattcaacacgtctttgccaactcaatagcttttgatctcattctgcctccatttcgtaatttccgccctcttaaacatatcaaatacttactttgaaaaaagaacaatatcgaaacccaccgaaagaaatccacccagacacgaccgagccagacacgaaggtaaattttcaaaaggcaaaaaatataaaaagcatgtgatgttcaagaggcaatagcaggagagcaaatgaacacacacacacacatacacacacacacacacacacacacacacatccttgaacaaaacccttctcgaacaagttatttgatcttgactaaaatcagcagttggatcctctttgtaaagctgacagccaaactctgacaatggcaaaatactcgagccccagctagtggcgctacccctttaaaaaaggagtcgatcctgcttgcctgcagaagtgaatacagtattttcaagcttgccctgtaataagcattactagggggaaaaataataaagaaagaagagggggacagacaggtttaccacctcgccatggtcgctatttctgccctggggagtgtcttctgggaggaaataaagtttagagctggataaaagttgccggctggtcctctcttcccacaacagctggagctccgctatgcaaatcggatcctttggcgtacatcttacaaagaaaaagtcgccaagggacaaaattcttggtttgccttcaaggtggaattgaaaagccttgtagaaaatgtaaggtccgtgcaagccacacggtgagccgacccactgcagggggggaaaaaaacaccaaataaataatgtagccatcagagcacaaacatctattcccagacacatttacacacagacatccactctcttaatacagacgacccaacagatataacgctgggtggaaaaataatagcacccacaaattttctgcttccctaaaaaaaaaaaaaaaaaaactcagggccccccaccgccacttctacccacctccccatttgaggcggtaaaattacattatgtatgtatgatcagtgcagggatttttttaaacaataaaaatgattttgggggatgcagagggtaaaagtttggtgaaaagtttgtggggggtgtgggtgggtgcagaggtgtgggtgagctggggggttggggggtgccggggggtgccgggatcggaggagcggaggagagcgaaatacctggagtgagttgggctccatctcgacgttctgaattgattgaactcaacattctctccaaacttgttggcttgaatggattgcatcaggtcctggcagggaaacgcattctctgccttcagccggcgtaatgtctcaatataaaactgagctcttgcctcccttcgggcaccgaaatgattgaaaatatgtcctaatatttctataacgactcaattttcagctcctgaaaaaactatgtgggttttcttccaaagatggattgatcaaattcataatcgagagaaaggcgccatacgatctcggcgggaagaggatggatcaaggcaaaaaacacacaagaagatttgtaaaaataaaaagcaccctaaaactgtgtggagatgtgattcctctctctctaaccgctcctgtctgggatatcgtctgatgagatttttggaggagaggaggggtagcgagctccactgtgcatctgacaggacctgcttgtatatgtctaatataaagaacatttcctgcagagattccggggcgctgctcctctttctaatgcttcttagcagatttgctgttattagacatgtagatttgtttgatagttaaattacgcttcctcactgccatgttttcgagaactaatctgttaaattatcttttgatgcctatttacatggaagggaaaagtgggttatcgattatataaacatataaatattaatgcatttgttcgcttcgcaaaaaaatactcagcaaaaaaaaaagagacaagtgagcagtgcacacacatcttaggatttcgcaaacaatattgaacggacagcgactgcatttagggactggaacaataaacgatgcatgataaatcaataaatgcgagaagcgagtctgctcagaatatgaattcaggctcccggttctgcgtgtgcattctttaattttgaagtatatacactagtacgtgtttacaatgctgatggacgccaagggcgctctcaaatgataatgtgtttatataacccagcgctacaggaataatataccgactcctaccccacccccatcccctcccccgccaaaaaagggaggggagcttcctcaataatagtttgaaactgaaaaaatccatttgcaaactagttaaatacaaccagaaattaagctgttgaaaaccgggggcatgaaccgtaagacaataaaggctttaaatgtgtatatttattgttctggagccctggagcattgcgaggtttgcatgcacggctattatgcaaacacagagaaacttaagagcgacagaacaaggaacaggcagagactgcaaagccctcgcaagctccgacccagctgccggtcctccgccaggctagattgcattttcgcagtgttgatttaaaatggtgtactcgcttcccccacgttcccccacccccttccccgctctcctcccactccttccagcacaccccccctccagcttttattatattggcaccaatctttccaaagtgggtctggcatgctaaaaaagtaaacatgtactatatggggaataaggtctgtatagtatgacagttgaaacttgatctgtgataaaattacaggatgttgaaattactagtaagctatttttaacgctttcgcaacgtttcacctctagtcacagcatctagttgaaacaggattactttaatgaaaattatattcacatggctgaagttaatacacccggcagagcacaaatgcctcatattcagtgacttgaggtggaaagaccctctgtgtgtatttttatgccttttcataacgtctgcgtccgctgcagtaagaattagggcacttaacattatctaaaccacatttttgattcagaatatggggaagtaataaaaggcaaaatctatctcgtttctatacacacagagataaacgaaagaaaatggcagatcctctaattacaataaataataaaagcccatgccaaagagccggtattctgaaagctgtcgaaaactattttaataatttaaagtaatatcacaactctgcaccatggaggactacaattcgcagtctcccatctttaacattagccaaattatgacttgcacatcactctttaattatctcttgaaatttcatctgatctttctattttataaacatgggttacaaagagaaattatagctctcctgcgctttctctctctctttttaactttataatgcatactgcagacgtttgattagaatcgcccattttgttcatttttaacatatgaatggacttgactgaggggcattttacatgtcttttttaaaaatagatatgcctaaagcttctgttagtctctgtcgtgttagcgtaaatatatacatccagttcaagaaatcctatattaaaaaaacttgagttgcagtattttgacaagatcgtatttgagatcgactctgagtcagtttcctgtatgaccaat

SEQ ID NO: 913387 - DNA, 4001 bp, Homo sapiens
tccggaataatttgtcttaatttcttattgttcatcttaggaaaaaggaaaaaagaaaaacaaaatctgttttcatcattgaacacaacagttgtatacaacagtgttgtatatacactgtaaatttgttgtatactgtgccaatttgcacctggaaacatgggcagtggttaatttactgtggcctgtaattataaattaaacaatcatggattacacagtacacttaattgatcaacaaactgggaaaagttagccaactctcatgcacttctcatccataatgatgaatctcaatctctgttggttcggcatgcccttttcattccaattctagctattttctgggtaaatatttatgtttgtactcatttgttgagaaaaactttaactttaaaaggacagctcacgtataaatgattaagaaaaagaaacagttgtaaaaatctgtttagcctgaggttaaaaaaaaactgcaagtgtagcaagtgtgaaatgtgattggcaacttcagatcaaataaccctacttctttaacaatctgacaatgtaaaatcaattgagttttttttttcctttctaaatctactcactggataatctgaccaaacatacatctatttttttttttcctgggcatctagtttttttgtttttttttttacttcttaaatcaacagaaatggctcaacatttctaaaagtcaagaaaggaactaggaagagagttggagcagtgactataagtttgatgacaggctctttgcagccaactaacctgctttaagtgttcaaaatcaatttttctttgatagctctaaaattactcaattccattttaactccctccaactaactgtacagacattaacaagaaacagagtgtcaacggtcagatctgtcacaaccataatttagaatttgggaaagctttaattgggactgacagagaaaagccttgccccggattgaagttcgatctccatttttaacttctcgttcttttcagtttggagaactcaagctaggattaagatcttttggtcctggtatggtcacacgcaagaggagactgcaaaaggtttcgaaggaaattctagagacggagcagctaatatgtcttcatcaacatggattatgtattgaatgaaaaatcggtcatcaccaacaatcagatcctgcaaaactctcagcaaataactaaataattcgggactgaggaagcgcacccgccacgcagacaccaagacggcgtaaaatccaccaggcatcccttccaagcggcacccctttgtgtcgtgggacttacttccctaccccccaggggcccgcacagcgcgagaaggaggagagctaggctaccatctcccctgctaccgccagggcgacctcagagccaatggggccggccttctctccgcttctggccgggctccagacgaaccccactttactgcaaagccgcgagaccgattgcccgggaagtctaagcctgctagcgaaagctgctctccgcagttcctgggatccgccctcacccctgtccccagagtaatgatggagcccgggctccgcacccggccagccgcgcactctgccagccccttccccaagcctcggacccgctgcaagccccgccttcctctccaggcccaggcctccctccagggcccaccctcgggtctccccgccgacccccgaaatcagtccacaacccagatagcaggctgagcgacgtcccattccctccttggctttaagcgcagtgctccgccctgggcctggggacgggagggggataaccggccggctccaagggggcccaggcccccacactcaccatcctcccgccgagtccctcctcctcctcctcctcctgctgcctcccccgttaccaggggcaactgctgcggcgccgcccccgacgtccctcgcacgcacagctgaggagctgagcagcaatacggggcggggtgcagctccgctttccccagagtgcgcaagtgcgctaaggcgcccgcccacgcagtgggcgggctacgggagctgcagaggccgccgccggctcgcctggaccagggagtggagaaagcctgcccacgtggctggcgggagcctcccggcctgggattggtcgaaaaggaggggcgtggggcgggcgtgggggcagttccccagcccaggtcctcctctcacccgggccagttttcaaggcgggctgtaactggtggcatttgtcccgggaccaggtaaggggccttgggacaatggcgctcgccctgtctacctccaatccccacatctcgggtgggtgctgagattgctgtcctgactgcccaggcggggctgcagcgcgggctggacttccacctgcagaagccacgtggcgcgaagtgcgccctggggctgcagatgggcccctctgctctgacccccattgcctaggagtgccaggccgagcggctggggcgttacgagctgtccgggatgggggagtaccgatggggggaggccgtctgtcggagggcaagaagcagcctgggggctggccctgagccctgaggtgagctgaaagcacaggtgaaaggcgttttggggatcggcccggtttttgttttgacacagggtgtcgctctgtcgcccgggccggagtgcggtggcgcgatctcggctcactgcagcctttgcctcacaggcttaagcgattctcccgcctcagactctcgagtagctgggattgcaggcgggcgccaccacgcctggataattttttgtattttgtttttgtagagacggagtttcgccatgttgcccaggctgggctcgaactcctggggtcaagccatccgcccgcctaggcctcccaaagtgctgagactacaggtgttccaaagtggtgagccactgtgcccagcctctggccggttttgctaagctgctttggacaggaccgcgtaccatctgtagtcctggaggaggcaaaaatgagcctgcatttttagccaaggaagagcaagtgggacactggggtgggttgggaagtgctacctcccatccctttcccgatgcagaggactataagaagagtttacacaaacgtgctaggccctgttctagacgctggagacacagcagtggacaaaatcagcccgtatggaaattacatccttcctaatgaaatacatttcataccaaatttcattttcacaacccctagaaattggtaattgcggccaggcgcagtggctcatgcctataatcccagcactttgagaggtggaaggggaggaaggcttgagcccaggagttggagaccagcccgggcaacacagtaggaccctgcctctacaaaaaaaaattttttttaattagccaggttccgtggcgcacttgtagtcctagctactcgggaggttgaggctggaggattgcttgagcccaggagctattatcacatcactgtactccagcctgggtgaaagagcaagaccctgcctcaaaaaaaaaaaaaaaaatgaaaacaaaaatcaacatctgctgcttgcatacctgcttcagatccttggagagaaaaagcagttcagagccttgactaaggaggtgatgaatggaggtgatacaggagcacaaacccctataatctactcatctccagactgttggcccttttgtgaaaaaggcaagggaggttgctctttctaagttgtctggtgcctaacagcccacttgccttggagtcagacgagtacccataagcctatacctgggcctgctcttgtaattattaccctcattttccagcttgctctaggcagccttgaccttaatccttgcctgtctcagtggtctttgtgtctgaccttctggggtctttggctaccttgatcttcctctgatgtgagtaccagcgatgatgtttcgtttttctccctacctggggctacaaacagtaatcttgtgcacttctgcttgtaagaggatacctcagaaggaatttggaag

SEQ ID NO: 913388 - DNA, 4001 bp, Homo sapiens
tacattttccccttacatcttttattacctctagtctgagtaaggacacctccaacgaaaaaagacaagacagcagccatgtaacagaaaagggagaaaggaaaacgggaaaggatataaagggaaaaccaactacttcggtaacgtttcgattctccagctcaggggaaagagaaaactggtgatttttgtattaatctttatacctttaagcatgtcttaaaatgctgttttaccgctgggcgcggtggctcacacctgtaattccagcactttgggaggccgaggtgggtagatcacctgaagtcagaaggtcgagaccagcctgcccaacatggcgaaaccctgtctctactaaagatacaaaaataggccgggcgtggtggcgggtgcctgtaaataccagttactcgggaggctgaggaacaagaatcgcttgaacccaggatgcagaggttgcagtgagctgagattgcgccactgcactgaagcctgggcgacagagaaagactctgcctcaaaaaataaataaataaaaataatattttaaatgtatggataatacccacaaagtgtgaagctctgctcactttgaaatcatttgataagtaatattatctgtggttactggatacaggcatatacatatatatacacatgtgtgtgcctgtatctatatttataaccttgaaaaagactgctttagtgttcttatcaatctacagaacaagtcaactaaagccattccattacctccacaacttcttaaatccagaaaaagattagatacctacattagcagtaacaaattggtaccaacataaaaggaaataaaactggcttattaacgatgcccggctcttaaatgtaaaatgaaacgagttgattttcaaaactggtttcaattactaagaaaccattctgttcaaaggacgcctcaaactttaacttatcgtcggccccttttttggtctgggtgttttctctcttcagaagacatcacatctcattctgattcagaacaggttttgcaacttctcggccctttggacctgccacttccaggtgtctcattacctgttacagactaattacggacacgtaacgtcttacacaaaaccgaaaagcatttagtttctgaactaaatgctttaaaaaaaaaagtttacaatgaagatgctggaaaactcgtgcatctgaataggacaactcattcccaagtcctagaggaaaggaggcgaaatcagagtgaaagtgcactggcttacggctcaaactgcagggcgggaaaacaaagcacctacattactcaaaaaaaaaaaagttctaggtttctgggcggacacttatcctggggatacacatagacacaagcacgcttcaataaagacgagaaaggccctccatacgcctcctggcatcattagctgtatcccgctttacttcgccaatatccaaacattctcagtttggattctgggacgccaaataccttctcttctgcctccctatttctcccacacgtcaggtctctcctgtacgtcctccaggtctaaaacactgagtttctgcccgccccctggcctaagtcccttcctcctccgcgtctccgaacgctctgtcccctgtctccggtgtccccatcggcggcgggaccctctgcctcggattcgagccgccgcgcagctccattcttctcaccttggttacagaagaggctccacagtttggcgaagatcagccccatcacgagcaccggggcgggccgcggggtccctcggcagcaggtgccgctgcgccgggtcccccaccgcggcgcgggctgcgcggagccgaggagaacccgcctgagatcgcgcagcgagggcactgctaggccgagaagcctcgacccgaccactcagaaggcgccgcgacgaatccccaccggacagccctttgtttcgagcccactgagcccaacgccgacccgtagtcccctcggtctgtacccacctacctaccacagcctctccacagccccaagccccgcctccaccccgcctcccctccggatcccaggaccacccatcgccggaagctaggcgcgtgacgacggcgcacttacggcaacccacgccttcgacgtggcgttttcttcggtttcacttccggtaggagagtcccaaacggccagcggctgggaatttgcggtatcgcgggggggtgggaaatttcccttggtgcgtgctccttctgatgtcagccttcaaaacgtttgtgggactcccctttgatttgagtctctgctgctagcagctgcttccctgacctctaaaaccaggaaagaccataggttctctaagtgagcagccgccgtttgctgctcttagaaaactcacagaagtgaagagtgtttctttcctgacttattcctgttcccctaggcaggcgtgctaggggttaggagttctgccgtgattcttcttcattcatttattaatctattcattcacgtattcattcattggcttatgcatttatgtactcattgattgattgatcgattgcagacgaggtcgggctgtgttgcccagggggactcaatttcctgggctcaagcgatcttcctgcctcgacttcccaaagtggtgggattgcaggctcagccaccgcgcccggcccctgtcgtgattcttagttctgaaaagaattgattgggagacgagccatggaaggcctggagccacagagttcagttatgtgattaataataacacataataataacacatagcacccctctccattttgccaagcattaggtatgttcgtggatcccagatcgaagtccacgcataagccaattcgctgtgtaattgttttcaattccactttccatggttaggttctagcattgaaaagaaaagcttcacagcctggcatgaaacgaaactgaatgtccttgaaaccagttgacggaggagcaagcttaaaatttttttagactctgacttcagtcagatggttggattttaaccttggcaacgtggccttttaacatgccaaactcttgagttaacctgtacaaggagaatgtatgacttacgtcctcccagtgctatggtttaaagaccctttaagacttagatgcaggataatatgctccaacgttacaacattaaaggcaagtttcaacctcctatgtagaggaaaaagaatgtactgaccctatgcaaacttaactttcatgactatcagttggaccataaatgtgaataattttgtgtttgtgtaagtaatggcttaaaaggacatttttagtcctagcttcattatcacaaaacaaactttagattccgtaacagcttcttcaattgttagacatggatgtaaaccacattctgctttttttttttttttctggctttcggatttctaagaaaccatttctgaaaagaacaaagcatttttgtatgaagatgcagacatttggctgggcgctggggctcatgcttgtaatcccagcactttgggaggctgaggcgggtggatcacgaagtcaagagatggagaccatcctggccaacatggtgaaaccctgtctctactaaaaatacaaaaattagccgggtgtggtggcacgcgcctgtaatcctagctactcaggaggctgaggcaggagaattgcttgaacctgggaggcagaggttgcagggagcagagatcacaccagggcacttcagcctggcgacagagtgagactccgtctaaaaaaataaaaataaaaataaaataaagaaaatgcagagatttgaagcaaaaaaaactatagatttcttaaacatttttatgatattttagagacagtaagtttgaattatacttctacttttaactaagtggaatgaatgtatttatttgaacatggctcttgatatttttattggttttgtttctttgaaatttcagaaaactttagtgttgaagttttcagttcgttaaaatttacttttaactta

SEQ ID NO: 913389 - DNA, 4001 bp, Homo sapiens
aagttgttttaaatcatctgattttcacttaggaactaatttttcctacttcaggatagtgtttttgagcaattgcatagtgcagaggttagaagagcttacacagacagtattgcaatgatagagtgtctcctaagctaaagaatgaagttaaaagcctatgtgttttatcatggcccggcgtggtggctcactcctgtaatcccagcactttgggaggctgaggcgggtggatcacctgaggtcaggagctcaagaccagcctggacaacatggcaaaactctgtctctactaaaaatacaaaaattagcctggagtggcggtggcatgtgcctgcattcccagctactggggaggctgaggcaggagaattgcttgaggccgggaggcggaggttgcaataagctgagatcaccccattgcactccagcctgggtgacagagcgagactctgtctcctcccccaaaaaaagcctatgtgttttatcaccatattgggtatgatagttaatggaggagagactgaacagctgacataggtcggtggcaatgagctatggagatgatccttacaagggtaatacatttcactgtggagaatttggaaaacaagggcacaacgaataaaataaaaatcacccaaagataagctcagagagatcaatactatttcttttcttttcctttcctttcctttcctttcctttctttttctttttctttctctttctctctctctttctctctctctctctccctctctctctctcttctctttttttctttttctttttcttttttgagacagagtctcactctgttgcccaggctggagagtggcctgatcttggctcattgcaacctccacctcccaggtttaagagattctcctgcctcagcctcctgagtagctgggattacaggtacccgccaccacgctcggctaatttttgtattttcagtagagacaggtttccccacattgaccaggttggtctcgaactcctgacttcaggcgatccacccgcctcagcctcccaaagtgctggggttgtaggcgtgagccaccgtacctggctttgtgtgtttttctaaagtgattttaacatcctgcctcaacttctatcccctactttcaccttcccttcctgggttcatattcctactaaattcttatattaacaaataaattcatgaagtctcagtttcccttcattgctttaataatctccagtggattagcataacatgccattacaaatattttaaaatcccttagctatctagccagtctctgattgttgaaatttgtttctaattttctggaaatatggacagggctgaaagaacgtccttggacataaaattttcatccattatccccaactatttctttaggataaatctctagcagtaaattaactgggtgaaaacttcagggcattggatatgcaaacaactctgctctaaaaatgcatcttcttgactactggagccattttttttttcacgagttgattggtcctttgtatttgttcttcgtgaacgttcagcctatgattttaaatattttctaatgagttctgctttgagaagatttaaagaggaggagggctcaagaaatcgaggccacttctgagttgctcacagtcaagtaacggaatctgacttgatctcacctcagatcccctctcgggcctcagttttgtcacctgttgaatgggaggtggcgggatgcttacgaaacccaccccaagccccgtctaaccctgcgggcgcgaggcagaaactaacaacgcccagcaaggtgttgcctcactgacccaagcagtctgcgcccacgtggcaccttctcctttcccaggttttcctcaggcctctgccttgggcctccccaccccacggggttacctttacctgccgggagatcccgccgagtagctagctgctccgcaaacccagcagacgaacccccagtcccttgttgtgcctcgttgctaggcgacgccacgccgcgccgcgcctgcgccctgggaacgctcggggctgctagggcgcccattgtcccgccgagggcagcggccagtgcgggaggagccaagtgcgtccgcgattacctgaatccagtgctttaggggagaatggaaactgggggtggaagctgtaaatcaagaggcagttcagcctcagtttctggcccaaggactggctgtgggttcaaatacgcaaatactattgcattcttccaaatagaggcgtcagccggaatctctatgcagatgaaacccacatcagccacctcctgcccaggctccgttaagctgcagacctgcactgccacatctctttgcactaggatgtccaatccgtttccacagaacttctcatggcccttcaaagccccgttctcttcctctttctttcctcttcctgccattcttccaattgcctagactcagaaggagcttcaatttcccttcttcctcccatgccccccaaccacagtcatcacttcagccacttcttggcggcttacattttgtttcctgcttgttccctttctcatatccttattgtcacttcaatccagctcgtcattttttggccttctggctgagaaattcagttgctctctgcttacagttctttctacgtatcacaggcaaatcggccatccagaaatcatcgttccagtcttgtcacttccctactcaaatgtcagcggcttcctaagataaattttcaacacattggcctggaatttaagaccgtctgctccatctctactccatctgtgcaaccacattttcaaccgatctccaccatccaagctccagccaaacttactgttcccgaaattttccacacttttctctagattttcttgcttatctgttcatcacttcatttttcaacaaatatttataaagtagcttctatttcccaggtcatgtgcaatacctgaaatattctctcatttccacttaattaagcccagctcaaatgccatcttcataaaatattttttgattgcctttagcaaaaagtctctccctctcctcttagactttgcaaattccgtctcctaccggcccctgttggtctcccagtcctaagaatgatagatgcttcttataattgctacttttatatatcttatgttctcttctcaccatttaaattgcctgataaacagctttataacaattatttgtattcagttttccatggtcaaatatccggtgtgacttctgtatagaaaagatcttaagtaatggtcatgaaagtaggaaaaggattaagaccaagtagcatcaaggaaactaaggagggagtttcaagaatataagcgtcatcaagtgttatatgattggaccttgaataatatacacctgtattttcagcctctccctgtcttccacgttttttcctgttggtatataattatgttgaagcccctcccatgcctcatctaaaaagcaaaaacaaataaaatccctttgatgttgttgttccttctaactattatcctattgttttctttctcttcttggtcatgacttttcaaaaaaagtagccagcattagatacttacatatttttaacttcctattcactcttcagactatagtgacctgttttcatcccagcactaaaactatccatatccattggatgcttcttagccctcatcttgcttgacattgctgctgtatataatactcaatgacacctcattcttgaaactcttttcttggtttccttggtactacttgctcttgatcttcctcctactttcttttatgaccatcatttaagatcttttctatacaacagggtctatctatgttgcccaggcttgtcttgaattcctggcctcaaggaatcctcctgactcagcctcctgagtagctgggattttatagggatatatgccctattgtggtttttttacagaatcttaaatgttgaaatttcccagggatctgtcccttgttct

SEQ ID NO: 913390 - DNA, 4001 bp, Homo sapiens
ttacatgccaatcttttcttacaattattttctttcattttacagttagcacactatcaatatttaaaactatattaaatatgtaagattataatctatgatattgatttcaggatagcaaagcagccttacaacatatatgctataaaaaccaagtactggatcagatagggtggagaacaactgatccagacatatataccaaagtggtcatgaaataaagtgcagaaattagtgcacaaatttgttctgggtgtttgttttagtattctagcattttgtttctattgctaaccgatgagaaatgctttagatttaaacacataaacatgttctgatgtgtatgtgtgagactcttgaatttcccattgttgtgtaaaataagtgcaaatcagtgtaaaatagtgtgaaataagtgcaaatagctttatcttatacagaaaggcttaggtgaaagttctgtctgtctttaatcttaagtataacatttgttttggtaatcttataaagattgcttcttgcacatttttaaagaaaaaatgcgaaattaaatagattatgtaacgctatggtagtcaacataccatatagtaacttcttgaaggacccttaacacagaattaagaaatgcaaaatcgttattttcgtcaagataaattttgacagaaatgtaacatttgaatctattcaaattgtatttccaagtctagtgaaccgtagcaatgcacaagttttattcaagaaggttggtgagtttaagaaaacctcagggtggcctatgacaatccagaaggcaagatcaatgttattagaaaataaataaataaataaatggtgttcaaaaatggtcggcataactcaaaactaagattttaaaatcaagaccagttgctccccggtttctgcccattgccaagctcttttggcttaagaaccatagttaaaatgaatccatgtaaatacacagcacacacctttgaagtaaagaaagtaagtttaaagattaaaaggaaaaaagttttggttacgtgtttacataaactgggatgtttacataaactgggaatcacttagcactcatttttctctttatccaatagataccacagattgtttttctttctaaaggtcaatttcaagcttccagcatcattagtgaaatgaaacccattcggtaatcacatcgttaacacttaaacagaagcacaaccgaattctttagggggctacggaaaggcagccatcagctctgagatctatgaaatgtggttggtaacatccacggggagtccgcgcatacactgctttctgagaatgcagaagttactcagtaagaccgacagaaaatcgaacttttagacatgacatgaacagggccctaagtaaaaccaaagctaagcctagtgtgggatgacggcccccaccagactcgttacaagaagggggcgtcagagctgagaccctaagtttccaggaatggattcggtaaggggacgaggagggaagggacggcgaaaaccacgctgggagcgggaggcagagctgcaaagggcggaggagaaagacgggctgggggaaggagaggcagggaagcggcgggagaagtggagagcggatccgggaggtgatggggccgaggtagtgcagagaggggcgcagggactgaggagcagacggtccccaacctagggccgaggcagggtctcgcggggaggaaggagtgagatggggctgggagagagaagggaagggggcgggtcttggtccccgggagggaaaggggagcaggcgagagcggcagcggcggggccagagagccgcctctgtttcccgatccacgcgggcggctgcagaacccctgcgggggtgagcgtggagacccccagccgcactcacctgcagcaccctgccccccgcagtcggcgcccgcctgttgctaggacgcgggtcaacactgcgcgccctgcggccgcgcacgccggcgcccttgtgggaggcctacagggcccgtgccctcccccgggcgccgccgccgccgccttccgctcccagcctcacccggccgcgaccgcagcccagtccgttaccctggtctcgggacctccgcgcatccaagattcccgcggacccgttgcaccgtatgcccgcgccagagacgctctgcgcccgcgctgggttccacccgccccggccacctgctgctttccgctcggcccctcccgggaaacacttttattcaactttgcatctccctttctcaaacacttttatgcaactcccgagtgtgcaccctaactcactccacgcggtgggaaaggttgactttgacagaggtcgtgagcagttgcggggtcggcggcaagttagcagaaaacttaaaatggagcagaaaggaagcagaaaatattccttagaaacccctttttacatttttccataggcttccagacaagtgcgttgtatgtacctgaaatcttcactgagtacccccaaatagcatagggcttctcctaggatatttgaggcttacatgtttctctccaaaaaaacaaatatggtagaatactctgatactcaccgggaaagcagaaagcgctcttcaatagggcagaggatcggagtgaaatgaaaacatgtcccccatctctttttttaaatggcctttacctttgtccattaagatggttttgaccccacctctagacaccctaccagcaagagccccaactggaacaccagtgagggataaaggagtgggaatattgaggtggggggggatggggaagaatgcactatcttggggtggggggacacggtgtttaaggaccaatgccggagcacttaggatgatggggtgtttaggaattaaaactggattcttttccggatgccaaagaggcaaatgtggaatgatgttaggatatcacctgtcataatattatacggattcagctcaaagcagaacctttctgcaaacacgtagggatatgaggtatagatatttgtcctttgttttgggttttttggagggtgggggacgaagtctggctctatcacccaggctggagtgcagtggcacgatctcggctcaccgcaacctctgcctcccatctcggctcaccgcaacctctgcctcccgggttcaagagatcctcccccctcagcttcctgagtagctgggattacaagaatgcgccgccatgcccggctaatttttgtacttttagtagagacgaagtttcaccatgttggccaggtgggtcttgaactcctgacctcaagtgatccacccacctcggcctcccaaagtgctaggattacaggcatgagccaccatgcctggcctgttttgggttcttttcttctctttttgaaagtgcgaaagttgttaggaatggaatagtttcacctaaaggagatactacctgcagagaagcttagacttgcaaccagtgagaaaggggcttatgctaataggtatacagagaagcccttttaaaaatgggtggattacagtctgagacaacagcatcacacctgtggcggtaatgcaggtcacaacctggtgaggagcagagggcatccttcggaaggatcctggagtagtcccagtcctggaagcaaggaagcttctgtgggtactttagttcctctgcacattttaatcagctgtatgacataagggagcattactgggtccaatgtggatgccagccagagatcttccaagttcaggacatttcaccttggtttgcaaagctggaaaaagccagaacccaccaagatctgagcaactatgtcgttgtttgccaaattcatgccaagttgcttaatctgatgccaaaatgtgaatttattttaccggatattttccaagcaaaaataacttaataatatttaaatctgaagaagtcccagtcgcctctttccaatttttccttgtcgtgatgaaacactacctgggcccagtcactccctgaaggatttatcatgacttgttt

SEQ ID NO: 913391 - DNA, 4001 bp, Homo sapiens
aacaaaaacaaagttggaggactcacacttccttatgtcaaaactattataactaaaagaaagatatagaccaatggaatagaattaaaagtccccaagtaaactcttccatctatgatcaattgattttcaacaagaatgctgagaccatccaaaagagaaaggacaatctcttcaacaaattgtgctgggaaaactgaatatccacatgcaaaagaatgaaattggagcctaatggacaaaaatcaactcaaaagagatcaagggcctaaagttaagagctaaaactatacaatccttagaggaaaaacacagtgctaaatttttcatgaccttggatttggcaatggtttcttaaatatgatatcaaaagcataggtaaaaaataggtaagaaaataagaaaaaataggtaaattaggcttcgtcaaaattaaaaatgtttctgcatcaaaggacactatcaagaaagttataaggcaacctgcagaacaagagaaaaaatttgcaaaccttctatctgataaggggttaatattgggtatatacaaaaactacaacaacaaaaagattcaatttaaaatataagctaaggactcaagcagacatttcttcaaaaaagatatacagataaccaacaaatatatgaaaatatggtcgacattactaatcattatggaaatgcaaatcaaagccccaatgggataccacttcacactgactacgatgtttataattaaacaacaacctagaaaataagaagcattaacaaggatgtgaagaaagtggaatctttggataatgctggtgagaatgaaaatggtgtggcccccgtggaaaacaggttggcagttcctccaaaagttaaatacagaattaccatatgacccagaaattccacttttaggaaaagacccaaaagaattgaaaataggaactcaacagatacctgtacaccaatattcatagcagcattattcacaatacccaaaaggtggcaacaacccaagtgtccatcaagggatgaatgcataaaccaaatgtggtctatacataaacaaaatattattctaccataaaagaatgaaattctgatacatgctatagcatggatgagccttgaaaacactatgctaagtgaaagaacccagacacaaaaggacaaatattatatcattccagtgacatgaaatatctaaaataagcaaactgatagaaatagcagatcagagttaaccaggaagtcagggaagaaggaatggggaattattgcttaatgggtgtagagttcaagttcgagagacgaaaaagacttggaaattgacaatagtgatatttgtacaacattgtgaatgtaattaatgccattgaaccctgaacaatgatactacatttacagtatttttatgttatgttatgttgtaaaaaaaaaccactaataataaaaagtgcccaaaaataggcaaaattactgtttttcttgtaccatagaaagttgtagtttagtaacataatgctatgaaagctcaaaagaaaccataaaacttaccaatttagacatattttctgaaaattttggtgatttttctcttaaaaatgtgacaaggtttttataaattgaaccttttctctcataattaacgtccccttcatcatctgttttgccctttgggaaaaaacaagtttcattctatgattaacataagaacaattgtaagaagctgatcaatacatcacaagctagccacacgtattattttcatctccgaaggatctatatggtagttttaatacaggaaatgtataggcaaaatccttcccccttaatttaatgttatctatttttccattcattcactcattccttccttcattcaattgttcattcattcagcaaggctttactgagtacctcctatatgcatgtaaggcactctgctgttcagcagagaagtgagagcttccttctctccgctctcctctactctgaaaatgcattatgacctcacgagccttagttgatgatgtcataaaagtcttcaaggttagaatttaaccgtggaaaagcctacatttctgtttgtcacactctgttcttctgtctgtggcatggttgctataggcttattttctagatctctgtgtaacgatctgtccacacacccatgtgtctctctctctcttcttgtctctttcctttcctcattttccttttcttccctacctctattgttcttccataacagaatatatatatataatgtatacacacatcacataactatatgtatataaatacatataactgcagtttgttatatataactgtatacacaaaaacatttctatacgtatgaccagtgtgttttaaactttgttgtaattattgagtagttttatggtccttgtctttcatttttttaaaacttaaagggatacttagatatctccatgctaaataagttatatgtatgtagatcaataataacctttgatagaaataaagactccctgcccccctccagaaggtcaaagaaaatcattccttcttttgtccctttattcctaattagagatttcgtttttctaaaatatcataaaccaaagcaaaatcttatttgtctactgcctctttgtagaaatgagctcagtgtcatgctaataagaaaagcaccaaaaggcatgtcagaaagataactataggtaatcagaaaagaggctccagcattttggtaccaacccaagccaacatgtaacaaccctccaggcagtcccccgtgatggctgggtccccattaaggacttggatcctccttgtagaattttgtttctgagttccaaatttatgttgaagatactgagggcaggatgttgcagaggtgaaagctaagctccttctagctggttctgtgaatagggatgagactgaaagtgttttaatccagaacactgtgtgctgtttatcactcagctcaaagcccagccacccagcctctactttgtgctactcacgcaggaatctgcaatgtcgtatttctcctttcaccaggctaggttattaggctccgtcattagaatcagctaaaggaagactgaaaggctggcagagggaggagggacctgctgcttcctgctggcccactgtccctgttagagtcaccccagcaacggcccttctttccacacagtggcagttgcttccagtagcaacagttggttccagtttccaggtttgttgatttttcacggtcccagaaacaggctcacctcaccccctgggaaatatcactatcagtcatccagtgctccattttcaaaggtccaggtcccagctctgccatctctacaaggatcctcttcccgaggtatgagcattaactgggcagtgcccactcttcagagatctggagccctgcctcatggagatggtctgaactctgtggggaccagcacagcctggaagtggaccctcccaagaggtctgggtcccagcttcatagggcactgtctcctaccttctacatttagataagcccctctctttccctttgtccctccaactcttaggatgcaagctgcagttatgacatctgtattatctcaatgtttcttttttgacctttctatcatttggaagctgtgtaatgaatcagtgaagtgattacgttaaagacatttataaagtggaatgggtcactttgaagcccatttcttatcagattggcttaatgacctgcagtggagaataagagagctaattctgaagctattttggatttgcccagcaagcatatatcaaaggaatctgcttctatcccacagaatggtaattcattctctgtggtcattgggacacacccttgagacatctacagctaacaatcaaagtccactggctttagttacgtttttaaaaatttacttacaccatttaaaaatactcctcctgcactgcaagtaatgcacagagtctcaccatcgtgaggtttcaccagcacataa

SEQ ID NO: 913392 - DNA, 4001 bp, Homo sapiens
aaccaagtactggatcagatagggtggagaacaactgatccagacatatataccaaagtggtcatgaaataaagtgcagaaattagtgcacaaatttgttctgggtgtttgttttagtattctagcattttgtttctattgctaaccgatgagaaatgctttagatttaaacacataaacatgttctgatgtgtatgtgtgagactcttgaatttcccattgttgtgtaaaataagtgcaaatcagtgtaaaatagtgtgaaataagtgcaaatagctttatcttatacagaaaggcttaggtgaaagttctgtctgtctttaatcttaagtataacatttgttttggtaatcttataaagattgcttcttgcacatttttaaagaaaaaatgcgaaattaaatagattatgtaacgctatggtagtcaacataccatatagtaacttcttgaaggacccttaacacagaattaagaaatgcaaaatcgttattttcgtcaagataaattttgacagaaatgtaacatttgaatctattcaaattgtatttccaagtctagtgaaccgtagcaatgcacaagttttattcaagaaggttggtgagtttaagaaaacctcagggtggcctatgacaatccagaaggcaagatcaatgttattagaaaataaataaataaataaatggtgttcaaaaatggtcggcataactcaaaactaagattttaaaatcaagaccagttgctccccggtttctgcccattgccaagctcttttggcttaagaaccatagttaaaatgaatccatgtaaatacacagcacacacctttgaagtaaagaaagtaagtttaaagattaaaaggaaaaaagttttggttacgtgtttacataaactgggatgtttacataaactgggaatcacttagcactcatttttctctttatccaatagataccacagattgtttttctttctaaaggtcaatttcaagcttccagcatcattagtgaaatgaaacccattcggtaatcacatcgttaacacttaaacagaagcacaaccgaattctttagggggctacggaaaggcagccatcagctctgagatctatgaaatgtggttggtaacatccacggggagtccgcgcatacactgctttctgagaatgcagaagttactcagtaagaccgacagaaaatcgaacttttagacatgacatgaacagggccctaagtaaaaccaaagctaagcctagtgtgggatgacggcccccaccagactcgttacaagaagggggcgtcagagctgagaccctaagtttccaggaatggattcggtaaggggacgaggagggaagggacggcgaaaaccacgctgggagcgggaggcagagctgcaaagggcggaggagaaagacgggctgggggaaggagaggcagggaagcggcgggagaagtggagagcggatccgggaggtgatggggccgaggtagtgcagagaggggcgcagggactgaggagcagacggtccccaacctagggccgaggcagggtctcgcggggaggaaggagtgagatggggctgggagagagaagggaagggggcgggtcttggtccccgggagggaaaggggagcaggcgagagcggcagcggcggggccagagagccgcctctgtttcccgatccacgcgggcggctgcagaacccctgcgggggtgagcgtggagacccccagccgcactcacctgcagcaccctgccccccgcagtcggcgcccgcctgttgctaggacgcgggtcaacactgcgcgccctgcggccgcgcacgccggcgcccttgtgggaggcctacagggcccgtgccctcccccgggcgccgccgccgccgccttccgctcccagcctcacccggccgcgaccgcagcccagtccgttaccctggtctcgggacctccgcgcatccaagattcccgcggacccgttgcaccgtatgcccgcgccagagacgctctgcgcccgcgctgggttccacccgccccggccacctgctgctttccgctcggcccctcccgggaaacacttttattcaactttgcatctccctttctcaaacacttttatgcaactcccgagtgtgcaccctaactcactccacgcggtgggaaaggttgactttgacagaggtcgtgagcagttgcggggtcggcggcaagttagcagaaaacttaaaatggagcagaaaggaagcagaaaatattccttagaaacccctttttacatttttccataggcttccagacaagtgcgttgtatgtacctgaaatcttcactgagtacccccaaatagcatagggcttctcctaggatatttgaggcttacatgtttctctccaaaaaaacaaatatggtagaatactctgatactcaccgggaaagcagaaagcgctcttcaatagggcagaggatcggagtgaaatgaaaacatgtcccccatctctttttttaaatggcctttacctttgtccattaagatggttttgaccccacctctagacaccctaccagcaagagccccaactggaacaccagtgagggataaaggagtgggaatattgaggtggggggggatggggaagaatgcactatcttggggtggggggacacggtgtttaaggaccaatgccggagcacttaggatgatggggtgtttaggaattaaaactggattcttttccggatgccaaagaggcaaatgtggaatgatgttaggatatcacctgtcataatattatacggattcagctcaaagcagaacctttctgcaaacacgtagggatatgaggtatagatatttgtcctttgttttgggttttttggagggtgggggacgaagtctggctctatcacccaggctggagtgcagtggcacgatctcggctcaccgcaacctctgcctcccatctcggctcaccgcaacctctgcctcccgggttcaagagatcctcccccctcagcttcctgagtagctgggattacaagaatgcgccgccatgcccggctaatttttgtacttttagtagagacgaagtttcaccatgttggccaggtgggtcttgaactcctgacctcaagtgatccacccacctcggcctcccaaagtgctaggattacaggcatgagccaccatgcctggcctgttttgggttcttttcttctctttttgaaagtgcgaaagttgttaggaatggaatagtttcacctaaaggagatactacctgcagagaagcttagacttgcaaccagtgagaaaggggcttatgctaataggtatacagagaagcccttttaaaaatgggtggattacagtctgagacaacagcatcacacctgtggcggtaatgcaggtcacaacctggtgaggagcagagggcatccttcggaaggatcctggagtagtcccagtcctggaagcaaggaagcttctgtgggtactttagttcctctgcacattttaatcagctgtatgacataagggagcattactgggtccaatgtggatgccagccagagatcttccaagttcaggacatttcaccttggtttgcaaagctggaaaaagccagaacccaccaagatctgagcaactatgtcgttgtttgccaaattcatgccaagttgcttaatctgatgccaaaatgtgaatttattttaccggatattttccaagcaaaaataacttaataatatttaaatctgaagaagtcccagtcgcctctttccaatttttccttgtcgtgatgaaacactacctgggcccagtcactccctgaaggatttatcatgacttgttttttttttttcttttttttttttttgagacgaggtctcattctgtcacccaggctggagtgcagagtgcagtgacataatcataagcatagctcactgcagcctctgattcctgggctcaagtgatcctccagccatggcctccgaaagc

SEQ ID NO: 913393 - DNA, 4001 bp, Homo sapiens
ttttttttttgagatagagtctcactctgttgcccaggctggagtgcagtggtgcggtcttggctcactgcaacctccacctcccaggttctagcgattctcctgcctcagcctcccaagtagctgggattacaggtgctgccaccatgcctggctaatttctgtatttttagtagagatggggtttcaccatgttgaccaggctggtctcaaactcctgactgcaagtgatttgcccaccttggcctcccaaagtgctggtatacagccatgagccaccatgcctggcctatttttgagaatttctgaagcactttagaattacaataccagcatttctttttttcttttttcttttttttttttgttttttgttttttagatagggcatcctctcgagccagagtaggctcagagactccagcactagcatttctaatatcaaatcaaaacattcatgtctattagttaaatatagatacttaaaagccaaccccaggcctgctgctgctcagtttccttttaagcctttacattctatgtatttgttaagatctataattcagatcttttattaatttaggcgaacccttcccctaaatcagttgcatgagaccagcagtccatctttgcattaattggctccttccaacatatttgctttagaaaattaaaagcatggcatgtgatcaaatttttcactctccatggtaaagtatcagacagatacaattcaaacagagccccaggcagccaccgaaaggtcttgaatgacagcttgtcaatttctgtcactcgggagcagcttgaaaagctgagcgcgctcacatttagaacatgctgccatttaggcaaaatggtttaacattgaatcaaggacattatgagccagaattttaaatctgcttgtaaaaaacaaaaattaagagagggaaggggttcaacctttgtgttctctcatttgtctaattatatatactatggcaagcacaaagcgccacagttccgtaagcattagaaagcatttactaagcttatttggcaacatggtctctaagctgcttgatgtctaaattttaaaccaacgtgacctgtaaggcccagattctttctctacaaacttgcattgttgttttcttacacatacagccaaggcattttttttaatccataaatgagcaggaaaaatgagcactggaaagccgtgagaatattgaaagaatggtacagctttctaaatgactcctctaacaacccggacgagaagcaggctgaggtttccacctccttcagtaaaccctaaagccaattcaccggcttgaggggccactcagatggccttctataagctttgggtttctgctcaccccatcactttctcagacctactgcgtcttcttgtttcctttttctggcatgtagcaggtgcattggaagtatttactgatattcccaattctccagctattcaaccagaggaaggctgaattgcctaggcctccctgtggccagtggtgctcaaacctgagcatgcatcagaagcacctgaaggctggttaaaatgcaagctgcagggcaccactccagaatttctgattcaataggtctggggtaaggcctgatcatctgcatttcttaccagtgtcaggtggtgctgaggctgctggaacctcctctgggttccagcaggagagaagaaggctggtaagcagagctcagtgtggattttagcagctgggatcatggagtgtgataaagacagtttgctcctctgcttgtcactggctccttctccaccaactccagggtccagcacagactctcgcagagtggaaatgaaggacacaggaaccaccgaggaggacagacttgccatctcaggccctcctttcccctccgcctcagttaccatcggtcctgggtataggcgcagcatgtagggtacagggacataatgtggtgacaaaggtgctgtccccttgccaagccagctgccatctcactcagccaggagcattgtcttttcccgtcacacaaaaatgcccccaggagtcagggcgccctgataactccaccctgaattgttgggtggtctcagggagggtccacccctcagtcctgctctgccagaggaggcaacagaggtccctagtatccattgaaatcatctgtgaagcttttaaaaaatgcagagacccagggatttgaaaaaaaaaaaaaaccttgattgtagatcatagtattgaatcaatgttgattttccaattttgatcatgttactgtggtatgagaaaattttttttaagaaaaacacactgaaatatttagaaataaaggacgtgcaacttaaagcctccaacttaaatgttttaaatgtttcacatgctttaaatgtttccaagaacttgaatgatgtagcgagggtggtaagcattcgggaaatctgagataagggtcaatgagagttttgggggttttgggattttttgttgtttttttgttgttgttgttgttttactatttttcaacttttctctaaacctaaaattatttcaaaataaaaaacttttttttttgagatggggtctcattctgttgtccaggctggtgtgcagtggtatgaccacagcttattgtggcctcaacatcctcgggctaaggtgatcctcctacctcagccacctgagtagctgggactacagctacagaccacgcccagctattttttatgttttttgtagagaccaggttttgccatgttgccaggctggtatcgaactccgagctcaagcaatctacctgcaaaagtgctaggattacaggcataatcctagcccaggccccccagcctttttttttttttctgagacagggtctcactttgtcacccaggctggaatccagtggcatgatcatggctcactgcagcctcatactcctcggctcaggtgatcctcccacctcagcctcccaagtagctgggaccacaggtgtgcagcaccacgcctggctaatttactttttttttttttttttggagatggggtcttactatgttgcccaggcaggtcttgaagtcctgggctcaagtgatcctcctgcctcggcctcccaaagtgttgggattacaggtgtgaaccacttctcccagccaaacacttttttaaaaggaaaaaaaaagccgggcgccatggctcacgcctgtcatcccaccactttgggaagccaaggtggacagatcacgagctcaggagatcgagaccatcatggctaacatggtggaatcctggctctactaaaaatacaaaaattagctgggcatggtggtgcgtgcctgtaatcccagttactcgggaggctgaggcaggagaatagcccgaaccagggagtcagaggttgcagtgagccaagatcacgccactgcactccagcttggtgacagagcaagactctgtctcaaaaaaataaaaaataaaaggaaaaaaaaaactattccagaccaactgaattaaaaactctaagagcacaaataaacacatgagaagatgcttggcatctctagtcatcagcaaatcaacaaatcaaaaccacattgagatactacttcataggcactaaggtagccagaatcaaaaagtcagatgataacaagtatcagcaaggatgtggagaaatcagaatcctcatgcactgctagtgggattgtaaaatggtatagctgctttggaaaacagtctggcagttcttcaaacagagtgaatatatgatccagcatttccattcctaggtagctacccaagagaaaggaaaacatgtgtccatacagaaactggaacacacatgttcatagcagcactattcataacagcccaaaggtagaaacaacccaaatgtccatcaactgataacagataaattatggcatatccataaaatgaaatactattcagccataaaaaagaataaaatacccactacaacatggtgaaccctgaaagcat

SEQ ID NO: 913394 - DNA, 4001 bp, Homo sapiens
tgcctcagcctccccagcagccggaactacaggcgcgtgccgccacacccggataatatttttgtatttttagtagagacggggtttcaccatgatagccaggatggtctcgatctcctggcctcgtgatcctcccgcctcggcctcccaaagtgctgggattacagacataagccaccacccccggccttttttttgttttgttttgttttgactgagtttttctctgttgcccaggctggagtgcagtggcacaatctccgctcactgcgacctccgccttccacgttcaagtgattctcctccctcagcctcccaagtagctgggactacaggcgtgccccactacacccagctaatttttgtattttcagtagagacagggtttcactatgttgaccaggtcggtcttgaacttctgacctcaagtgatctacctgccttggcctcccaagttctgggatgacggacgtgagccaccgctccccgccgcgtaggtgtatttgagaggcgagataaaacatcgtgcacagaaaacacttcccgtgatttacggacagaccgagtgacagagtgctgtggcagtttggggaagaggccgctcaaggattagagaaggctccatgcagtaggtgggacagcagcgtggtgctggatgcgcagggttgggaaggaaaaagaaaagggaagaccttccaaattggtgactgccggctgggcaggcagtgctgatggagtgaggaagggaagggtcaaaagggccaaggttgattagtgggtgctgaactgcgcatatcttgaatggcagatccagtgagtgtgactgtattctgtgagcatgggtagggactacagagtgttcacgctggaggttcttttttttaggcaatttttttaaagtacgcatttattttagagatgcatctggctatgttgaccaagctggagtgcagtggctattcacatcccggatcgcacactacagcctgtaacttctgggctcacgcgatcctctgcctcagcctcccaagcacttgggactacaggctcactggcgcgcccagactcatcggaggttcttagagcagtaagatgatgggtgctgagatttaggatttttacaatagacaaggcaagctgatgggttggtggctacgggttaattccctagtgacctgcatcattatcttttgggaaaactgctgtttggggtcttcctggggacagcacagggcactctaccttagggctacttcttcgtgtacattttgcaaggcttcccggatgtgcttggggaccggcctggctgtggtgacacagccgttggtctggaggtctgccgatctcttcagcacctgcccgtagtaggtctgacccagcgtcccacagtggagtgaggggtagagagggagaagagctgtgactgcagcgcgagggctccgtcaccacctccacctccacttggccgacctcagttccctggaaaggtcgaagcctagaccctgccctaccccgactccaggagtcccgggggacagggtgcgggccaggccagacttccattagcctaggctccacttgggccattccaggccctacagctctcacctgcacgtccttctgtatctcagcgtcacgaagtgcagccactgtcgggagcgggaaagttagttgaaaggagagggtgctgagggacgggcatgagggagggggccagtaaagggcaggcagcgggccgaggggtgaggggaggacaaaggtctcgagacacagctcgggggaggcgctcgcgttcccgccttgcgggggcccagggaaggggctgggggctggggcggggcgcccagggcgcgcactcactgtctcctcggcctgcgactcagggcgcgcactcactgtctcctcggcctgcgactcagggcgcgcactcactgtctcctcggcctgcgactcaggacggcgggctcccgcagccagctcctgtgccgaggccccgcccaggctggcaggcttgctccgcccgcccatcccgctctagcccctcgctcaggcgcccaccgcctgacccgctgttccactgtcatccgcgctgctctacaggctttccaaccaggaggtcggtatcagcatcccccttgttcgctccactgcgattttcacggataaatctcgtactctgatttaaatgaacactcacctatataatgatcttcccccctccccctttttgggaatagaatcatcttttctcgatctgttttttgaagtcaagtttgttgagatataattcacattccgtgaaatccatctttcttcagtgtgcagttctgtgaactctggcaaacgtatatacatcaccaaaacggagaccaaaatagctctggcccacaagtttcttcgtgcctctttgtagtaaattccctcttcccacccctagctcctgggcaaccacagatgttttccctccctatagttctgccttttctagaatgtcacatagagggaaccattaacagtatgtagctgttcccagtctattttgggttgtatttaggaaagcaactttgctaaatttattttcacctatagtaatttttggtcaagtcacatgtattttccaggtattgtcacttcatcttgcagaaagttttttttttaatttttaaatttttttgagacggtctctgttacccaggcccaacctcctggctcaagcgatcctcccgcctcagcctcccaagtaccttggattacaggcgtgcaccaccacacctggttaatttttgtatttttttatagagacgggatttcaccatgttgtccaggctggtctccaactcctgggttcaagcaatccgcccgcctcagcctcccaaagtgtttggattacaggcatgagccacagtgccaggcccaaaagtattttttgtttttttaaatatggaacacttcacgaatttgtatgtcatcttgcgcaggggccatgcaaatcttctctatcattccaactatatgtgctgccgaagcgagcacccaaaagtatttttaaattatttatttttacttccacaattatatgtgtatatcttgtttccctttgtggttgtaacaagcatttctctttttataatttaaattaaaaaaaaatttttagagacagggtctcaactctgtggcccaagcttagcgtcactgcgcaatcatctctggatccttcaactctggcctcaagccatcctccctcctcagcctccccagtagctgggactacaggtgcaagccaccatgcccagcttgtaacgatcatttctattcattaggacagtaaggaaacagggagatccaagtgaaaggatatctaaatggatgaagtagactctttcattcatttttcaatctcagttgccaataatacaaaaatctggttgatatccagctagtaaattttcatcttctctgatgtcaattagttgttacaaattaatagaaaggtggtgtcttttatatttttaacaaattaaccccatggaaataatccttgttggaatatttctacagcttggaatatttccaactagtatatgtataaaacttagtgtttttataagtatcacttagtttttgggcaatcatagaatggtgaaaacactcctaaatattagttttcaaaatattatcttcataaaatgagctcctttagaaaagcagttaccttctcatagttaaaatgatatctttatcttaaaagggcagattagtgagaggtcaaggaaagggctgtatcatttttctcttgtgcttgttttgttatctttaatttatggtttacttacaagaatcatttgacaatcctttttttttttttttttttttgagacagagtttcgctcttgttgcccaagctggagcgcaatggcgcaatctcggctcactgcaacctctgcctccccggttcaagcgattctcctgcctcagcctcccaagtagctggaattacaggc

SEQ ID NO: 913395 - DNA, 4001 bp, Homo sapiens
tgagaaaactgaaagtcagaaaagtgacttaaccaatagttaatggagagcatgtgatgaatctggtatgcaatccagatcctcaaactcaggatctgatgctctttcgaccaaattctaggtggagttagcatccatgtcttctcattcccaagccgagattttcttgaagacatcaaatattgcaaggagtggagcaggcaccttcgctattgcttcactgctaccagcataggaatgtcatgccaactaaagccaaacctaacacatagccaagggtaagttatttacaatctcagggtctccgtttccccaagcgtaaaatgaaactaatgtaaacagtaggactagcatccacccttataggatttttgtgagaattagatgagaaaatattctagaatcctcactatagtgctcaacatagaaaccatttaataaacagtaactactgccataagaatagttgctgtaattaataataacctccctgagtctcagcctcctgatttcctaattttaagagctaaaactgaataattatttttcttttttttttttaaatggagtctcactctgtcacccagactggagtgcagtggcgtgatctcagctcactgcaacctctgacccctgggttcaagcgattctcctgccttgcctcagcctcccgagtagctgggattacaggcgtgcaccaccacaaacagctattttttttttttttaatttttagcagagacagggttttgccacgttggccaggctggtctcaaactcttgacctcaggtgatctgcctaccttggtcccccaaagtgctgggattataggtgtgagccaccgggcccagccaaaactgaataattcttaatgatcctttcacttctatcagtctatgaccctgctgtgcctactgctggatcagaggatctctgatcctctgtgtttgccaggaattcaaagccctgggacatagtagagaatgtgcaggaaaagagacaggctacaaaagggaaaactgaggtagaaaatatcatcttctccatttggcctaaggccagccctgtctttactttggtcagagcttcaatctttaccagtcttctctactcatttaacagttatgtaacctaacactgactggaacagaggctccaccaagacccactgccaatctttgtgtaaatgtagcctacgttgttctcaaaaactttgtttccaacattttaaaaaatcatgagatatctaaaaattccaatttccaggttctctggaaaactcaggagatctgagatcatgtgttctctctacaacaaacagctgccacctgggagaggctgtaggccttcttcacaagaattgcacctgtctcctccttggtccacctcctcactccacctcatctgcaaaacttgattagcccttgtaaggatttacgtttgagacccctttctctaaagctcttcacagactaattgacattcattcagtgagtctttcattctccttttgcccccaggagaaaatgatgtctacaaggaggcaaattgaaagattagaggctcatggtaaaagctgccattactagaccttgacgaatcttgagctgtgcttagatcaatggaaaaactaatggcaaacaagtacatgtcagaatgcctgtcagctggctattggggacaaaggtaaacttgataaaaattgctatcaatgcagaatgggcaattaatgcaaagggagacggctattccaggctgcttaagtacacgtagaactatcagcagacactgtttttctctttggtgtccacagtaatcaagaagtttcatacaggcctaaaaattgcatctaagagagcccatgacacttgcctttgtggttttcaatggtcccactggtgataaacaagaggctgagaagggccactgtgatggcactcatcattacaaggaggaaaatcaggaatgtctccaagttagagaaggtgcgtttggccatttcttctcaggtacagcagagatggaagaagaaatactgaagaggaagaaatcacaaattaaaatgcaaatgctttaagccaaccgaggttaagatatcttagctctttcatattaatagactataccaagaacgacaagtacagagcacttaccactcattccatagaccaagcccatggcagacaagaccaatcaattacagcattctttttgaaaagctcgaatgtggtttccaaatctttctcaacacaacactcctcctggcagcaaccattcatgatttagcattggccactgagctcaactgagctaaaatctatttgcattcctcagccatatcacactgctttcatttatggcgatgatgctgtttatggatctgtacatgggtctgggctgagagtgcctctgttaacaaggatgactgatgcacgcatacttcttgtatttgggagaaggctggctggggttaggacagtactctgtggtcatggacttagtagaattatcttgttcacctggaggtgaaacccgtaactttggcctttacactctatgttttaactttcaattactatctggtgagaaatgggcatggaaaagggaattagtacctctggtctgaaggcaggcattacaaaaaacatcccccttcagtgatcagaaggatcccaaacactttgcaaaccctgtatcaaaggatgagaatttaaaatgttcctatgttctacaaaagtatcaaatgtcattacagattccttaagatgttttaagggagggagaattaatcattactcagaggaactatacaagttaaaaccccatataatgtaatagaaagaaatataatatggtggttaaaaatttagttttgaaatctgactccagcagtcaaatttcatttctgccacttactggatgactttgggaaatcctcccccaatactgaacatcagcttcaccatctataaataggaatatgattatgatcatcttatctcaaagttcttataaaacctatctcataaatttcttataaaaataagatgagatgaagcaacagtacttcttttgttcaataaatgctcaaactggtagcattttttaatagattccaaagtagcaaagagtctgtgctcttccctgtcctttaagggaatttacaggaggctagtgttaaaggatgattggaatcacaggtgggaccttcagagcccattttcttaacctgtgctttaggaagcctgagaggtgaaatggtattggaatcccaggatttgcccccaaaataggggatttgtggctaagatgctgctacccccaagagttaataaatggcaacaatgtagatgtatttagtacagtcaattttttattcaatttgacttaggtaacaagatataaaaaaatagcattcagagtttataaagagtttacatttacaatcctgaaatttcaaattatctcctaaaataattcgtaaaatatgatgacactgagccagcattcccgtgtgccaagagtttcctaaaactcagtgctgttgttctctttagatgggggatatattcttcaacctgccaatctctacccagcaggccttatttatctaagttactacctggtctgtgcaagcatttgattttgcaattcctgggctagaggtgaaagatcagtctaacagcagacacttcagagggtaggctgaactgggagtgggcaaagagactggaacatcttcccaaattttctggttattgggaagctttcctcatccacttatcaccaccataatgcccttaaccaccagcagcagggacaacttcaaatgtggagcaaaacaagtcagatctgtgacttatgatcaacttctattgtcagtttccaggagtcaggaaacacatctaagacatgcctctgaactctaaggatctacagataattactactcattagcagctgtttcaccagcaaacttcaaacccagtatctctagttt

SEQ ID NO: 913396 - DNA, 4001 bp, Homo sapiens
atggcttcttaatcagtcctctgcctatacacaagcccttccaattcattttctacactgccatctattgacctttctaaatcacaaaattttatcaaagcattctcttgcttagaatcctactgcagttcccccaaagccttccttactgagtgaaggctcagtagcatagcatgcaagactatccatcagctaacctgtgtctcccactctggctaccatctccttaccatcaccctccgcatacttactccatgctactcaactaattgtggtccatcaatgtgcctgccctctggacctttgcatatatcgtttcttctatataggatacattcttactttttatttgcttaactctcacttgttgtcaagaactcatacagatgttacatcttcctgaacagtcccagtactcaaatacccagtctgggctggtgctctttctctttatttttataacaccttgtgcatgcctttcatgaaaatgtaatcatctgttctcttttctgtcttcctactagacccccggcttccagtgatcttgagggaagggacagattcttttcatcattatgccccagaaagtggctagcacagtatctgtcacaatacatctgttgaatgaatgaagtaattaatagcaatacttgccggagtatatccctgtgatatggacaggagacaggaaaatactgggtagaagagagtggttccctggcaaaggccccacccttaagcctggaaacctgtggccctaaacaaatgttcttaaagaaactgaaaaaatgaatttttaattaatttcattctaactctaaacagtcacatgtcgctaccatactggacagctcagacctaggtatcaactggactaatgaagtggtttcctaacttaaacttaaattgtaataaaaaatttaaaacgtttttatgaacttccaataggatcgcagtattacttttagtacctgtcacctctgtaaaactcctgaattataactcatctacacacatttgaaaaacagcagtatctgtatgtgtgagatatgactggttctaaatgatgcctggagaccccatggacttacagagacccttccagtgatttctgaggtacctgggaatctgtggccaataaattggtaatcactgaattagtgagttttttaagaatatcaggctgcataaaatctgacagcttgattgaaaaaaagcgggaaagggtgccatttcattcaattaaggtcctgtattaattccgtttaataaatgtttggtctatctatgatgtgctagccactgtgccagtgaatggatatagctatgatctgacttgcagaggaaatccaaactagtaccttccgtgcaataagggatacactgcaaggctgcacagggtgctactggagcacagaagtgagtcagaggcttcccacagacacacaacacgagcggaaacagaaagtctttatatatcaccataacgtcaaggaacaccggctgggagttaggagagctgggcactaggaacgctttgaaactgaatagctgtgggatttccgaggttatgttgcttctctactatattttagttccgaagctgtactaatgtttctctttcttttgctcttggtgggaaaagcacaatttggggtcaacagattcggctcaggtccgagtcgcctgctgggaccacgtcgccaggaaacgacgtctcccggacaccttccctccccgtcaggctctctgcagggattcaccccgttccctctcccaacgactcccgggcacgcctccgttaaaggtgaaatatgctgctcctggggagcaaagataacccggaggaccagggaaggaccttcccacgcgcacgactcgcgatcttcccagtgccccagagccagggaccccactgccgcctaccccagccgcagcaccgaacctgttcacaattgcgactcctcaggtccgcttccacaccgccggaaacggaaattcaccgtcgcgccgactcgcggggagggaaacaaaaaggcagaaaaaagagaccggcgcctggacgacttccaggggagagctggaagactagtcaacagctgtgtgcgggcgccggcgccgtctgcgcagtgcgttccaccgggtccgcatccctcccgattccgccccaccctgccctcggaatccgctgcctcaactcccgcggtgggactccggagcagcgtacaccgccctcgccttagtcctccgcgaaggccagggcagctgtgcggcctgccgcggattagttggtgcggtgcaaaagccagaaggagacacatttggtcctggccaccccggagtcaccgtgcccgggacaaatggactatggctcgactgggagtcgacttccttctctttaaagatgacagatgagggagatctcaggttctgggggtgccctaaagccctcttttggcaggaagcggtggctcatgcctgtaatcccagccctttgggaggctgaggcgggaggatcgcttgagcccaggagttcaagaccagcctgggcaacttagggagatacccccgcccaccgtctcgcaggaaaaaaaagaaaggaagaaaattagccaggcacggtggctcacgcctgtaatcccagtattttgggagtccaaggcaggaggattgcttgagcccagcagttcaagaccagcctgggcaacacagggaggctacctctctctcaatcaatcaatcaatcaatcaatgccagcgtcgtggcgggcgcctgtggtccctgtggtcccagctactctggaggctgaggcggaacgatcgcttgagccttggaggcggaggttgcagtgagctgagatcgagccactgcactccagcctgggcgacagagcaagacactgtctcaaagaaaaataaataaataaaataaggccctctttttccaggaccaacagactctgatggcagggacaaactgacccagcctaaactgcctcgccttccctgctcccgggaaaggggctttccctgagggaaggtagcatcttgccattttcttcctgcacagctttgccttcccagggatcggcccattgccacctgaggaaatgccttggagtccatctaacccacagcccaggtacttgggacgcctacagagcctacattgtcagaggatgcatcttcttctagtcttggaggggttcctttcaataagatcccaccagtgcactcaaggctcaattctacaccaaaaaactaggcccactcctgtcaccgagacccccaggcttcaggtcctgtcacagtgaccttgttttcgcccccagcagcccccaggtattcactctgcataggctatatactgggtgctaaacaagagaggctacccacgtggtgcatgcttcccttatctgtgaagagcttaggatgttgtaacttcttcacactatgcctcttacttcatggagatgtcagtatccgggtagataatccttccaacatccttttgatctcatgaagcccactcctgtcctctgccctacctcagcttccccctccctccatgatcagaccttagaccttgtcaggtccaaggactgcaaaccccacagtagcccactctgaccaccacctcctagctatccaggttactccctatactgccctgaaacaaaattcttgcaaccttaccagtacctccaatccagatcttactaccttttcactgtttcttccttcctttatgacttttccctctctagtgagcgagcttaaactccatggccaaccattctcattggtcccttgcacacctcctcaactcacccacctccctgtcacctcctatctgcttagtaagatgggagccctggataaactcagctctccatctattccatgccacaacgatgcaactaaacatggctggaagaaaacaggaccatgccagcagtcctcactttaatcattctttttccggtctattcaatctccca

SEQ ID NO: 913397 - DNA, 4001 bp, Homo sapiens
tgggggagcagccagtaggttagaggttcatctaccacagaaggacgtccatagggaatgcagaatttctttatttctttatttatttattttatttatttttgagacggagtctcactctgtcgcccaggctggagtgcaatggcatgatctcagctcactacaacctctgcctatcaggttcaagtgattctcctgcctcagcctccccagtagctgagattacaggtgcccgccactatgcttggctaatttttgtatttttatttatttattttgagacagagttttgctcttgtcacccaggctggagtgcaatggcccaatctcggcttactgcaacctctgccttccaggttcgagtgattcttctgcctcagtctcccaagtagctggaactacaggcacccgccacaatgctcggctaatttttgtatttttagtagagacggggtttcgccatgttggccaggctggtctcgaactcctgacttcaagtgatccacctgcctcggcctcccaaagtgctggcattacaggcatgagagactgcgcaacagcccaaaacctaaatgttttggtcgcggtacaccacacatccagaatttgaggtcagaatgttaaaattgtctaaagctcctacggttcgcctctggtgctgctggaatggcagtattgttttggatccaacacattcagcttattcattacactgggaataaaaaacatcagcagaacttatttggggagaaatatattaaataaaaaatgacaatgtcaaaaataccagtgaacctcaaaagttgcggattcattagtttaaaatgtgcctttcttctacagatgcattccataacaaacgatgcagaagacatgctcagaagtgatgccatgaacagaaatattaaaatatgtgtttaaataagcttctgccgttagctattcactgcttactcaattaagctaatcaaatgcagatcacagtgtcagggtcaaagtcttgtgcttgcctggactggaatgccaagtaaaaacacatgcttattagatacctttgatcatgtcaaaggtggttattttgcaaagtcaattaaaatatctttgccttgctatgactgcaacttcctcttcagctaaatttacccttaagacttttccctcttaggtgcactactgtttttaccaggatgaatatgctttagattttttttttctttttaggctttcatagtgcttccgtcgctcatttcagtgaccatattattgcttcataggcagcaaaaaaatttgcttccccaaagagtgtccttccctcaaatccatttcattcttgggctgctcggattttggtaaagtaggctgcgaactgggatggcacttttcggagtgtgccggggtgccccaaggccaccttcactggagcggagtcggggtcacgcggacgcctctgcaggatgctcggacactgcgccacggcctcacccgcgccagtggaggggggtttagctcttaccgtgggctcgcgcctggcttccccgagagggagcaccgtgggcgtttcccaggctctcccccgccactgggcaacggccccgcacgcgtcccgcaccttccccagggcgcgcggcgctcggtgggtttgcggttgcgaaaccccacacctggcgagccgcacggactgcaaccccgcagtgcgctggcctgggacaaggcaccagacatgagagcccgtctgggatgcgcggcaccactgggaccctgctttcaccgcggcccaccccgccaaacgcccccgcccacggagccagcgcggggcgcgccaccacctccccggcgcaggccatcggatacgcggccggcctcaggagccggcgccgctgcctcgctctgacctccgcggcgcccgcacgtacccacgtcgcccaggaagcagccgtccgccgcccggggctccatgcggctcaccggcggccgcgcggcgactctgggcgccgggacctgggccgggccgcgcggggccgctgggcggggccagtctgcgctgggccgcgcgtcgtcccgaggcgaccgagccgggagttgtagttcccgccgccttggcgaggttcccggaggcgctgtccctgggtccggactccgctgtcgctgcccaccccgcttcgcccgtcgcgccgaggagtgtgtgtgcttgcatctgcaaaccgtgcgtcccgtgcacagaatacgtccggtgcaaaacgtgtcctgtgcacttgtcctatgtaaacgtgtgtgtccgtgtgcaaaacatgcatcctgtgcatatgtcctgtgcaaaacatgcgtccgtgtgtaaacttgtatccattgtaagcatgcttccctgtgtccctttgcaaagcatggatatgtgtttccatgtgcaaaacatgtgtcctgtacaaaacatgcatcctgtgcatgtgtcctgtgcaagcgtgtcctgtgcaagcgtgtgcaaaacatgtgtccatgtataaacatgtatgtattgcaaatgtgtcctgtgcaagcatgtgtctgtgtccacgtgcaaagcatgcgtctagcttccagagttcacttgcattgtacagatgctgatgatgctccagagtactcgagttcccccatgctttaactttcaagaaccgcttcccaccagagccggtgttcataatcactgtttctttgatctttcaagataataatttcaaatcgttcaaatcaatttcttaatgccttttctttacgggtggtttttaatccaatgttcccctaagctgcttagcaaatggaagctggggcacaacctggcagaaatgaaaaacctgtttcctgtttccggaataatacccagtcaacaattgagtaagggatttttattttatttatttatttttgcaaagcagcttcccaagtttagaaggtttaaccttgtgaaagttcactgtagccctgtcaggagattcgtcactcacctgacctgtactgaacctccatgcagaagttagtttgggctcaaaagtaaaagtatcaggaatcatccagtctggaaataggtgaggcctggcagagcagccagtttgatctctcacactacaaagcttctgggatgacccaggtctccatctgcagtccagaccgaaggcactatacctaggggacattgaaccatatcttttggaaagcagagcccctggaaatgtggagccccaggcctgggaatggaatttcaagccatttgcactgggcatttagagcctttttgccactttctaccaaaatcaggctcctgcatttttcttgccggttttctgcactttttactaaatgtaacagatttttgtatcgttatatttaccatggatgttatgttttcccctgtggcaatgtcgtgtttgtatgattgcattttcttcaatatttcttcctggacgaagtgtcatctaaattttagtatgatcatgtagaacatatatatatatgtgtgtgtgtatatattcatatgtgtatgtgtgttatccaagtgtttcctaaacatattaataagcaagtatttgcttattatttgtttttcctccattctgttgcttgaccaaaatattaaaagatttcattacagaaaaagctttgcaaagtttacatatatattcagaaatgcattccctgaaagtatttcctttttcttcaatatttagaatgtatttccccagcaagagccagaaaatataaattattctgttctgttctgttgttgttgctaagtctttgagtcccatctggaattcactgcaatgtgtagaatgaaaatataggagctcagttcattcttttctaaactgaaatagagtttttccaaaaatattcattaaatagtaatccacttatctatttttgtgttaatctctttttattgcatgttggttccaattaccttttgaatctattgtaagaacctctatgatattgacaaagtttctattactcatttagcaaatatt

SEQ ID NO: 913398 - DNA, 4001 bp, Homo sapiens
tgggaggttgaggaaggaggactgcttgagcccaagagtttgaaaccagcctgggcaacatggcgaaaccctgtctctcaaaaaacaacaacaacaacaaaaaaaagagagattaaaaataaaaggcattataaatgcccgtatataaacacagcctgtccatggctttgaaagagagaataaaggtctctttattactttaacctaatgagtaaaatgcaaacttcagtggttatctaaccatttgcacaatatctctttttttttttttttttttttttttgagacggtgtattgctcttgttgcccaggctggagtgcaatgacacaatctcagctcactgcaacctctgcctcccgggtttaagcgattctcctgcctcagccttcccagttgctggaattacaggcccctgccaccacccccggctaattttttgtatttttagtagagatggggtttcgtcatgttggccaggctggtctggaactcctggcctcaggtgatccacccgcctcagtctcccaaagtgctgggattacaggcgtgagccactgcgcccagcaaactctttctatctagcaagataattaagacaatgagggatatttaatacacttaaccatccagaaaaaaaaaagcccctaagtacttttagaggtgctagaaattcataccaaacaatcagttccagttgtctgttaaagcacagttaaaataacaacttaaccaatatggttctcagaccaacatactgctgaaggggggaatccaatttccacaggccactgcccaacaaaatgcacatcgctcactgcgaagccaagcttctggtcacatcacttaatgaatcaataatttaggaaacaaaggttccttacaggctagctgaggttaaattcaaccaatattcctaccacgtacagcttagatagtcttgaagcccaaaatacttaaaagttccaaagaaaacaagttgatccttactaaatacactaatgttcaagccaacgtgggcgcggtggctcacgtctgtaatcccagcactttaggaggccgaggcggatcatctgaggccaggagttcgagaccagccaggccaacatgatgaaaccccgtctctactgaaaatacagaaagtagccgggtgtggtggcgggcgcctgtagtcccaactactgggaaagctgaggcacgagaatggcttaagcctgagaggcggaggttgcagtgagctgagatcgcgccactgcactccagcctgggcgacagagcgagacttcgtctcaaaaaaataaataaaataataattgatgagttgtgcgcttacagaaccaagaagaggtttcgtgagaaataacaacacagaaggtaaaccgacatggatggaggaaaagggcacatcattagcaatactcgatgacatcacaacccagtggcctattccccgaggcctctaaagttctcaacgaaaaaagactttcaaaggaaaagcttaaaaaaaaaatgttccccacaaaaacagactaagatgaaagtcgggccctcagaccacgagctccggaagaacaggcagttgtcgcggagacagcaaatgcagcatctacctgtcctacatggccctgcgctacgagactgctcggaaggaaagagaggaataaccaacttaaccctgcttcgaggtggtttggagaggaagaggaaagctgtgtctttctgcaatatcgtgagggaagccgaggccctgaatcatcaaagagaaggagaagaggactaggcggctgcaggtaaaccaaggtagggcgaggaggaggacccggaattcctctacgcgagcgcgttctctgctcccctcctcgcgtctccgccccggccacgcccaccacggcacgggcgcgcgcacgccgccttcgccgctggctccgtctgttggggggcgaacacgccgcggtcctcgtcgtggtgagcgcagccactcaggctggtcctgggggtggggctgtaggggaaagtgctaaagccgctgaggtaagaggccgaggggtcgagggccctcgggagcttggtgaaaagggagttaacccccaggatcctacctgcagggactagaaaaatggagaaggtaggaggagaaacaggagactgctgcagcagacgtgcgataggaaatttccccaggccgggtttgaccgagtgcgcatgcgggccgagggctggcgcctgcgcagtgggacagcgccgatggcgtagtttcctggggacccagctgggtgggaaaagtggctaggagttagcttgggagccgctggtgttctgagcgctcccctctctggccactttttctccacgcccacccccgccccgttcccgcccccccccccccccgttacagctgcggcatctatttggtttgggttgtaatccagctgttttgaagtggaacgatttgttgatgatggaatttaatgattacttgtaataatttgcctttgtactagggtaggaacttttaaggaattactctttttaagaaaataggcatatatctgttagaaaggaaaggaatttatattcataaatatatgaatgcgaggtcatccctgccgtacatgaagtaaatgtttaagcatcttagctcggacacagcaatctgtgtccacaaagcatcgttactctcctgtgaggatctccactgtcagccccaacttacctgacagggccaagtcccaggatacttcatcatcagtatttgtttgacaaaattttactgggcacctccggtgggcctggcaaactggttgaagatagagttgtgcgaatagatctgcacaatgagaaagaaaaaaatccataatgatccaatactcatgacacagcgcttctctatctcctgcatgacctttgctgagctgctcgccctgcgttctgtcgtttgttcatcattcattcatccgaaatgctcgggactggaagcacagtggaaacactgccccaggttctgtgctcggcattgagggtagaaagacttttcgaaggtggcagggtgtttcttaagatcattgaaccttaaaatgaaagtgtaggccgggcgcggtggctcacgtctgtaatcctagcactttgggaggccgaggcgggcggatcacgaggtcaggagatcgagaccatcctggctaacacggtgaaaccccgtctctcctaaaaaatacaaaaaattagccgggtgtggtggcgggcgcctgtagtcccagctactcgggaggctgaggcgggagaatggcgtgaacccaggaggcagagcttgcagtgagccgagatcgcgccactgcacttcagcctgggtgacagcgagaatccgtctcaaaaaaaaaaaaaaaaggaaagtgtaaagtgcttaatagaaggcactggccctcctcctgaacagattctttctcctgtgggagcttgctgactctgttagatggagagaattaatacttttcccatgaggttttttcatagtaagtatgaaaacctgggatctgcataggaaaaaagactcagtagtaactctccgttaatgactttgaatagccaagatttatgaagtgtttactaagcctgtaactgttccaagtgttttacgtgtattaactaatctttgtcacacctgtgtgaggtaggtgccgttattacaggttgagtatccttaatccagaaatccaaaatcctccaaaatttaaaactttttgagcactgacaggatggtcaaaggaaatgctaattggagcattttgaattttagattttcggatttgagaggcttaatcattaagtataatgcaaatatcccaaaacctgaaaaaaaaatccgaaatccagaatacttccaagtcccaagcatttcggatgaagggtactcaacctgtttcccattttgcagataagacaactaaggaacaaaaagatcccggagggggaggcggaggttgcagtgagccaagatcgtgccattgca

SEQ ID NO: 913399 - DNA, 4001 bp, Homo sapiens
ctcagctcactgcaacctctgcctcccgggtttaagcgattctcctgcctcagccttcccagttgctggaattacaggcccctgccaccacccccggctaattttttgtatttttagtagagatggggtttcgtcatgttggccaggctggtctggaactcctggcctcaggtgatccacccgcctcagtctcccaaagtgctgggattacaggcgtgagccactgcgcccagcaaactctttctatctagcaagataattaagacaatgagggatatttaatacacttaaccatccagaaaaaaaaaagcccctaagtacttttagaggtgctagaaattcataccaaacaatcagttccagttgtctgttaaagcacagttaaaataacaacttaaccaatatggttctcagaccaacatactgctgaaggggggaatccaatttccacaggccactgcccaacaaaatgcacatcgctcactgcgaagccaagcttctggtcacatcacttaatgaatcaataatttaggaaacaaaggttccttacaggctagctgaggttaaattcaaccaatattcctaccacgtacagcttagatagtcttgaagcccaaaatacttaaaagttccaaagaaaacaagttgatccttactaaatacactaatgttcaagccaacgtgggcgcggtggctcacgtctgtaatcccagcactttaggaggccgaggcggatcatctgaggccaggagttcgagaccagccaggccaacatgatgaaaccccgtctctactgaaaatacagaaagtagccgggtgtggtggcgggcgcctgtagtcccaactactgggaaagctgaggcacgagaatggcttaagcctgagaggcggaggttgcagtgagctgagatcgcgccactgcactccagcctgggcgacagagcgagacttcgtctcaaaaaaataaataaaataataattgatgagttgtgcgcttacagaaccaagaagaggtttcgtgagaaataacaacacagaaggtaaaccgacatggatggaggaaaagggcacatcattagcaatactcgatgacatcacaacccagtggcctattccccgaggcctctaaagttctcaacgaaaaaagactttcaaaggaaaagcttaaaaaaaaaatgttccccacaaaaacagactaagatgaaagtcgggccctcagaccacgagctccggaagaacaggcagttgtcgcggagacagcaaatgcagcatctacctgtcctacatggccctgcgctacgagactgctcggaaggaaagagaggaataaccaacttaaccctgcttcgaggtggtttggagaggaagaggaaagctgtgtctttctgcaatatcgtgagggaagccgaggccctgaatcatcaaagagaaggagaagaggactaggcggctgcaggtaaaccaaggtagggcgaggaggaggacccggaattcctctacgcgagcgcgttctctgctcccctcctcgcgtctccgccccggccacgcccaccacggcacgggcgcgcgcacgccgccttcgccgctggctccgtctgttggggggcgaacacgccgcggtcctcgtcgtggtgagcgcagccactcaggctggtcctgggggtggggctgtaggggaaagtgctaaagccgctgaggtaagaggccgaggggtcgagggccctcgggagcttggtgaaaagggagttaacccccaggatcctacctgcagggactagaaaaatggagaaggtaggaggagaaacaggagactgctgcagcagacgtgcgataggaaatttccccaggccgggtttgaccgagtgcgcatgcgggccgagggctggcgcctgcgcagtgggacagcgccgatggcgtagtttcctggggacccagctgggtgggaaaagtggctaggagttagcttgggagccgctggtgttctgagcgctcccctctctggccactttttctccacgcccacccccgccccgttcccgcccccccccccccccgttacagctgcggcatctatttggtttgggttgtaatccagctgttttgaagtggaacgatttgttgatgatggaatttaatgattacttgtaataatttgcctttgtactagggtaggaacttttaaggaattactctttttaagaaaataggcatatatctgttagaaaggaaaggaatttatattcataaatatatgaatgcgaggtcatccctgccgtacatgaagtaaatgtttaagcatcttagctcggacacagcaatctgtgtccacaaagcatcgttactctcctgtgaggatctccactgtcagccccaacttacctgacagggccaagtcccaggatacttcatcatcagtatttgtttgacaaaattttactgggcacctccggtgggcctggcaaactggttgaagatagagttgtgcgaatagatctgcacaatgagaaagaaaaaaatccataatgatccaatactcatgacacagcgcttctctatctcctgcatgacctttgctgagctgctcgccctgcgttctgtcgtttgttcatcattcattcatccgaaatgctcgggactggaagcacagtggaaacactgccccaggttctgtgctcggcattgagggtagaaagacttttcgaaggtggcagggtgtttcttaagatcattgaaccttaaaatgaaagtgtaggccgggcgcggtggctcacgtctgtaatcctagcactttgggaggccgaggcgggcggatcacgaggtcaggagatcgagaccatcctggctaacacggtgaaaccccgtctctcctaaaaaatacaaaaaattagccgggtgtggtggcgggcgcctgtagtcccagctactcgggaggctgaggcgggagaatggcgtgaacccaggaggcagagcttgcagtgagccgagatcgcgccactgcacttcagcctgggtgacagcgagaatccgtctcaaaaaaaaaaaaaaaaggaaagtgtaaagtgcttaatagaaggcactggccctcctcctgaacagattctttctcctgtgggagcttgctgactctgttagatggagagaattaatacttttcccatgaggttttttcatagtaagtatgaaaacctgggatctgcataggaaaaaagactcagtagtaactctccgttaatgactttgaatagccaagatttatgaagtgtttactaagcctgtaactgttccaagtgttttacgtgtattaactaatctttgtcacacctgtgtgaggtaggtgccgttattacaggttgagtatccttaatccagaaatccaaaatcctccaaaatttaaaactttttgagcactgacaggatggtcaaaggaaatgctaattggagcattttgaattttagattttcggatttgagaggcttaatcattaagtataatgcaaatatcccaaaacctgaaaaaaaaatccgaaatccagaatacttccaagtcccaagcatttcggatgaagggtactcaacctgtttcccattttgcagataagacaactaaggaacaaaaagatcccggagggggaggcggaggttgcagtgagccaagatcgtgccattgcactctagcctgggcaacaagagtgaaactctgtctcaaaaaaaaaaaaaaaaaaaaatatatatatatatatatatatatatatatatatatatatatatatatatatatgccggaggttgcaattttttacatttttggcatcagaccttggcgatgaccttgagcagtagggtataaataactcccacatgcttagcgttccagtaatggaacactaggcataaatgggttaaatgatgtgtccacagtcatgcagcaagtaagtagcaaaaccagaactcagagaggcttcataatcttacccattatgctgctttacgttgcacatgac

SEQ ID NO: 913400 - DNA, 4001 bp, Homo sapiens
ttatctacctttataactgtcacacacaaaacagacgtttataattgccacacacaaaacagaggctattcaaaaattatgttcaacagataaattgtaactgaaggaaatctcccattcaatcattgcaacagtcacttctgaaggatttccaaaaggttccacatttctccactaggagccattcacttcacaataattagatttaatttaaacttaacaactaaataattgaaagccttcattttggaggaagaaactttggcctagggatggtaaatgatttaattcattcaatttgcatttactgaacatctatatatgacgcccactatatattggatatacaataattgttaagatatcaccacttcattcaaagaacacactgtccggctattatattaattataaagaaagcaaaagaagccaaaaaggagaaggcacctaactgaaatctctcttcatggaacaaaccaaagtgtgctatcttccatcagcatggattccaaaaaaaacgggttacacaatatttcacttctcataggaagtaaaaaactgacttttctagtctttattccacaaagttgaaaatgcagttgaaacgtgttatatcactacgtggggtatactcacagaggaaaataatttagacaagataagggttttattaacctaatctgtgaaaagcggtggcattccagtaaaacgttttcgttttagagttggtagtgataaaactaccaaccaagtcatctactggatattcattgaactacatgaacaaattagggctgttatgaacacatcccagtcatcaagatagtaacaacttttaatcccataaaaggtcaacacacaaaacccgtttatatccttcccaattctgaaatttttaatgtaataaagacttaggtctactaaggccacttgtaaaatagtagtctacctttttaaattacttcaaaatccttcaatgaaactgaaacttgttttgtagactgtaactatatatactttattgtacactcatgtatcattcatttggtattgatatacctaaaatgtaaggctgttacagcagcaataccatcaccagcgaacatacaataaaagctgcatgcgcatacaacagcagggagcgtatttcaatcctgtataaacattaggttcaacaaaatgaatacacaaatatgtacatatacgatgatagtgctgtatgcaactaagaaacatcctaaaacactataacctagagttatttgttaggcaaatatggtatcaggtcgtttcattttaagttctccatttccgagtggaaaaccgtgaaatcgtactacctcatctatgagcaatttattgacatgtatagcattcatagcatagcattcactgtagtatttctctcctaattcattgcagtatttcacaaatcgtttctcaaactcaaaagtcccagttttgcaggcataaaggccctacgaatacagcctatgacaatgaaggcctgccaatcttcacaaagagggcaggttattattaacatcaccatcttttgtgaaagcgtgcccggccctgaagaaccaccttcgattttgcacaaggtggtggccgcgcctgtgcgacaatcagacctggttcattccagccgccttcgtctaggttcgcctggttctgaagtcttccgggacgacctcaaacccccacagtgaccaggatgccgacaaagattccctcgggaatggcacgagtcttggggaagagctaagcagaccctaagggcccaggccgggccggacgccaaggcgaggcccgggacgcccttggaggttaatcctctagatactaagggctgcggggcgcttgggggcggcactgaggtagggcgtgggagaagaccggggtgacctttcctccgggggttcccaggtccgagacggtccttaaaggacctcagaaggatacgacaaccatcccatgaggccccacgggaaccagctactcacccaggggcagaaacagcaagagcaagtgccctcagccggcctcacacaggaaggaaacgcaacctgggagagaacgcttccggcgggaggcgcggcgcactccctcccacggagcatgcgcgacccgcggtcgccggcgcggagggggcgtgctcccaggcttagaaacagtgagggagagcaaattcgcgcacctgatgtctgcttaagctacctgctagactgagactttctgcgaagccggcgtgtctgcgagcagcactcgctaaggctctgcgtttaacagacactacctttgggaaggcgcttatcacaaaaagtccctgcccttctcgcgggctcggggcgcaaccctgacaaatcgggcagccttcttgagagtgcagaaatgctctgcgtacccagcaaatacattctctccttcccaccactctgtgcaaaccctcacgccgcggctttgtgtctgtactttagccaaaacgcagaagcttatggccaccctccactcctcacccctcatccctcaccacctgcctttcaattctcgggtgagctcacccttctcccccatctctgtgctgacaaacacctcggggtggcgcctgacaatctttccgcgaaaagatttagcagcccacgccaccagactcggtagttaggacggaatagggcatctggtaacagattttgcattttggtgatttccctttttctttcaccccttttcctttccagaacgagcgacgtgacacaagaggtcccaagggagcaaacctgaaagccagagcctcctgaatacacaaactgccggtgggccagatgacattagacactcctgagatacgagaagcatcacttccttcagacagagtcggtgagactatgatgtaatgagagttctccctgtgttcctcaggaaggcagcttgtgcctttctacttgaggcatcatctttgatggctaaagaattctgcagcttggccagcgcggtggcttacgcctgtaatcccaacactttgggaggccgaagcgagaggatcacttgaggtcaggaattcgagaccagcctggacaacataatgagaaatcgtctctacaaaaaaaaaaaaaaaaaaaaaaaaaaaaccacctaaaaattagctggatttggtggcgcatgtctgtagtcccagctacttgggaggctgaggtgggagaatcgcttgagcgtgggagatcacggctgcagtgatcaagccactccactccagcctgggcgacagagcaagcccctgtctcaataataataacaattttgcagcctgattgttaacgaatgttactagttacaaacttgtaataatgtggtgaagataatacctagttaatgtctgctggggtggggcaataagcttctatgtgctttacatgcataacctaaatatctcccccaaaatcctctaaaatagctatcattttctccgtttttacaaatgagcaaattttaaagcttaaaccttagagaaacttttctaagttcatatacttgggaaataaaggcaacaatttcattggaacataggtctgtctaattcataccttgtactttacgttttctctttgagatggtaatttaataccagctaaactttaaaatctagttgaaagtaagaccatgaaatgccaaaatcacaaggctttaaaggatgggatgaaagggatgcatgaatgttgaaaactatgattaagttcatggacaggaatcagaatggaattgaatacacccgtgcctgtttagtatttaaggctttatatacgtgcatgcctacattcctaatttaaaaaaaaaatggatgtgaagctaggtttgggattactagactatttagagagatagacctttgagaagaacggaaagattatgagacgaggacaatgttcattaaaaacaaacaacaacaacaacaacaaaaaacagaggctatcagtgctcagcagactttcaagagactctcc

SEQ ID NO: 913401 - DNA, 4001 bp, Homo sapiens
ccggccgtggtggcgggcacctgtaatcacagctactcgggaggctgaggcaggagaatccctttaacctgggaggtggaggttgcagtgagcaaagattgtgccactgaactccagcctgggcaacaaaagtgaaactgtgtctcaaaataaataaataaataaatggatttttcccttttgtaaacagtaaatcacatcagagatatgacaggcttgatagagcagaatatagtgggaaaagcatggcactggagtccaacagaaatatcccgacacctggcaggcactcactcacactaaggagttacccaataagcctcaatttcatcatctgtaaataaaaaaataaaactcacctaccaagtaagtagatgccccataataaagagtattaaaattaaaatcgagatactagaaattgatgattattttctcttgatggaaaggttgcaggcaggtttcttcgacaaaacgtgaaatacaagacatttatgttagccaattttctcttatcacaattattggaaaaaaataagtaatgacctattaaaatattaattttaggcacgtttaatgtaacttattgatttgataaatattatagccaaaatacaaaaattctgaaaaagagaaggtagaaatccacaatactctaaggccatattaccactgtcacgatttggtgtacttccgggccttcttcctttcagaactgtaatcatgtcgcataagccatttgcatcctgttgattttctccgtttaagtccaaactggaagcatttttccatttagtcttcataatcctcacttctaacgattgcataactgtctactcaaaaccgctgcccacaagtagcacttaataaacacttttaatgaaggagcaaatgcacacaccgttatcgaccaaatcattccccacttacacctttttcatggaaaatgcctgtgtgttttcatgcgaatctcgttttccacaaagctagactgttctattaaaataatagagtctacattctatattggcaaatgcatggcaagagaggaaataaacacgatgttttgtttaccagcaacaaatctcccccaaagaaatctgaatcacgatggaaaaacaaaacaaacttgtgggctggctttgctgtcgtccgggtgggtggaggaaagacacggcatataagcaaatggtaaaaatttcaaacagatcaggacaaacagaatccctcgccggtagcgaccgcggtcaccagtttcttgtcctttttttttttaactttttttttttttaacccagagatgcaaagggctcatccttcctgtacattcgtccagggaagtctgattcatacatgaccggcacctgtgtgcacacccacagctccctctgcaccgcgtttcgccctcgctcccgggacgctcccaccgcagcacccaccggtcagccccggccattaactacggctctggggcgttccctggcactgcgcgccgtccttcacctcacacaatctaccccagacgggcgtccgtctcccgactctggggagaccaccacgatttcgagagtacgggcaccggttaggattttcctgcagaacaggcaccgcgaagctgccccgctaagccggcgccgcggccctcccgagagtgccccctccgtctcggccgtggcactggggccaggggctccggccccctcgcgtcctcgctgggggaccctgggatcccgagacccgggcgcccggcttcccacgcccgccggcccggctcgctcaccattggagcggctgcccgactcgttcttgcagtagccgcagcggtagaagtcctcgctagggaaatagtccacgacgctgggcgaaccccccgcccagaaagccatggcctcggccccgcgaacgctcagccgcccggccccgcgtcgctagcgcggccgccgccgccaccccacaatgcagcgcgccgcccgggagcctcccgaggctcgcgcgaagccactcgggcgcccgcaggcccggccggcccggcgcctcttggagctgacgccgcccgcgccatcttgaccgagggcagctttccactatttccgttccttctccataaggggccgccgtcgtcagtgagggtgaggcggagagacagagcgggaagggaaacaggatggggagagtcaagaggggaagggaagcgggagtcggggtgcgagcctgccctttcccccgccgagggcctgtgcggggcgcggcggccgcgccaactccggcgtcgggaacactcaccgcaggacgctttgccctccttggaatcgcagtagccgcagtggtagccggccctgaggcccttgtattccaccaccgacgccatggccgccgcgagggtccgctcgggccgaccacgcctcttggcgcccggggccgacctcggcgaagcgctggggcccgcggcgggaggggtggagagcgaagcctggcgcggggacccgtgggcggggatggtggtcgtgtccccaagccctgcgtttgggccggtgcttcccacagctgtgcgttatcagccccatttcacaggtaaggaaactgaggaccggaggttgtgattatcccaaagtcattcccggcgggtctcggattgaaagtcaggccgcccctggccaccgtgtaagtgacttgctggagctgcttccagaccagctggcacgcactccagtgccctgaatacaagaacacaagcaggtattccgtgaatggcgagggttcgcaaattaaagaactcttaacggcttttaaaggaaacaactgtcagctagagacagttgctgtcttgtaccactataagtccggtgcctcatacgatttttaatgagatgctggaaatacagggtttgtttgttttttttaactctacagtccaaacaaaacagttttacaggctgaatccagcccatgggcctccattttgcaaccactattttaaggaagatttaaggaataagagtctagggcaaaatataaaattgaggctcatgcctgtaatcccagcactttgggaggccgaggcgggcgtatcatgaggtcaggagattgagaccatcctggctaacacgtgaaaccccgtctctactaaaaatacaaaaaatcagcctggcgtggtggtgggcgcctgtagtcccagctagtcgggaggctgaggcaggagaatggtgtgaacccgggaggcggagcttgcagtgagccgagatcacgccgctgcactccagcctgtgtgacagagcaagactccatctcaaaaaaattttttaaaaaatgagttccaggggcgggcgcggtggctcacgcctgtaatcccagcactttgggaggccgaggcgggtggatcacgaggtcaggagataagagaccatcctggctaacatggtgaaaccccttctctactaaaaaatacaaaaaattagcgggacgtggtggcacgcgcctgtagtcccagctactcgggaggctgaggcaggagaatggcgtgaacccgggaggcagagcttgcagtgagcagagatcgcgtcactgcactccagcctgggcgaaagagcgagactccatctcaaaaaaaaaaaaaaagagttccaacaaggtaatatgccttatctttccctctgcgtgcacagataatttaagcctgtctgtcctcatagttttcccagtcaacaataaagctgatgatacaatattgttttaagtgtgtttaaaaaagtgaaatgaaactcagagaaatagaaataaatttttgaggtgagttttgacattcttgaccccaagggcctgtgttagatatgtacctagctgaaggaggtttcttggtggcctggtgacttgttgaagggggccagcccctccacacctgtgggtgtttctcgtcaggtgggacgagagactgagaaaaaaagtaagacacagagacaaagtgtagagaacagtgggcccagaggaccagggctcagcatacg

SEQ ID NO: 913402 - DNA, 4001 bp, Homo sapiens
tttgcatcctgttgattttctccgtttaagtccaaactggaagcatttttccatttagtcttcataatcctcacttctaacgattgcataactgtctactcaaaaccgctgcccacaagtagcacttaataaacacttttaatgaaggagcaaatgcacacaccgttatcgaccaaatcattccccacttacacctttttcatggaaaatgcctgtgtgttttcatgcgaatctcgttttccacaaagctagactgttctattaaaataatagagtctacattctatattggcaaatgcatggcaagagaggaaataaacacgatgttttgtttaccagcaacaaatctcccccaaagaaatctgaatcacgatggaaaaacaaaacaaacttgtgggctggctttgctgtcgtccgggtgggtggaggaaagacacggcatataagcaaatggtaaaaatttcaaacagatcaggacaaacagaatccctcgccggtagcgaccgcggtcaccagtttcttgtcctttttttttttaactttttttttttttaacccagagatgcaaagggctcatccttcctgtacattcgtccagggaagtctgattcatacatgaccggcacctgtgtgcacacccacagctccctctgcaccgcgtttcgccctcgctcccgggacgctcccaccgcagcacccaccggtcagccccggccattaactacggctctggggcgttccctggcactgcgcgccgtccttcacctcacacaatctaccccagacgggcgtccgtctcccgactctggggagaccaccacgatttcgagagtacgggcaccggttaggattttcctgcagaacaggcaccgcgaagctgccccgctaagccggcgccgcggccctcccgagagtgccccctccgtctcggccgtggcactggggccaggggctccggccccctcgcgtcctcgctgggggaccctgggatcccgagacccgggcgcccggcttcccacgcccgccggcccggctcgctcaccattggagcggctgcccgactcgttcttgcagtagccgcagcggtagaagtcctcgctagggaaatagtccacgacgctgggcgaaccccccgcccagaaagccatggcctcggccccgcgaacgctcagccgcccggccccgcgtcgctagcgcggccgccgccgccaccccacaatgcagcgcgccgcccgggagcctcccgaggctcgcgcgaagccactcgggcgcccgcaggcccggccggcccggcgcctcttggagctgacgccgcccgcgccatcttgaccgagggcagctttccactatttccgttccttctccataaggggccgccgtcgtcagtgagggtgaggcggagagacagagcgggaagggaaacaggatggggagagtcaagaggggaagggaagcgggagtcggggtgcgagcctgccctttcccccgccgagggcctgtgcggggcgcggcggccgcgccaactccggcgtcgggaacactcaccgcaggacgctttgccctccttggaatcgcagtagccgcagtggtagccggccctgaggcccttgtattccaccaccgacgccatggccgccgcgagggtccgctcgggccgaccacgcctcttggcgcccggggccgacctcggcgaagcgctggggcccgcggcgggaggggtggagagcgaagcctggcgcggggacccgtgggcggggatggtggtcgtgtccccaagccctgcgtttgggccggtgcttcccacagctgtgcgttatcagccccatttcacaggtaaggaaactgaggaccggaggttgtgattatcccaaagtcattcccggcgggtctcggattgaaagtcaggccgcccctggccaccgtgtaagtgacttgctggagctgcttccagaccagctggcacgcactccagtgccctgaatacaagaacacaagcaggtattccgtgaatggcgagggttcgcaaattaaagaactcttaacggcttttaaaggaaacaactgtcagctagagacagttgctgtcttgtaccactataagtccggtgcctcatacgatttttaatgagatgctggaaatacagggtttgtttgttttttttaactctacagtccaaacaaaacagttttacaggctgaatccagcccatgggcctccattttgcaaccactattttaaggaagatttaaggaataagagtctagggcaaaatataaaattgaggctcatgcctgtaatcccagcactttgggaggccgaggcgggcgtatcatgaggtcaggagattgagaccatcctggctaacacgtgaaaccccgtctctactaaaaatacaaaaaatcagcctggcgtggtggtgggcgcctgtagtcccagctagtcgggaggctgaggcaggagaatggtgtgaacccgggaggcggagcttgcagtgagccgagatcacgccgctgcactccagcctgtgtgacagagcaagactccatctcaaaaaaattttttaaaaaatgagttccaggggcgggcgcggtggctcacgcctgtaatcccagcactttgggaggccgaggcgggtggatcacgaggtcaggagataagagaccatcctggctaacatggtgaaaccccttctctactaaaaaatacaaaaaattagcgggacgtggtggcacgcgcctgtagtcccagctactcgggaggctgaggcaggagaatggcgtgaacccgggaggcagagcttgcagtgagcagagatcgcgtcactgcactccagcctgggcgaaagagcgagactccatctcaaaaaaaaaaaaaaagagttccaacaaggtaatatgccttatctttccctctgcgtgcacagataatttaagcctgtctgtcctcatagttttcccagtcaacaataaagctgatgatacaatattgttttaagtgtgtttaaaaaagtgaaatgaaactcagagaaatagaaataaatttttgaggtgagttttgacattcttgaccccaagggcctgtgttagatatgtacctagctgaaggaggtttcttggtggcctggtgacttgttgaagggggccagcccctccacacctgtgggtgtttctcgtcaggtgggacgagagactgagaaaaaaagtaagacacagagacaaagtgtagagaacagtgggcccagaggaccagggctcagcatacggaggacccgcgccagcactggtctctgagttccctcagtatttattgatcactatctctaccatctcggtgagggggatgtggcaggactatagagtaatggtggggagagggtcagcaggaaaacgtgagcaaagatctctgtgtcataagtttaaggaaaggtgctatgcctcaatgtgcacgtaggccagatttatgtctggctttacacaaacattttagtgcagtaaagagcaatattgccgccagcatgtctcacctccagccataaggcggttttctcctatctcagtaaatagaacgtatgatcgagttttacactgagacattccattcccaaggaaaagcaggagagagatgccttcctcttacctcaactgcaaagaggccttcctctttcactaatcctcctcagcacagaccctttatgggctgggggacggtcaggtctttcccttcccacgaggccatatctcaggctatcacatggggagaaaccttggacaatacctggctttcctgggcagaggtccctgtggccttccacagtgcattgtgtccctggatactcgagattagagaatatcaatgacttttaccaagcatactgtcttcaaacacatttttaacaaagcacatcctgcacagccctaaatccattaaaccttgagtcaacacagcacatgtctgtgcaggcacagggttggggctagggttacagattaacagcatctca

SEQ ID NO: 913403 - DNA, 4001 bp, Homo sapiens
atggtagtgaagcccttattgtccaacttgtactgattaaaaggaaatcacttccaaaggcaatatttttaatttctgtgttagttttagaaatatagaagtgtattcctgtatatgtgtatatatacattactgtatacatataagaataactacatatatttgggtacttgtaaggacttagtagcaatctgcttaatgtggataataaaatattgaggaactgtgtatctagttacttaaaagctaaatatttcactttaatctttttaaaaatcaacaaaaaatatacaagttgacagagaaaatgtttaaattaattacatgtactctcatcagctttttgaggaactactacaaagcggcacattcgtttattggtcggattaggtttaaacactccacatctttgctcagggaagcattctatatcatcacctccaaagagttctttagcgccatcaggaaactggcaaggtacttggcatgaaaaacaaatccacgtttttatttatattttataaaatgtatattttaataatgtgtacacagtttaaaaaaatacagagcaccgatacccatgtactgtacccagaaaaaaaaagtgtttctacttcatgcttgcacacacaatgcactaaagcaaaaacgcatttacacaacaggaaggtagctctgttgtgagcaaacacaagtaatggatactgtaacttcacccgaacaggacaaactcacaaagtttaagaaagtgattatttctctgaggactggaacagaatagcttaatcctatttttcttaagattgttttccctcaaagtagcccagaaaaggggaaagggggcattattttcacagcaatcaacccattcacaagatccattaatgaaatctacaaaatacaaaggaggaggggaaaagaaaggcaattaaatgattgcgtccataggtctgatgatgcgaataaaggtaatctgagaatcgactaattttcctcgaggattgcatccttagaatcctgggccgccggaggcttctgggctacttggggcagggccgaggctcggagcggctgccggacacccacccccgcggaggcgcgcgccctaggtggccatctggaagggctcgggctggaagccgaagagtctctggctgtacagctcgctctcgcccggcagcttcgcgcccgggaacgggaggtagtggtcgcggccgaagtgctcacagtggagacccacccagtcccgctccgagccgaatcgctcggcctcggccaggatccgggtcagagccatgatgtagctcagggccatctgcagggtctcgtacttggacagctttttatcctggccccactggggaaccaccctgcgtaagcggtcgaaggcagtgttgagcccctgcatgcggcggcgctcgcgcgcgttggccgccaggcgcctgcgcgccgcgctctccagccgcccggccccggcgcacgtgcccgcgcactcggtgccgcccgcgcacgggggtgcaacgcgcgctcccgccggcgggccgctgggcttgcaggacttcatccccggccccaagcagcgaggcgccgacctcgcacgcccgcccgctcaggacctgcgcgtgggctggtctctcgagccgcttcccaacgtgcctcttctgagcaaataagtcataaacaaagcaactcacgtgcaatcaaatagtttacagtgggggagtgcgggactcggccttctgttctactggatgaccaggctgatatctcttcacttgcccaaatttaggggaaaatgagatgctcaagagaaagtcattttctcaacatgaagttgaaaaagagaaggaaaccttctgcagcagagtttggtgtggctggttcgaggaaggcctttcaagtcctctgggaaagcctgagactcctttgcaggaagatgaactctttcccgaagctcagggaaggagcgcttttagcgcagtagctgtcggagagtgcagaatgaatcttggagggaggagaatttatagcaaagagctgaaggagggaacaggtggtggcaggtgggcgggcgtccctcggcttctatctcagcaccttcctaccctgggaactgcggggaggagggggcgacgcacagcaaaatcctgacattacagcattagtctgttgaagtttctccaaagctatgtccaacactaactaacacaccatctggagtggcctggctgtccccaaaagaataacaaggtgggggttggggcagagcttggtctatcttttcccgtatcagtgggcagcttacgtatcaaaaacttaaccgagacttgtaaattattagacatcatctgtgtgaaaatgttggtttcggcattatgagatacatcgggactgtagtataagaggatgtagctttgttgagaagtgtgacaattttgcataacgctaatctaatatactgacattttaattttagttattaagtaagttggaacaaattagcaggttccaatattattgcagacctggaattttactgtgcaaataatttggctgttttctatgaaataatgtattataacatatcaaaagatattaacgtgtatataaaactttatattattctaattatataattgggttgcttgaattcagatacttaggcaaatcaattcagtatttatacttcattccccctgacacaggttcataaatatttgtgggaaatgcactgagatgataactaatcatttaatcatttaacatttaaatcaaagaaaactaatcataatgcacatttttgtgcaaaatgagaacatctaagtaacttctgaggttttaaaaaatagttcccaaagcacaatttttgaaaatagtttacatctttgaacatttcagttgtgtcaactgcccgcaggaataataacaaagcatgatttctgctattgataatgacgatctaattgatgcagaaaaaccattaatttgattctctcatctctgctcatttctcactcttaagaggaatcaaggagcaagaaaactacctccaaataggttcaatccagaatccttactggattttttaggaagaccaagtatgctctttctccttttgaaatatggatatgtcagcattattctcaaatatgtttattaaaatgtcaacaaactgtcacaaactagtagtcttttaaccgtgacttgctttccccaccattgctcagactataaccccattgtgaccgccctgactccaagtcctgtcttctcataaatagttgattaatcccccagctgaagcaatgacaatgaaatgaagttgaatgacatgaagacaataggaagcaattgaacattaatgatctccagcatgacagatgttgaacacagacttctgcatggagccactcagctctgttactttgggtcataacagtcttggttgggaacagcagtcctgtgacagaaaagactatgttatatagtcatcaaaatgtcaaatatatttttctgtgtttctgtggaaatctgccctattaatgccgttgttcttcatattcatttgcttcatctctttcctccaaagagctccctctgtgctgctctgtggaatgtttctctgcaaaatggactgtacatttgttctggatgttattgtccaaagtgctaatgagatgtatgattttgcaggccatgtacccaggattgatgagactgtagcccaagtccaaaggcaatgaaagcataacttgaagagaaacaggaaatactactgtgcacacaacagttatattagaacataaactagcagatacctatgatatgaagttgatccaaggatagagagaattgctgcagtaaagggtcttagagggcatgtataacacatttcccaaatgtattctgaaagacattattagaatgacaaagatgcttctgggggaaagggttccattgtcaaataaatttgggaaacagtatctgctgtcttccacttg

SEQ ID NO: 913404 - DNA, 4001 bp, Homo sapiens
aattcaaaaggcaattataattcatggaaagagaaatggcagaagaggaaggaaagacattaagcaccagcagtgaaggaatacatgaaaagaagaagacagaatatgctttcatagtggaacactgttgattgatgatttataaaaccaatattccaaagggattaaggtcaggattaggacctttatatgctgattgtggttccgatttaagctcctaacagtagttgtcttgaactgagagctcttatttaaaacaatccttcactaaaagagcttcaaattatcttacaggtgctttaaaaaaagatatttctaaaattttttgtaaaatattgtctttgtttcagaaactatttccacttttttaaagatcaacttagaaactaaggttgtaaaaatactgacagataacattaatgcgtggcaagaaggtaaggccaggagagctgatgttcgcagagcaccactgcatgccaggcactgtcccaggaaactgactgagaccttatctatttgctcaccatcacatttgggcactttccaagtaccaccgggtggagtggaagcactcagctaatgtctgctgagtggttaacaagtgggacaatctatacaactgagaattcaactacagtgaccttttaattcccatgaatgttctttttccatattagagaaaaaaaaatctgacttccaaggccaagccaccaaaaattttatgtggctaattcacatcagatatcattctgaaaatctcgtatattactatcagttatttgcttaatgaaaaacctatttatttcaactaatgctttatggtcccttcatataaattaggatacgaaaatctagtttagcactgtagcgccttagaaatcctccacactgttaagagcagggaattgctacgacacagcctagaatccccttagcagcgtgtctggaattcttccagattccgtcaagcttcaaaactgaacagcaccacccacaaaccaacttttacctgcccattcccgggccttctaatatgcacttcccccagcccaggtccccctacccggaactaatgtttaaaattctcgaggctcgtggcaccctttagttgcatgtcagttaacaaatgccacttaaaagcccaccgaactcctcccccaggacctgggggcaatttcatgaccttgcagggttacggtttcagcaagtggtttcaaggtagtgctaggtgtccttcccttccccgccctcagacagatctgtacggtcccttctgcaccaaaaccaccctcagaggcatctaggatgttcgcctttgctgttgcagcacccagcaaagcgtctgcaacacgggaggtgctcgacggccgcgctctctgactcgatcgaatcttaaagggtcactctgtccagcactacagggtttcaaagggcgtcaaggacaaaaagcacgacttaaccttcccctgggctattgctcaggctcccgtcaccttgcaggccctgagactgggggcctggcttgcagtggaagtggaagctcaggaagtgctgattagctgagggaactcaagaccgcccagacgtcaatttggactcaggccgcagtcccgaggtcccaggtggccctccgacctcagggaaccgggcgggaccttgctccgccggagcccggccctgcgcacaccttgcccgacctcagagccgcttcctgcagcccccgctacccggcgcctccgacgggccaggggcccagctaggccctgcgaccccacatctgcccccgcgcccatctcctcctccctgccccgtgcccaagctcttccatcccttgcggtcctgccgatcttcccgcaagctgccataccattgcggctgcaaggtccaggccgacagcccagcgacacccgcgcgagagaacatggtagccacagccctgctgaaggtcggtcaggcaggcctcagcgcgcatgcgccgaagctccccagcgcgcccctcccaccttgctctcttcttcagtctcgtttcttcgcgctacggcgaggggagtctcgcgaccgttgcaacccagtcttcccaggccccacctccttccgcctctcagctgggatttgtcccgcccaccgccgccagcccggttccgtttccggctggctgagtactggggtccagaaagtgatcgctgccgtggtcgccatggggaagtcggattttcttactcccaaggctatcgccaacaggatcaagtccaaggggctgcagaagctacgctggtattgccagatgtgccagaagcagtgccgggacgaggtgagtgggcccggagtggccccgtcttcccaggagggcccctggcaatccaggatcaggtcctggacgcggggctgagggcgcggggctggggctcccggggtccgggtcgtgaggcttctgaggtctgcagtgggcgagtcaactactcagcgcacgagagccgtccctccccgcagcccccgggcccagcgggcagcctgtgttctgcgacccctcattcctccccagtccgatccccaccaccaaagaaatgaaatcagaaaaggttttgcacccctcacaggggcggggatactgcaatactagacgcccgggcaatgccagtaacagtcatcagctcttacttgacttgactcttaagagaaacagggtggttaggattcactcctcttttgggatcaggtgaaaaaggagagctaagctcttccacactactcatctagcaagcatttattgagcacctacactgtaccgggcacagaataatattgtggttaaaattatggatttatctggtttatggatatatcagactgtcaaaatttaaagtcaagcagggccacttaccaaccgtgtggtcttgggcaagttatttacttatattcccctttacttatctgtaaagagggaataataatttcacctacttgtaggattgtcgctgagttttaaatgagtgaagtatatatagagtggctcaaggagtctgggcagatctcgaaaagccttatatggctacactatggaatttacacttttccccattaaagaggtggttgattgaatgctgtgcaggctagtgatgtgatcatatttttctccggagattggactggattgggtaagggtggaagaacactgaggcaattggaataatctaatccagtgtttctgcaagtgaaggaagaggtattttaggtaggactcatactaatattgatacagttactctctttagttctattaaggaatacctgtatatgcattatctaatgtcttagtctgcttggactgccatataaagtgcagtagactgggtggtttaaatgacagaaatttatttctcacagttctggaggctgggaagttcaagatcaaggtgctggcatggtcagattctagtgagggtcctcttcttggtttgcgaaactgcctctatcctcacaaagcagatagagcaagctctaatagaaacttctcttcctctttttttttttgagatacggtcccaccctgttcatcatgcaggctctacccttgtgacctcatctaaatccagtcatctccaaaggcccaccttttaattccattcccttgggggttagggttcaatatatgaactttgaggggacgcagacatgcagtctgtaacacccagacttaacactttaagtaattttgccgtatttactttttaaaaaatattttaaggtaaataccaatatcaggatatttcacctttaaatacttaaataggcatctctaaaatttcaggatacttttctatataaccatagtatatgtcatcaacataacacaattaatagaagttcctctttatcatctaatacacattcacacttcctcagttgtcctccaactgctccttgaaatcaagattcgatcaaaagcaatagactgttataggtttggttattaggacctccgctcccctctccagtctccc

SEQ ID NO: 913405 - DNA, 4001 bp, Homo sapiens
aaaaaggaaagtatgctgtgtttaaaattccaggaaattgtcctagaatacattaataaggtgaaccagtcttacctttgccttagagcccaagagaaatttcacctagattttggctatcagcctaacaatatcagtaatctacaatattcaagagccacaaaccagccagcaaacttcatattaagtatctagaagactaagaagctgactttcttaatgactgttacctgcatgttgttagaagcctgccccaatattaagtgacttttgctactcccctacactgtgacccattgctttttatatcaggcaagaatgtaataaacaccaaccagtacgaagaaagtaccttcaccttagcaagcaaacttcttaggctccttgagcttcaaacaagccaaagcgatgttcccgcacaaaagctgacagtgaattaaccgatcagaaaaaaatccattatcctcaccacataaaaacgtccttctatctaacctaaagtcacctttgtatttctcaattcaagattgtcctagcaaatacaacacagcaaattcgttaaaagtacacattctggagtgtgtactggctccagaatgtgccagctgatttggaatcataactcggcccttactactgtgtaatcctggccaagttacttcaatgtatcgcctcgatttctctccgtaaatccagcataataattctagcaactcacagagttgttgtagggaataaatgagaaaattgacataaagcgcttagaagagtgtttggcacttagcaagtccatcataaactctacttattaacatcactatgatgactaaataaatgttagaaggggtcacctctagagagaagagaatggggaaagagagaggcactcatagatcataactgaacctttacacttttgtgaatttttcacaatgcgcatgtatttcataagtaacttggacaatttctgatttttaaatattatcccaagaaaatggtgctgggcatcataactgattgtgaaaatgttcgtgctgagcagcggatcagaagtcgctgcggacatctggaacgctcgagaaatgcctagctccccgttggtcagggctccgcgcgggcccgagctctcccggggcgccccggggctggagggggcgcggcgcgggccccactctcgcccgctcccgccgcgcgctgaggttcactcacggccgggggatcagaggcagcgacgggggcgggggaggccgcgaggggggcggggaaggccgcgacgggagcgaggcagggctggaggttcggggtccggcgaaggcacttacttgaacctgccctggcagtgctggcactggtcccccacccagcccgggtcgcagaggcaggtggagttgacacagcggcccgagaagcaggagccggtcctctcgcacggcttggactgggacacctgcgcgtagagcgccaggtagaggaagccatagcacagcagccagctgttcccgtccagcagccaggaggaggcgcccccgccgccgccgcccgccggccgagccctccacacccccggggccgctggctgcggggtaccagtgcgggcccggcccccagtctccatcttccccggcgcccctgcccggcgagactgcgctcgcgggcgccgacagggatgctgttgaagggaattccggccgcagaaaacctctccgccgccgcttctcctcctcctcaccggcgcccgtccgagtcccgctccccggtcaggagggacagatcccaaccgccgtcgcctccgctcggctgcctccagtcgcactcgggcatcgccacccagtctcccgaccttgtccttagcgggccgaccccacagccgcggcgtcccggacccggccggaggcggggagcgggaggcgcagactgcgcccggcgctcctgaggggacctgaccggcaggaggaggggaccccgcgcgcggccccgcctcgcccgcggcccgcgccaactgcctcggctccgagcgccgcgcgcccaggagggcgggggccgagcgggcgccccgaagtgggcgcgcccaacgtggaagggggcgatcaaggaggcggcggtcagccccgcctcgcccgcccggcggtcaagggcgccccggcagccattctgtctccggtgcctcgagccggccgcagcggcagcgccgggagcccacgatgcgtggggccgccccccgccctcgcgcgcgcctacactcctccccacaggcccggcgccttggtctcgccccgcccctgacagggaccggggactcccccacgcgcgcgcgcccaccccgcctggcccgcgcgctgactggagacaggccccccaggtgtggcccgcgtgcccttccccccggccggtgcgggcaccccggccccacccgcaccccgcgccccgggagccccacgaatgagagatcgacacaggcttcgcagcttcagcagaaaagaagtccttcccgtccgccgtctgcagctgcaaaagtgcaacgctttttccctagcgcttcccccttcctccgccccatcctcctgcctatttcttctttttctcttaagagagaaaaactccaacaacacacaaagagctgagcatgtgcagcaggcaaaagccttaaaggcaccgcagtccgaccacgttgtggggtcagcgagggctgggaggggcggggattggggactgcgagaggcgcgaggcggtctccgcggagggacctccgagggggagccattgctgcctcgggaataacgaagcccgcgcccccaacaaagaactgcgaggctccgagccccgcgctctccaccccttacagacgctgcctcgaaaccgcacgtctctccttttctgcttgtcagtgctccctcctccatctgggacgatattctgccttgaaaaatattgcagcatcggggctttttttcagaagagcagaagtgatgcccacaaaagggccgttttccttcctcagcagcactttttcttcttcagatgactttccaagattggctggcatattctgagatttttgttttgtactttggtgccttctctaaacagttgcctttttatttgacccccttgagaaaggaagccaaacacacattgcagccatatatcctcgagttacagcaatgttgctggagtcccaccaaagaacaggcagtatgaaaaagaattcaaaatccaccaaaggcacttctcacagaaaaaaaaaaaaagaagaaagaaaagtttgttgtaactacatagtcaaaatattattgttaggattcaactcgtgtttatttcgcgtcagttcttttcatgtctcttatccccacttgcagatgaaatcctccattaaccccattttgcagatgagaaagagcaactcagaaaggttgaaatattggccaatggcaggttaggagtaatgaactgagctttagacacgaggcctctgactgctgtgcttttttcactgcttctattagcagatgctttgttcttccttcggtgaataaaatatacgtgttggcttggtttaaaaatacctcagcagtgacttaaggaggaaaaaataaaaacaaagatccagaaggagttggctccttcgcaaggaaaagagcaaaaggaaaaccacgattctcgttggcatacagaacaaatcataatttccataatttcagggttttaccagtatcaaaaatgtccttatcaaacctagaattaggatgccctcttcttcccttaacatcttttccacatcaggctgccccttagagacttcttgaaatgagtgaagaagcagaggagagaacactgcagacaccagttaaaaggaagatcctgttctggatcacatcttttcatttcaatgactgtgaaatccagaagaattctttctagtgtcagccatgcatgaacactgtctgctgcttttccattcttctccatctgccagccaaagtcagccgcatctttctcacatc

SEQ ID NO: 913406 - DNA, 4001 bp, Homo sapiens
aacttgttttgaaacaggcaataagtgaagaactgtggaaccctaacaaagaaatatatttaaaaagtgactcaccatgcaatgaatttgcaatatataaatatggcgcgcaattgagcactctttgcaatatatgaagttcagttcagacagctattctaggagagtatctcactgcagtcccagggaggcacaggtaaccaccagaggcagaacacatttgggtgagctggcaactcctaggtcctcatgcaggaggaggcccccttccaataacccaggtgatagcaataatctctgtaatcaggggcctaggggctcttagaaaaattactggaggctctggcccaaggcctgaatcaacacttgggaccctggcctgctatcctatacagacatgccactggacagcagccaaaatctgtggctcctcaaatgggaagcccagttcaaatcgctgtgtgggcttccccaccagcagggcctagcctcagggaggtatgccgagacaactggatatacattggcctccaaatccatgcccctggaggtggagaaaggaactgggccctttccccagaccagttctcatatatgacctggaaataaactgctactagatctagggataaccctttcaagatttctagaaccctgaattctggctgtgctgctaactgggtgaccttggataagtctcagtttcccctgccacaagttgctcgtcatcaaaatagtataaggccaggcctggtggctcacgcctgtaatcccagcactttgggaggctgaggtgggaggattgcttgagcccaggagttccagaccagcctggtcaacatagcaagactgcctctataaaattttaaataagctttttaaaataaatggtgagtataaataactcttaacaggaaaagggagattaagtttgtgacggcattccttctagtacctggtataccacagacattctatgcatgctggttgaatgaataaatgatgaagggaaaggctgtttgactaccaggggctatagaatcattgtcattttcatcatcacagccatcaacaaatctgtgtacttttaaatcatagctttatgattaaaatcatagaggcagcttgttcagtgtcaagcgcagaacagagcacgttcagatgggtgctttctttcctcctcacttaaggtggcactattgttatacccattttacagatgagaaagctacacccaaagtcacacagctggcaggtgatggaagctgggacatgaacccaggcagtctgaccccagcacccgggctctcaagccactgttatttttgttcctgccagatggctgaggaggtcttctggggaaggtcggtcccagaagcctttcggaggctatctgcttctgtagattgtggaaggagcagggagggatccaaagtcaggactcccaagctagcctctgtaccctctgcactccactgcccggtggagaattggagcaggtactcaccacactgaagggcagctccgacagacctcaaatggggatggggcaagctaagatgcgcccactccaacctcttccacagccttcagaaagggcaggcgcagctctgcgaaggtgcttacaagggccagtcggtgatcacgggcagcacaagagcatggcagagggtatcctggccgaggtcctaaggcgacatctgcagcacgaggaggccccgggactcagacgtggccgcttcgcagaacgacggggtcctaagtggatctggcggtcgcgtcccgctggcaccccggctctgactgtcgccctccggctcccaccgcagcgccgagctgggccgccgacctacgtacctggttgcttgaggcaggccgcacgcagccccaaactggtccgggccacttgggtcacagccgcggttcccgggagaaagcgctccctagccccggaacagccaatcctcggccctagccaggtatgagctcccaggcgagccttccaaacccaaggcggagttccgtgcgccaatcatcggtgggagacagggagggggcgtgtccatccccgccccccgcctccgctggcctcgaaagcggagtgcgaagcttcctcaaacctaatcggcggcggagcggcggtgagggggcgtgtctgcccgggccctgcccaccgccctctccgcccccgcgcggcgcccgaggcgcccccttcattgacgtcagtccccagggccagcgcggttttgctggcgcgggagctgggcggggctgcattcctgccccagggtgcggcgaaagctggccctgccgggtacacgtgacggatgccccttctcctgggcccgaggccagcgcgcgcggcactgactgccttgcagcgcgtggccctctgcagatcctcagactctgccgctcaagtcccctcccagcccaccgtttggctccggctttgagggagaggagggggcagtctgctggagtcagaccttgggcttcaaagccagaatgtcgtgggttcaaatattgggtcatttgtgcgactttgggccggttacctaaacaagaccgtattttaaagtttgtatgcattcggaaatgttcattagtgacctatgctgtccgagttccttgataggccgtaaacaagagagacggaaagacctatagcccttgtcctggggagtctacagcctagtaagggaggcaggcattaaacaacctaaaacatggagtatgtgattacagttgtgatcaatgttatggctataagaggataaatatggaggaacctaagcttcctctgggaggttcaggagggctgaagaagcagcatttaagctgagatataaagaaggagttgaaactggtcaaatgaagaggagtggatctggggagactgctttaaggaaagagggaaaggcatttggttgggccaggaggtagcttggctccggaggaattaaatgcgacccggagtaaggctagcaagagagagcacggtgggaagtagaaggcagaggcaggcagagaaggttgcatgtgatccttggaggggtttaaacaaggaatggcattatatgtactgtgtttatgtaacgggcattttatagtacttaccacgtaccagtagtgtcagtcagcactttgcaaatttcatcatcatgacaagtttgtgtttttagaaggtcactctggctgcagtttggaacttggattggagggggcaggagtggaggcagggtgtccagtaggcctctgataaatgcttgttttgtccttggaagatgaagtgtttgtgcacttgttcagcaatgctcaggaaaggctcctgggtctccctgacttcctttttacttcatagctgacctcttatccatttaagcttgatttttcttctgtaaaagttgtgggtgggaaggggaagagccagcacatggggctttgtgaattccttgttgcagcgtgaaggggatgcttgggagctatttgtcctcaccccatgatctccagttcctctctctgtccttctgcacaaaaacagcgtaagtgttgttgtgctgtggctaaaagggttttttgttttgtatttttgagacagagtctcactctgttgcccaagctggtgtgcagtggcaccatctcagttcactgcatcttctgccccctgggttcaagcgattctcctgccttagcctcccgagtagctgagactacaggcacgtaccaccacacctggctaatttttgtattttttagtagagatgcagtttcaccatgttggccagaccggtcttgaactcctgacctcaggtaatccacctgcctcggcctcccaaagtgctgggattacaggcgtaagccaccatgcccggccgctaaaaggtttttttgtttgtttgtttgctttttttgagacggaggcgcactctgtcgtcaggctggaatgcagtggcacgatctcggctcaccgcaacctctgcctcccgggttcaagcgat

SEQ ID NO: 913407 - DNA, 4001 bp, Homo sapiens
gtaaaccacactaaagatcatgtacatccacgcagactcctaagaaaggtggtttgaaatgagtgtcagtttcacccaaaaatgggtggaacagacacacaaaaaggtatatgtaactgtgcccatcccagctaattacagcctcttgtactaattttcaagaataaatatacaactaatctctcgtaaatgtaaactgctgcctgtacacggtctcactgctgggcaccggagttttatcaatattgttaaaacaaaaagtgcataaagatgaagggaaataatacaggtctttcttctaaaacaatgggttacacagcagttttaatttggtgagtttttaaatcttcaaaataatttaccagctctttgctgcttttatcttgcccagacggcgttaacaattcagctttaagtataacatatttattttaaaaactttttatcctgaaagctcaaatttataaaaaattgaaagaatagtataactaactctgatttttgaaaattaacacactcattccaaatttacattttcaaatttcatgctcttggggattaagaagtatatatccttgcatgtatgtaaatgagacatacttctgctgtattcacaagagtatcattagtcagttatttgtgtactggtaacaaatcctaagtattttaataccataacaaggcaggaagcgaatgccattataaatatacacgtatcattctctttctctccagtgtgaggcaatgtggtaaggcaatggccaactgtaagacagtctcagatctctagtctagatctctagaaactgctggggagaagcacaccctgttttttattttacaaatcatactaggatacgttcatattgaaagcactttcaaacaataatacaattttaatttaaaatacacacacacacatatatatatgaatgttttgacaccagcctccagagtcattgggtgcctaacatgggacagtagccaagatacccctcaaccaagttggagaacttgagcggtaaaattccccccaaaaccaccatccaagcttgcgagtgtccccctcgagtccgcggtcagcagggtgcgccgcgggtcccgggcccggaggccgagcgggcagcaggggccacggtgggccggggcctccggagctgaccaggccggccgcccctctcccagccctagagcgcgaggccagcgctggacacccggccttccgccctggagtcgagccgtggacggcaccggagccactgcggggtcgcttcccgggccaccgaatcccggggcctcctttcgccccgacgcctgtcaagggcgggtccggagcggggactcgtccgggcgcagcgggagtgtgtggcggggcgcggagccggtgtccgcccgcgaggggccttcgccgacccccgggccccgccgcctcgcgtccccccggcccagcccactccccgccgcctgccgtcgaggtggcgccaccgaccagggcgggccgcgggcccggctcaccttggggccctcagagggcacgcgcgggtcgttccacgtagtggtgcggctgttgtggtccacgaagaagggccagccggtctgcgggtcgatcttgatctcccatccggggggcaaagggtcgcggtcaccgttgccggacgccacctgcatcatgggcgagtgggtggcggcgctcatgctgggttggggtctgcccgctggggcgcgggtgcggggcgctggctccgggcgccgagtctctggccgggccgccgccgtgggcccctctccgccgccgacgtgtccgggaagccggcgccgggcacctttatgaattaaaggcgggggtgacgtggccagagaggggtggaagtgtctggaaatagcctcctcgctgccagaggggaaggaggagataaagggaggtagcaactggccggctagaaacttctggtccagtccagagaagttggccgcggcccggggttggatgcggagctccgccctgagtcatcggctataatcgcggcgggcggggcagaggagcgggggcggggcctcggcccgctcgcccctcccccacctcctcccgcccctcccccttccgactcgtgcgcgtgcccgggccggagtcgccgcgggcgggcgcgggcgcggcttcggggtccgcctgcgggtgggaagccggacgagctggactggggccgtcctccgtgcgccccgggcgggtttcggctttcatagtcgctctctccctctcctttgcgccgagtgagtgttcccggggccggagcccgtgctccccgtgcctgccgcccgtccttcctgtacaaacaaaaccatctcgcccacctccaccccctcccccatatatgatagccgaggaccctgagggctgtccgggaggagcgcggggactctcatctgacaccggaaggaagccagggagaaaatggaagtcagtgcaaactcacctgccttcctttggaaacttcaagaaaaaaagagattgtatcaactgatggcttttagtctcctagactaaaaagaaagtttcgttgcagctttaaagataaatcacattttcttgggtctggatcttttttatggtagagattggttcttgctatcttatatcttgaccctgatttgggaagtaaagaccgaataaccatgacattttttgtttggtttattcaattgcacttgtaacctgtcaaaggagaaaattacaacacatttaaagatcttttttgttgttgttgttgttgattttcattttttaacttttattgttaaagatcttatttgtgattctagaaattgggcaacatctccattaaattagaataagtgctcccatgagctgagcagaagaggttggttttatagacagagaagggctgaagaaagcagaaacaaagaaccaagactggattggttgtttcaaaattactttccttgtaaggaggggacagagagacagaatcatagaaaaataactgatgagggcttgccaccatggctcatgcctataatgccagcactttggaaagtcaagactggaggacctcttgagtccaggagtttgagaccagcctggacaacacagtaagacccccatctctgcataaacaaaaaataagccaggtgcagtggcttatgcctgtagtcccagctactcaggaggctgaggtgggaggctcatttgagcccaggagtttgaagctgccatgagctatgattttgctcttcatgccaacctaagcgacagagcaagaccctatctctttaaaagaaagagagagaaagaaagagagaaatgattgagagaaatgtaacatcaggttacatacttcagattactgtacagttgacccttaacatgggtttgaattgagcaggtccacttgtacatggattttttttcaataaaagttacaccgatgtgcttgcctctccagtctccccttccacctcctccacctcttctgtctctgccaccccttgacaggagaatcaacccttcctcttccttcccctcctcagcctccacgtgaagataatgaggatgatgacgtttatgatgatcacgtccactaaatgagtagtaagtgtactactcttccttatgtaaatgtaaaatctcttccttatgattttcttaacatgttcttttctctagcttactttattgcacgaatacatataatacatatacaacatatgtgttaattgactgttcatgttattggcaaggctttccgtcaagagtaggctattggtagttttgggagattcaaagtatgcaggggcggggcatggtggctcacgcctgtaatcccagcactttgggaggccaagcggcggatcacttgagatcagaaatttgagaccagcctggccaacatggtgaaaccccaactctactaaaaatacaaaaattagctggacgtgtggcacatgcctgtaatccagctactcgggaggccgaggcagaactg

SEQ ID NO: 913408 - DNA, 4001 bp, Homo sapiens
tgtaccactgtattaaaactatatttctgtcgttcataaagtttcttcctgtggcatgcaaaaggccagaaaggggactggtattttgaaactgtggaacaatgcccttctgtttctgtccccttctcgttactgtatgtagtgattaaacaaaaatgtctgctttagtcaagatggctacaggagagactgctggcttcttttaaagcttttgaagtccgcagccgtcagaaatctctgatcccctaattatatcattatcaggcacatagtttcggtatctgtgacttcatgtcagcctcagtccctccctgttctgcccgcctttgatagggccaggaggctcccctctgcaagccacaagggctgttatttagggttaattacacccttccttccaaaataaataaatactgtagcacatcatcctcgctgggctagcttatgctttaacctcatgcctgctacatagcaattaaagagaagtagggggctgcaaagactaaactgcttcctacttaaaaaaattatctgttcacagaacagtaggtagatttcacagcagggaggtgaggagaaccttgaaattcggagacagttcgggttatttctttctaaaaggtgaaagcctgcagaggaaagaagaaactgacccgctgccttttttttttttttggtcctgtttgtaaaatatgaggtgagtggcagtgagacgctgacagagcctactcctcccggctgctgaaaagcaacacaacacacacttctgcacacctcggacacctaaactctcagggagacccacacactcgctcgcacacagagagatgtacgcagagacacactcacacagagactcagatgcacattcagagatacaaagacacttagagacagacacagaaatgcattcagaaagacacactcaagatcagagatacagagactcacacattcagagacacaaagactcagaaagagacacagaaatgcattcagagatacattcaaagagacacagagatacgctgagtgatacagaggttcagacacactttcagaaacacaacgacactcagagacacaaaaatgcatttagggatactgagactcagagacacactcacagaaatacaccctgaggcactcacacagacacgctgagggcacgcggcagctacaggccaggatctgcgattcctcccggccgcccgagcccccagggtgcggaagcggcggcgtcgaggccgagactccggccccgctccccgctgggctgcaaacgcgccgctccccgcaggcagagccaggaggaccctctgatcagcgcctgcccttagatcggagtccgcatccacgcgccaggccaccgccgcgacttctaagaacacagcaacttgtcgcgacctgcggctccggcgcaggagggagcctcgcctgccgctaacaaagcctctgcagccggctccaaagccccgcggcgaggacgggaccccgggccccgtgcgcccccggcacccacctttggtgagcagcacggccatggcgcagagctccagctgcagccagatgaagatgtagctggagtggcgatccattgacgccccgcacggccgcggcgcccccgccggcttccggagccccggctcggcggcagcctacgacccccggagcgcgcagggcatgggccctgcccggagcggcgggcgccgtcagcggcggggctgggtttcgggccgctgccggagcatggagcgcggctacagggcgcgcccaggagcccagaaaagtttcccggtcccccgtcggcggccactggctcccttgccccgctcgactctagggacgcacgctagccccgggtcgggagtgggctcccggccttcagtccccgctagcggccgttctcagcgaagagagtagggtctccacagcacgcaagggtatccgccgcagctcccgcccgcgccagcccaggtctctccggctccgcgccgtaaatagcgccccgcgccgggagccggcctgcaccgccccgcctcgccccgccccacggcgtccgattggccgccgggctcctgtcaatccgccccgcagcggggggcgggcccagacgcgagcgctgggggacctgcccggcggctccgagcggcgccggcgtctggggcgcccggctggggcgcccggctggtgcgctgccgtctcccgcgctcccccttgcggaggcctgcgcgtcagtgaccttcgcgaggcgccgggggagcccagccccgggaccggctcgggaacccgcctccgagaccctgacggctcagcctcgggtggtcagcgttccccagcgcggggcttcttttgggtgccccccgaaacacgcagggggtccgtgtggtcgtcctccccggccgcactgcgttttctggaacccccaggggcgagtgacaatgccccggcctgtgcaggtggcggaggagggttcgggtgggagcccgggggaggcggcccagcgctggggtctgcattcagccttcgccccccaccccctcagcgtgtccgcctcgagctgcccgccatgggatcaataaagcccagacagactgactgttgatccgttaggagccgctaggttctcccgggtacgcgggacgagtagcgggctagagacacttaacgaaaattagcaaatccaaaagcacccggcgccaacgagacgacactggccgagactgacactcaattaaccaccccccaaacaatggctggcaaacacgccggctgaccctgatcaatatcagccccgcagtgatctcctccttgagatgctaattcatttattagggatcgcggggctgcccttcccaaggtactcaaggtggtcttgctgtagttttgtttccccctccgctttggaaggaattaaggttaaaactcattatctgagggaatgttcttttatcctctccctccaaaacctgagatgaacaaaagtcgaccatttgcaaaattcttcttgagaatctgccagagcttccctaccggatatgtcaaaagggggtggggggtggggaaggaaagaaagagaagcacatttcatgctaaggtgagaattataaagacaaatcctttaggactagagtgcagacatgagctttgagactaagaaaaatgtacatatgtcttgaggactgaaagtcaaggcgaacatatctcaaacgcctaaccttttaaagttgttgaaagtctgcagagctgcaggatgtagttaatgaaattgtctttgaaaaataatgtttatgtgcagaaaaataaaataatttcataaactgatgctcagaccattacttctctagatcaaaattgcatctaaaaggagagaaggagaaatccagtagaagttttaaaagaaaattaaactggttagggcaccaggtaaacagcaggtttctcagaaaagtttctcaaggggcgtgctgacaaggcagtcctggggccgagtttgattagaacttcctggctactagaaccttgacaagttaacaattgtaagggttttatgcagacaagactttttttttttttttttttttttttgagacgagtctggcactgtcgcccaggctggagtacagtggcgcgatctcggctcactgcaaccttccgcctcccgggttcaagccattctcctgcctcagcctcctgagtagctgggattacaggcacctgtctccacgcctggctaatttctgtatttttatagagacgaggtttcgccatgttggtcaggctgctctcgaacttccgacctcgtgatccgcccgcctcggcctcccaaagtgctgggatttacaggcgtgagccaccgcgcccagaggacaatactttttatgtaatgattacactctcttttagagtcaattattagctaaaaggaaactttcagggtatgttagttcaacctggcctcccaccgtaggcgaggcttgcaatgtctgggggtataaaga

SEQ ID NO: 913409 - DNA, 4001 bp, Homo sapiens
tggaaatcttaagggtgtcttgcctaacaataagtgtctgcaactttttatgacaatgaaaaagtggggaggaatgaaaaaaaatggcaaaatgttaactgctgcatatagatgatgggtacatgaatattcattaaattatttctttcagcttttaaatatatgaacactttcataataaaacactggggaaaaaaatcatgtcagaaagacttcacaggggaaacgtaaaacaaagattgagtagcaggcgctcagctgaatttctgataaattgaaggtctctaaaacttggctggaagtgtcttgggcatccaagagacacccgatatattcaaactttcagtaagtatttaccaaaataatatcatgtgcatggtgaaaatgacgggaagacgaatctgatacaaaccattctatttaggtgcagacatggtagtgaagctaaaaacataagcgctattatatatatataacatactgattgtcataaaagatgtacaaaaaatgctaaactcagaggaaattacttcctgctgggaagaatctggaaacacatctccacgggtaacagaatcagatacagaatcacaaaaggtgactgctacaacagatttcagtaattaacagcaaagaaacaagagtagttcattttggctggcgtgtaagtactaaggaagcagaaattaagtcgagaaggtaggtttgcatctgtattgttgactggctggatattaaccattttcaattttacctgaaagttctggtctttttgctgcagctttaagcatccaacccggtattaccaagatgacttagagttcttgactcaagcatacagaagaaactacaagataatgtatgataactttgtaaagggccatataaaagcaatacagtattttcaaaaatcttcaacacgttgtttaagaaactgtagacctgcaggaatcccaccaccagaaccgcagtcaaagcttacaaagactcaaaggagagacgcggaaaggggggaaaaatcagaatgggaaggcaggtggcaggggaaaaagattgaggtcctgccctggtggtaggggctcatcttttccttttataggtgaaggtggaaaatgattttctgaagttcccgaattctcctccctccaaaggccaaggagtgaaagtacttaataggaacttgcggaggcgtggtcaagagctccgttttgccggagttaggagctccgccccgaggtccccgcccattccccgctggggtcctcccggccgggctgcctctggctgggttagggcggcctgtagagcggcctcaccccacagggagcctcacgggggcgggccgccgccaggccagcccggaaaaaaaccgccttccaacggaagcggccctgagccccgctcgccatttcagcgctctgtcccacagggaccgtccggcccgggtccggcccactggttggggtccacggactcacctcactttgcaactaaggtcaaaaataagcattccctggggcacgggcggccaggctattaacacccttccgccatgacccaattcggaagtgccaaatgcaacttccgggcaggagagggaatttcggagccctaaactgttgtccatctccgtaagtgaccagacgtctcagtaaaataagggccaggaaactggacgtgtaatccggagtatgaattaacttgtctaacatgggatgtgtggtcacccacggtacctctttgggcttacttacagatgcatcccttcccagacggctcagctgttgccccgggtaacggtgagactggcgaaggaaaaaaatctacgtcaccctggaaacaggaagccaggaatctccttttgccattatcagttatggccgccttagcttcaacagtaacttccgatcggggagttgtcactctaccctgctggaggcttactctgtagcccggctagccagaggcgcccagtgggcgggagacggcgtagaggaactgaggaaaggacaagggcggagagagagaagctggcggcactgcccgtctctgattgggcagcttctcttgccccggttccgcccatttttcttgcctagcgagtgacgggcccacggcagaggggtggggcggggaggctggagcgagagtagtggcggggcgggcggggcggggcgagtgggggaggggcgggcggggggcggcggttgggcagcgtcgcttcttaggaggaggaggaagaggaggaaggagggcgagcgaggaggatggcggagtcggggctcctgacggtaactcggggccgatgaggcggagggtgtctgttggtcggttcttcctgcctgccttcctgtccgtcgggcagtcgggctggctgtcggtagggggaggccccgtgcgccctgacaggcgcgagccggcagcgccggggcgaggcccgaggggccggggccctgggaggcgccgccgccgccgctttcctggttgctgtctccgggagtgcggggcccttggagccggctcgcgtgggagcctgcagcccggcgcggagaggaaggcggtcgggtgtgacagcggccggggccgggcctgcggcggcggcggcgggcggcccggacagcgcctgggcgacggcgagccggcgcgagggcgcgggccgggggcccccggcggacagtctctctcctctcggctccctgggcccccgggcccagtccgcagggcgccccgagtcgtgtaaatcgttggcgagggcccgggcgcagcggcggtcatacagggtggggtctcttctcgccccctccctggagtccaccttgctctcccgttctcctctccctaaaaacccttgagtgaagagtgctggatcggctctgggtgtgttgcctagcgaagcgagttgtagcccttcgagaccgcctcgtagaacatgcccgatggcaacctctccccgtgatagcacagcttttagggagagaggaaaagtagtctcactcttccccgacttccccaggctcataacacaagaggctttggggcaagacgatttttcccccagcacctcaatatccattgtttttgtaccatccccctccccccatgcctaggtggaagagtaatgactccaaagcattaacttgcctttctctttatttcttttctttctttttcttttcttccttcctttctttaagcaggcagtttgtgttattgtggaattatggatttacaaacaggtggaataaataccgattcgggagctagaaagaagatgctttgtgtgtgtgtttaagcccttacagttggcagtttgatttttcttgtctgttgctttgtatcgtaatgggggtgatgagaataaaagaggaagcactgttttgcaacctacccaaagaaatattttcgaagtctctggggatgctgaagcaaaattaggttgcagatgtggactgtatagtatttgcctccagcgtgataactaccagcagtgtctaggcttacacctgtgccatttcgtatacttttcttagataccgagtgcgtctagtttctactcaagagggactactatatcaaaagctttttgttacggttttcagaatcctaaggtacatttgtgtaaccaagtgtttttgtaactaaatgcagcaacaccactgaaaaatagttttaattttaaagacctcaatttattagtgtacttactaatctttaccctcatcctccatgctgtggactgtagaactgttactgtgtacttgaagagacttagctattgcatccaatttgtaacattcagtaaggttatatttataatttgaatttatcaagtgttgatgttttgctgtgtgacagtgaaaagaattttaggaataaagtatgcaaatgaccattcgccacatatggaacttagactgagtatgataagccttttgtctttatttggacataaagtatattgtaaactttttatgtaattataaatacacatttgaaaaata

SEQ ID NO: 913410 - DNA, 4001 bp, Homo sapiens
acggcaaagtgcgtatagctgcgtttgagaaggcttagtcatgactagaaaagtgtgaatactgtgacatatccttgcaaaaaaaatgttcagcttaagcctctagactaacttctggtttacaagaagaaaaaagaggggcccatttccaaaaagactcctgccttgaactcttcaaaatgccaatgtcacagggggaaaaaagatgggggaactctactacattaaagctaaagaaaaattttgactggatcctgattttttttttttttttttttttttgcaggattgggaaggagaaggtataaaagatattcctgggtaaattaggaaaattagcacttggcctagattttaaaagttacaaaacagctgaaataatgatattgtgttttgctggagaacttcaaaattcttaggaaattcatgctggaaatcttaagggtgtcttgcctaacaataagtgtctgcaactttttatgacaatgaaaaagtggggaggaatgaaaaaaaatggcaaaatgttaactgctgcatatagatgatgggtacatgaatattcattaaattatttctttcagcttttaaatatatgaacactttcataataaaacactggggaaaaaaatcatgtcagaaagacttcacaggggaaacgtaaaacaaagattgagtagcaggcgctcagctgaatttctgataaattgaaggtctctaaaacttggctggaagtgtcttgggcatccaagagacacccgatatattcaaactttcagtaagtatttaccaaaataatatcatgtgcatggtgaaaatgacgggaagacgaatctgatacaaaccattctatttaggtgcagacatggtagtgaagctaaaaacataagcgctattatatatatataacatactgattgtcataaaagatgtacaaaaaatgctaaactcagaggaaattacttcctgctgggaagaatctggaaacacatctccacgggtaacagaatcagatacagaatcacaaaaggtgactgctacaacagatttcagtaattaacagcaaagaaacaagagtagttcattttggctggcgtgtaagtactaaggaagcagaaattaagtcgagaaggtaggtttgcatctgtattgttgactggctggatattaaccattttcaattttacctgaaagttctggtctttttgctgcagctttaagcatccaacccggtattaccaagatgacttagagttcttgactcaagcatacagaagaaactacaagataatgtatgataactttgtaaagggccatataaaagcaatacagtattttcaaaaatcttcaacacgttgtttaagaaactgtagacctgcaggaatcccaccaccagaaccgcagtcaaagcttacaaagactcaaaggagagacgcggaaaggggggaaaaatcagaatgggaaggcaggtggcaggggaaaaagattgaggtcctgccctggtggtaggggctcatcttttccttttataggtgaaggtggaaaatgattttctgaagttcccgaattctcctccctccaaaggccaaggagtgaaagtacttaataggaacttgcggaggcgtggtcaagagctccgttttgccggagttaggagctccgccccgaggtccccgcccattccccgctggggtcctcccggccgggctgcctctggctgggttagggcggcctgtagagcggcctcaccccacagggagcctcacgggggcgggccgccgccaggccagcccggaaaaaaaccgccttccaacggaagcggccctgagccccgctcgccatttcagcgctctgtcccacagggaccgtccggcccgggtccggcccactggttggggtccacggactcacctcactttgcaactaaggtcaaaaataagcattccctggggcacgggcggccaggctattaacacccttccgccatgacccaattcggaagtgccaaatgcaacttccgggcaggagagggaatttcggagccctaaactgttgtccatctccgtaagtgaccagacgtctcagtaaaataagggccaggaaactggacgtgtaatccggagtatgaattaacttgtctaacatgggatgtgtggtcacccacggtacctctttgggcttacttacagatgcatcccttcccagacggctcagctgttgccccgggtaacggtgagactggcgaaggaaaaaaatctacgtcaccctggaaacaggaagccaggaatctccttttgccattatcagttatggccgccttagcttcaacagtaacttccgatcggggagttgtcactctaccctgctggaggcttactctgtagcccggctagccagaggcgcccagtgggcgggagacggcgtagaggaactgaggaaaggacaagggcggagagagagaagctggcggcactgcccgtctctgattgggcagcttctcttgccccggttccgcccatttttcttgcctagcgagtgacgggcccacggcagaggggtggggcggggaggctggagcgagagtagtggcggggcgggcggggcggggcgagtgggggaggggcgggcggggggcggcggttgggcagcgtcgcttcttaggaggaggaggaagaggaggaaggagggcgagcgaggaggatggcggagtcggggctcctgacggtaactcggggccgatgaggcggagggtgtctgttggtcggttcttcctgcctgccttcctgtccgtcgggcagtcgggctggctgtcggtagggggaggccccgtgcgccctgacaggcgcgagccggcagcgccggggcgaggcccgaggggccggggccctgggaggcgccgccgccgccgctttcctggttgctgtctccgggagtgcggggcccttggagccggctcgcgtgggagcctgcagcccggcgcggagaggaaggcggtcgggtgtgacagcggccggggccgggcctgcggcggcggcggcgggcggcccggacagcgcctgggcgacggcgagccggcgcgagggcgcgggccgggggcccccggcggacagtctctctcctctcggctccctgggcccccgggcccagtccgcagggcgccccgagtcgtgtaaatcgttggcgagggcccgggcgcagcggcggtcatacagggtggggtctcttctcgccccctccctggagtccaccttgctctcccgttctcctctccctaaaaacccttgagtgaagagtgctggatcggctctgggtgtgttgcctagcgaagcgagttgtagcccttcgagaccgcctcgtagaacatgcccgatggcaacctctccccgtgatagcacagcttttagggagagaggaaaagtagtctcactcttccccgacttccccaggctcataacacaagaggctttggggcaagacgatttttcccccagcacctcaatatccattgtttttgtaccatccccctccccccatgcctaggtggaagagtaatgactccaaagcattaacttgcctttctctttatttcttttctttctttttcttttcttccttcctttctttaagcaggcagtttgtgttattgtggaattatggatttacaaacaggtggaataaataccgattcgggagctagaaagaagatgctttgtgtgtgtgtttaagcccttacagttggcagtttgatttttcttgtctgttgctttgtatcgtaatgggggtgatgagaataaaagaggaagcactgttttgcaacctacccaaagaaatattttcgaagtctctggggatgctgaagcaaaattaggttgcagatgtggactgtatagtatttgcctccagcgtgataactaccagcagtgtctaggcttacacctgtgccatttcgtatacttttcttagataccgagtgcgtctagtttctactcaagagggactactat

SEQ ID NO: 913411 - DNA, 4001 bp, Homo sapiens
agtccagctttgcagacttcaaatgctaacttagccagattatgtgagcagcaaaacacaaggggtcgggtgggagtgttccaaacaggatcaaactaaaccaaataacaaactgtcattattcaggacttaaacttattccttagatataaatacattctgtaaataatgctcatctagtgtttttttctttgtctagacagacatctcggacctctgtcccagactattatggcaccaccagggaaatgggcggcaaatggattatctgtccagcacccttttcctgggtatgggctcatctccacatggcttcagcaggaacagtcacgtttgtagaaaagagccctgtccctcattcccaggtgatttagaattaagactgtggtggtgtgatagatttcccatgttaacacaagcagcattgatttctataacccaaaagtaataaaagagccagtcaaagttctaagtgaaaaatggtgagatggcattcaaggcatagagccaaagtaaaatttgtaagggaaggaagattgatcacatacccacaccatggtgtcacctctaatcctgcatccatgcttctctccatgctcccctccatgctcatcatgactcatgattacctctctgattttatttcctatcactctctcttccttattctgatccagccatctaggctgcctttccgtccctcaattgtgaagactcttgattttcttgtaaatgaactagaaagccaatgcagcaatctaagcagaggcctgagatcagacctataagatctctctgactgtaagtggagtatagactgattgtaggggaacaaaaatggagaaaagaacgccggttaaaagctgttacattaaatagtagtccaggcaagagatgatagaggtgtggactacgatggtctcagaattagtgctgagaaatgtctggataacaggatttactgatgggctggatataggatgaggaaagggaggaattaaagttaagccccaggttttgggttagagcagctggtgactttaggggccatttatagaaatggtgacgattaagagaggggcatgaattattatacaaattctgctttggacaagttaaggctgaggtatctatttaaacattcagtaggctgaaggatcattcagtcctaattgtttactaaacaaataataagtacctatattgccaggcactacggtaggacctagtctgaagaaaggaacacagttctatgagactatgaaaccaaagatttacccacgacttggtcagctgccccaggagccagaaaatacagcctagctgagatctgaagaaggaagggaaaactgcaggataaagaagagcatttgaaaaggcttctacggtagaacgcggcaagagccttcaagaaactgagggcccaagtgagtgccgcccgcagagtgaagaggaggacagctgctgccccgaggggagagggccccctctgcgagcccggggtggccgattcaggatctgaggcttcagcctgagaactaaagaggacgagaagaacacacctgttgtggcgggctttttcggggaggacgcgggttgggagattaactggaccggactagacctttaaaaaataactactatggctgcagtgtgttaaagaccgaggagaaacctgagaaagaacttatctccagtttctcctcacagaccctcagggtcagggaagaccctacactatttttacacagcctgggcttgccaaaaagtttttctcaggtataaaccaactaggggagcgtgtccttctcacctcgtcaatgacctcgtcctcttcatccttttccttgtcactgtcatcatcgtcttcatcctcattttcgacttctttttcctcttcctcgtcgcgctggactgggggatccggcggctgcggaaccccactttccacggcacgccgcttagacctggacgccatgttgccgctcacactgcgcctgcgcagcttccccttgcctgaccttccggaccagcccatagtagccaagggggtgaggaactacgaagaagctcggcgctgagtgcacgtcaaccccaatgcccctgctggattccgcagccatgaccccttacagtcacgtccagcttgcggtcccatcttgcttttttcttccgctttccaccctccatcactcctcccaaagcttcccctccccttcccgtagtggttcaacccatctaacctctggcctcattccgtggcctggatggcggtgcgcatgcgcgagcgcctagctgcgcgcagccacccacgcgaccccagtctgaggtgcggggtcctggggcccggcgcgggtggccgccgcggcccctcgggctgcgtggggagggggcttccgcccctgttgtcattgctcctgcagccttttcgctgggactgcgcgacaccgccccccgaccgggtgcccgctgtgtgccaggccgggtgctgggcacggtcccgcgaggtaggtgtcgccgcccgctgtaccggtacggacgccgaagcccgcgggcgtgcaggggcccggccccgggcggtgtgtgacacagtggggccagggccccgaggcttccgcggacctgggcctgcccaggcggggatgtccgctgccgctaccgctgcgccggtgacggaaggcgcctgcccagcctaccctcgccgagcttctggagcgcatttcttgacctaaaagtttttttaaagccggcaccgcagttaaaaatgcttcggcggggggccgggcccggtgtctcgcgcctgtaatcccagcacttagggaggtcaaagcgggtggatcaccagaggtcaggagttcgagaccagcctggccaacatggcaaaacctcatctctgctaaaagtacaaaaattagccgggcgtggtggcggacacctgtaatcccagcactttgggaggccgagatgggtggatcacttgaggtcaggagttcgagaccagcctgcccaacatggcgaaatcccatctctactaaaaatacaaaaactagccaggtgtggtggtgcgcgcctgtagtcccagctactcaggaggctaaggcaggagaatcgcatgcccccaggagacggaggttgcagtgagccgagatcgcgccaccgcactccacactccagcctgggcgacagaggtagaccctatctaaaaaaaaaaaaaaatgcttcggggccagtggggtagtctaggttaaagacccgagcctatttggagagaagagtggaggggactgcggccaactgcagagcgagcgccagcccctgtggcaggtggggatgcagcctggggcagccaggtcttcccattgcgagagaaacagggttcatcagctttctaggaataagatctgcggttctcaattgatttttctctgtaaaatgaggggggtgggttggatatgtttgattctaggaatggtgtgagctgcgctaataggctgcttctgtttaagcagggtaacatctgataaatcagtgatccttcatcagtacgagatggcgtgccctaaaggtccccaggagcccagattgcccataatcgtgttctgtgatttcggtctttcctgggagtctcttgtctacccagccatgtcatggatattaaagtaatacttacacatcagcgctccacatctgatggggcagcttgaaatggcctctttgggtcgcacaactgcaaaaacatgttcctgtaatggagaagagaggaagctgtcaaaaaagacccatcaaaaggctaagattagaaaaaagactcagaaagaccatgtgaacatatcaacagagttgcactgagataccatagccaattttttttcctgtttctttatactttttttatggtggtaaaagatacataacatacattttaccatcttaactatttttaaagatacagttcagtggcatgaagtgcattcacattgtgcaaccatcaccaccactat

SEQ ID NO: 913412 - DNA, 4001 bp, Homo sapiens
gatttttctcccgtctcaggacatttttttaaaatgaaagaacttctatactgcactgggagtacttaataaatattaaagatgtctgtaatattgcacagatagaaaatctttttggccgggcacagtggctcacgcctgtaatcccagcactttgggaggccgaggcgggtagatcacctgaggtcgggagttcgagaccagcctgaccaacatggagaaaccctgtctctactgaaaatacaaaattagccaggcgtggtggcacatgcctgtaatcccagctactcacaaggctgagccaggagaacccggctcacccaggaggtagaagttgtggtgagccaagatggcaccattgcattccagcctaggcaacaagagtgaaactccatctcaaaaaaaaaaaaaaaaaaaaagaaaaagaaaatattttctatcaataataatatcagaggatgctgatatctgttaggagctatttcaaacacactatcttcttaaactgtgcatcagccagtatcttcataaagatgaagagaaatgaatttttttttctcaaacccaaaagataaaatcttaggccactgttgggcatggtggctcacacgtgtaatcccagcccttcgggaggctgagatgggagggtcatttgagctcaggagtttgcgaccagcctgggcaatatggagaaaccccgtctctacaaaaagtacaaaagttagcccagcatggtggtgtgtgcctgtggtcccagctacttggaggctgaggtggaaggactgcttgagccccggaggcagaggttgcagcgagccgagattgtgccactgcacttcagcctgggtgatagtggcagaccctgtctcaaaaaaaaaaaaaatcttaggccagggtatgtgtgtgtaaacattcatgcagttactctaataaatgcttgaaatttaaactgtaagataaagaaaaggctaacagacagcatctgttaagaaaaatacagctcctacaaatacacacagcacattcaatataatgattgcacttaggatcaattataatgatcaatatatgtatatataaggatatgtatatatatatatggatcaacataatgattgcacttaggataagccaggtttctctgtagaactggtaactgcacaataacctagccgttttgtgctttccagttagatatttagcttattaatatatgtgttatgttactaaataaggaagtttattttgaatttactgttcactattttgaagtaaatatctttagtttttaaaaatgatactaaaaacattacagaatatattaattctgtctaattgaacatgagtgaacacggaaataacacagatttccaaatttacaatattgctatgtgttgttggcatatgcttgagaggagaaatattctaatttgagataaaactatttctacttcaaacccctgtgaaaattacaatatataaacaataaatcatattccagattttatgagaatgaacgaccaagcgagatttcaataacgcagagtcagcaaaatttactactttctcgagaggctacggaacagggtgtgtctggaagaggtcccaaaggaatcctgaaagataagcccacaggcaaatgcggtattaatttcagcaaccagacacatacgttcccggctagttaacaccacaattcaagcaagaggaggcatcttttctgtgtggtttccacccacagccctccccatcaggccgggtatgcctgcactgaagtccatgcagagactagccttctctggcacaggttggtggccgccacccctgaccccaggctccctgaacagagcagccatagccaggccacatggggcagatacccaccccggctctcaagtccatgccagcttgcttctctacactaactgacacatcacaggagaagggatgtgtctcctgccaaaggtcctgcctctgctctgtagatataatgctaggatagatacagtgctaccattagcaacaggaaggcgtcacaaggattctggaaccttctgagggcaaatctgctttgtcatgacctcagtttcagagttccagaacttatgcctatgaaaagtacatggctgaaaatacaacctgagttttgcataactttgtattttcattttgacaaccagcatcctaagctgcaggtggcaatgagggaggaaggtggcaggtgtgaggggttctggcggtgggctgcgcctgccgtgtgcagaaacatgtctcccaaaggcaaaacaaaacgaaacaaatacacaaaaaatcaggacgtcgggggactgaggaggaagaaacagtgctgaaaggaagagggcagaaggccagaagcaggtccctcctcagaggaagtaagctcacggcctagctcactgtggcatgttttaaaggatggaacacatcctttaaaggatggcacagtggctcacacctgtaatcccagcactttgggaggctgacgtgggtggatcacccgagatctggaatttgagaccagcctggccaacatggtgaaagcctgtctctactaaaaacacaaaagttagctgggcgtggcagcgcgcgcctgtagttccagctactcggaggctgaggcaggagaatcacttgaacctgggaggcggaggttgcagtgagccaaggttgtgccactgcactccagcctgggcaacagggtgagactccatctcaaaacaaacaaacaaacaaacaaacaacaactaaaaggatggaacacagaaaactgcagtaactgcagaagtctgtgctgagaggagagctgagaggtgagctgagagtcggcagggaaggttgaagaagggcagagtgtggaaagtttcttaggggagatgacgggacgttcaggaatggtctctggggtttactgagtcacactctcttcacccaaagcagcagaagcagctgagcaggtcacccctgcagctgctgcctaggaggagggagtcctggggctctactccacagcagggaatgatgagtgacaggctttggcagacaggaagaaagaggtttccttgcacatttggggcaggtggggcagaggatcagaaacgaggcctgaagactccaagtgacaatgacaaagaagctgagtcaacctaaataatctggggacagtgggtgctgggagcagatgagcaggccgagccgtagaagctcgttgagtgtggtgcagtgttagtgtgggacaggacaggctgggctattacacccacacctggtctcgcctcctaactacgcccacctgctactggatactagccaagccactgaatattctctggtttcctaaatcctaaagcaagagtctgaaccctaacccggggaggggcacatggtagtccaggaggggcacaggattttcaccatcaccaaggtgttaaccaagcactttgtggctctagaagtccttttcggaagacaggcttcttctatcatagtggaatccaagttctttgataaaaaaaaaaattggtgaaaagtatacaggagattgagattggaagcattcactgacttctactggtatttccagttatcattagtcaatgacttctccaggtatagataccaggaaaaggaagctctttggagcaacgagctctctagcgagacaggatgctataaggaaacctgtgcatttttcctgatctctttccaagacgctgaatccttttcagaaaaacaaacacaaaggaatcttactaaaatggatccatgccacgtgactaccttattggcagcctgaaatcctttggagtttagtaactatactccttggacaagatctaaaaagattgtatgctggattctccccctcactaaatttcaagactctactagatcacgttcctttacgcaaagaatttatgacacatagtcttgcaggatctgatacatgtgagggcaacacagaagtcaacacacaaggttgc

SEQ ID NO: 913413 - DNA, 4001 bp, Homo sapiens
agccttcaaattttcaaaaagtctcctcaaaatttcattttattcgaagtgaaaatgaattaaatcaaaaaaggaaattcacttctaaagctcaggttatacacttgaacttcccagaagctaacatcactgtccttacttgtttgtgcgcaggtgaaacagatcattctttcatatcactccaaactaatgtagaaaactgaaagctggttgaaaaggatgagtatgtgctactatcagttcattccaaacgatctcacaatatatgcctgacataaatttaatattttgttttataatcataaactaggcaaaaagaaccacagaacagacgaaataactgaaatgagttactgaaatgcaactggggctttaatttccaaatctatcttataacggtcttacttgaagagtttatcacagaagtaactgtcctcaaaagttacataatttgagaaaaaaagagagggaaggggagagacagagaaagacatgacacacattagggatgtttgtcaataaaaataagcaacaagggaggaaagcctgtagcacatccaaaaaacgtctgccaaacactcttgctatttgtttccaccaagttattgttttggaaaacatgttgttctctcttaaaataacctgcttaattgttctaaaaagccactgcatttccacagagggctaaatcattcccatactgcgatgcattgactgataaagtcaaagtaagttatgcataaagccacaaataacgtttgaaaaactccaaactcctccatgataaaagaacactagctactgaatgaatcttcaccagcgccctaagtgagactaacgcctggtcccgtacacgtattttaagaataacagtcattcaaactaactcatttctctctttggatgtgggaaatgagccacatcggtggctacaggtaggctagtaattatctgttttaagaaaggtcaaaatgaccttggacgttttgacgttcactccaacactcgtattataaatcagaatctgttttcggtccagtatggttgaagattttctacctgggaaagtcccaaagaaattaaagagttaaaaataattctaagttgtgaaagacaaagtcagacacccatagcataggaagatttttatggactgaatgtaactcaagatgtgttttataagcctgtcaagagatgaacactgtcctcaaacacagcagcactgcctccacactcccccctcgctttggctgctcaccccgatcctggccctccttgaccacaggggtgggggcgggagctcctgtcttaagccttgacatctgcagagcgtttcccaatagtgagacaaggcccctcagctggaggaagtggatactgacaaggggagagagtgaaacagacggagagagacagaactcgaggctgccagggaatggggagggtcacgcatactctgtgcggcccgagtggtccggatggcacagcccaggtgtccgggctaaagttggcatctccaaagtccagaacgcaacttgggcgcgccagtacaaactcggccttcggcttttctgaagccagtcaagttcgcacagggcccccagcgcctggaaatctgagaggcgtggaagggtggggagtcccgcgaagtctccagtccctgggtgtcctccggctccgcgggggagcgggcctggagctaaaccggccggccgtaggctggagtagcgggcgccggagcgcgcggtggggatgtccgaaaaggagttagaggctcagtcggagagtccgagaacacgagggatgcctaccttgtaacatggcctcaagtttcttcctgtccacgcggaagcgctcctcgctccactccgggctgtgcagggtcgccccggcgaccaagtcgtcctcggagccgggcactggggagtcggtgctgcgctcgctgttggagccggggtccgactgcgccgccaggtagccgggctctccctgggcggccatggtgggcgcgcagcgctcgggctcccgctgccgccgccgctctgcctgcgctgccgcctccgctcgccggccgggctcaactggctcccagcgccgcggcgctagctcgtccccctgcagccgccgacgccaccgccaacgccgccgccgccactgagcccccggcgcatcccagccccgggcgccgcccacgccacccgccaccccgggtcgcggccccggtccgggtccagtggctgcgccgccccccgccagcaacgcccgcgcggaatgagcgcgccgcgctgcccgcgcctccatccgcagggctcggcgccccctccccgcccgccgcccctacagccgcgcgctcattggcccggccagcccacggggagccgcggcgggcgggcggcccctggcgctcacacactcgcgcgcgcacacacacaccacgtacacactgccactttctgcacttacacgtataaatcctttccatacatgcactttcatagctcctcaaacacacacactcctgaacgcacatggagtatccacgtaattcctgtctacacacacacatcacacacactactacttttctgcacttacacatacaaatctcttccccctacatgctctcataatcctccaaacacacaaacacaaacacgccaagttcaagcacagcagagtcctgaacgcacactaagcgcatacacaattccgctgtttacatacataccctacaccctgaaactcacagccccagttggttccacaagctcgaacgtgaggaagaggaaaaagaaggcttggagaagaaatcatgcccgtctttcgcaggcatcgccatggacgtggctcgcatgtagttcatacctccaggaagggctcaaacccagacacctcgtctcctcccagcaaagtggcccgctgcacgagaggtggacaagaggcttactctttttattctgagaaagggaatttttttttttcttgaatggagtaaggaaggaattgttttctctgtgattctcaaggaatggactcagcagacttttttttttttttaagtagaaaaggggctcggagatcgctgtgttggcgagctggatccagctggcacgtgggcagggctgtcttgtcagggactgagggcttttctctgttttcaaggtcagtctctgacagatgacggccagtaacctctgagcctcactgccgagggccagcccacccacggcctctgtcaagcttggatatgaagcgcgggggaagaggagactcgctcgtactgggtgtgcccttggaactctgttttcccagttcacacagattcatagcctattattttatgacccaaagtacaaagacttgcggggaggaatgatggggatagcagtttgtcactgcgccacagaaggaggctgcctggctcacatgtaggaagagccatatcactggcacaggcctctggataatcatggaatatgctgaaggtaaatcaaaattatttcaggttcagctgcctagttaacaggaattgaccctgtgatgggtacagatgaggaaactgagaccgtgggaaataaagtaacttgactaaggttgtccagcagcagataatacagccaattaatcagacccaggtctgtgggtctttatataaagtcttacctttttgagcggagacccctcctgcccagagtcacctcctgaagaactgagagcatctgcacacttaactgctctgattcaccaccatgtgttccttttataaacttgttaattactgttaatttctatccaaggcactagtttcagcacccaaagggtttatgtaggagcattcccactgttttccatcagggacatttactgtgtttttctatcaacaaatatttattgggaccctactatgtacttggcactgttaagcccaaggaatagtaagcaaagacagacacatccctgtactccctcctggagctgaaattctaatgagaaggaatact

SEQ ID NO: 913414 - DNA, 4001 bp, Homo sapiens
cgctcctccctcccaccagatccctgcctccagtgtccctcccactccaacgcatcctaccaggctcctttaagcctactgtcatgacattgctaacagctaacagcataacctgttctccaactccctatggtcagggcactcaccatcctttgcaacctggacccaccttatttgtccaatcataccaggaccttcaggtcccacattccctactctttagtttctgctggacagaaaactctcctcactatcccacaaatggaccgtacttgtgttaagctttgagtgacagcctctgtatttcctccctcccagcacataacatgtttcctccaattctccagtattttataattttacccacctctcaaagcctacctcttaaaagtatcttctctatgaaacctcctcctgctactctaagtctcttcttacattccttctgtcgcttacagcttccattgtatcacccccgcccctcatgagggtgtagctatttgagaccaagggcaagaatgaggtgccttcttgtcccgtcagtgctgatcacacagcagcactcaacagcatgttcttgaaatggttgaacacagctgatgttgcctactgatcccagatcattgatgcatttcacattaccttttaccaagcacctcctaggcataagacctgtattctactgtgaagggttgtccctctgccaatccagactttctcttaaatattgtctcaaaagcttcaattctctggctcattgttatctgtgattacttgtctgctacatgtgtcacatcaccccctgaacatttggctaagttctaatatgtagtcagaatagaaaacactccctgaacagaggggaacatcacacaccggggcctgtcaaggtgggggactaggggagggagagaattaggagaaatacctaatgtagatgacaggtcgatgggtgcagcaaaccaccatgggatgtgtatacctatgtaacaaacctgcaccttctgcacatgtaccccagaacttaaaagtataataaaaaaaaaaaactgttaaaaaatgtgaaaaaaaaactgcactcccagaactttaaaagttccagtctctgaaagccatgatgccattacaatgagacaaaaagaagaccttcaaaagcaaaatttggggaagttgtcttttccatagctccttgactcacgcccatggggccgcttctggtttattctttttgagaggcttgttatggatattgttacattgacatgagggcattggaaagacagatctaatccccccaaacacacttgtcatatacacccacaaaataaatgagacaataaaacaatgaataacaaatgattacagctatccttaaaattaaatagtaacctgcaataaaatgggtgaggactcagtttagagaaacccttccttagaaaagttggttgcattcagattctaaaagttgaccttcagtagaatctaagcccttggcatttgttttattatctttccagagctttacactttattgtaagaggcagctaaagcaagtctctcttgttcctacacatttctttaagaactcagttcacttccctatagcaagtgccacccaatgctttccctaaaagctcagtccacttccctatagtaagtgccacccactggaaactagcaaagcattccaggatttcagtatttctgagatgccataagagcactggggggaaaaaaaggagatgaagaagggtattgggtggggaaaatcttacctcaacttctgactggcggggacggttattttattaagcttgtccattctgtttggtaattgtaagagacacgaataactgtccagtggtcacgtcagcagttcctggccctcctagggagcagcatggtaagcctctggtctcaagggttccggccactcaagtctgatttctgagagtgcaggctgctggcaaacacccctgctctagggagaagtaaaacttgcccgagcacatagtcaagtttcatgtttctacataatcatgtgatctggatagccagccagcttggtgattactccactttgtgtaaactttaataatgaaacctattgggcaggcaaatttctttccagctgctttcttttacaatcagatttgtaaccaggttaggacaagtttctggctggtcactacttcctgtttgtcccaaacacatatagtctgtttccagcaggtgcatgctataactgggaacttcctgggctcaaggaaaagcagagtaatcaagtccatctgaacctctcttggagactttctgcttatttgcataaagttatggataagctttttctacttatagaaccattatataaaaatggcatttttgtgctttttcctaccccccgatgcgggcaatacgtttaaaaataaatatcaggttgtcagtggcatggtggtaacagtttactcagagaattagagtatctctttttctggagctctatttaaaatgggatgggcaattctctgttcatctgggggtagggatggatgactcaggaaaggggagatgaactctatcgtcagatgtgcagcctccttattgcctgatagagtcaggagttacctcgccgatagccagatgctttcaaacaaaccaggatgtacccaaaagtcagatgagaacaaatctaacagtttcacaacaatgcaattcctacatcaggccattctgaagtcctaaaagcagaatgccattcccctccttgcatttgcctctttctgtcctgtccaccacttgctcatcacacccagtgacacgccagacacgaggccatctcaaggtcagacaggtggggtgaggctgggaggagggagccatacctgtaggggctgaacctattcagagaactctacttccctcctggaagactttatatttccttctgcctaatctgaaaaatgctgatttacctgttgtttaaagagcagcccgcagtccagggtcaaggaggaagaaaatgggagggaagtgaccttttgtacctggacacacttttctgcagccattgagaatgccctgctcacccttgtggaataaagtacacgtttccaacatttatcaagggaaccagtcttctcctgggtcagaatacacagcaggacaaagtaaagagctctcagttacctctcctgttgcagacccaagatctggctgaagacagtggggaaagaggagaagacagaagaggagaaggaggtggaggaagaggaggaggaggaggaggaagaagcggaggaggaggaggaagaagaagcggaggaggaggagacagaggaggagggggagaaggaacagcggcagtggtagaggtggaaaccgtggatggatttcttccctcctgtgcctcttctttgcacaaatggatgttctgtctttttccaggtaaccttgattattcacattcatcactgcctatgaatttctggtttgaccagatgtttaggagcagaatcttcagagctgttgaagggtggggcccttctgcttggccaggacactgacttggccaggccagcaagagagcagacaatgttgcatgagaaaaatgcaagtgcttgtctcctgccatcattcattttccccaatctggctgctcaattttcttgcagtgcatcctgaaggagctctagaccctgcctcctcctctcccatagttcctaactgaaagaaacaagtagactaggatggtaaaggcacatacaatgtcatcaaagatcaggaaattcaggcttcactgaatgaaatgataatagtcagctcgttctttctgaattattgtaaaatgcaccccataagtcacttgacttttctctccaccaacaactttgctcaacacctggctgacaacttcatatttccccagagaaaaagaccagaggcaaaggttacacttctgctttttctttttacagccactggtctttcttctttttactgta

SEQ ID NO: 913415 - DNA, 4001 bp, Homo sapiens
ccttctcactgccatgtcccaagtccaggcctacaaccctggatgcttgggttacttaagcgctcctccctcccaccagatccctgcctccagtgtccctcccactccaacgcatcctaccaggctcctttaagcctactgtcatgacattgctaacagctaacagcataacctgttctccaactccctatggtcagggcactcaccatcctttgcaacctggacccaccttatttgtccaatcataccaggaccttcaggtcccacattccctactctttagtttctgctggacagaaaactctcctcactatcccacaaatggaccgtacttgtgttaagctttgagtgacagcctctgtatttcctccctcccagcacataacatgtttcctccaattctccagtattttataattttacccacctctcaaagcctacctcttaaaagtatcttctctatgaaacctcctcctgctactctaagtctcttcttacattccttctgtcgcttacagcttccattgtatcacccccgcccctcatgagggtgtagctatttgagaccaagggcaagaatgaggtgccttcttgtcccgtcagtgctgatcacacagcagcactcaacagcatgttcttgaaatggttgaacacagctgatgttgcctactgatcccagatcattgatgcatttcacattaccttttaccaagcacctcctaggcataagacctgtattctactgtgaagggttgtccctctgccaatccagactttctcttaaatattgtctcaaaagcttcaattctctggctcattgttatctgtgattacttgtctgctacatgtgtcacatcaccccctgaacatttggctaagttctaatatgtagtcagaatagaaaacactccctgaacagaggggaacatcacacaccggggcctgtcaaggtgggggactaggggagggagagaattaggagaaatacctaatgtagatgacaggtcgatgggtgcagcaaaccaccatgggatgtgtatacctatgtaacaaacctgcaccttctgcacatgtaccccagaacttaaaagtataataaaaaaaaaaaactgttaaaaaatgtgaaaaaaaaactgcactcccagaactttaaaagttccagtctctgaaagccatgatgccattacaatgagacaaaaagaagaccttcaaaagcaaaatttggggaagttgtcttttccatagctccttgactcacgcccatggggccgcttctggtttattctttttgagaggcttgttatggatattgttacattgacatgagggcattggaaagacagatctaatccccccaaacacacttgtcatatacacccacaaaataaatgagacaataaaacaatgaataacaaatgattacagctatccttaaaattaaatagtaacctgcaataaaatgggtgaggactcagtttagagaaacccttccttagaaaagttggttgcattcagattctaaaagttgaccttcagtagaatctaagcccttggcatttgttttattatctttccagagctttacactttattgtaagaggcagctaaagcaagtctctcttgttcctacacatttctttaagaactcagttcacttccctatagcaagtgccacccaatgctttccctaaaagctcagtccacttccctatagtaagtgccacccactggaaactagcaaagcattccaggatttcagtatttctgagatgccataagagcactggggggaaaaaaaggagatgaagaagggtattgggtggggaaaatcttacctcaacttctgactggcggggacggttattttattaagcttgtccattctgtttggtaattgtaagagacacgaataactgtccagtggtcacgtcagcagttcctggccctcctagggagcagcatggtaagcctctggtctcaagggttccggccactcaagtctgatttctgagagtgcaggctgctggcaaacacccctgctctagggagaagtaaaacttgcccgagcacatagtcaagtttcatgtttctacataatcatgtgatctggatagccagccagcttggtgattactccactttgtgtaaactttaataatgaaacctattgggcaggcaaatttctttccagctgctttcttttacaatcagatttgtaaccaggttaggacaagtttctggctggtcactacttcctgtttgtcccaaacacatatagtctgtttccagcaggtgcatgctataactgggaacttcctgggctcaaggaaaagcagagtaatcaagtccatctgaacctctcttggagactttctgcttatttgcataaagttatggataagctttttctacttatagaaccattatataaaaatggcatttttgtgctttttcctaccccccgatgcgggcaatacgtttaaaaataaatatcaggttgtcagtggcatggtggtaacagtttactcagagaattagagtatctctttttctggagctctatttaaaatgggatgggcaattctctgttcatctgggggtagggatggatgactcaggaaaggggagatgaactctatcgtcagatgtgcagcctccttattgcctgatagagtcaggagttacctcgccgatagccagatgctttcaaacaaaccaggatgtacccaaaagtcagatgagaacaaatctaacagtttcacaacaatgcaattcctacatcaggccattctgaagtcctaaaagcagaatgccattcccctccttgcatttgcctctttctgtcctgtccaccacttgctcatcacacccagtgacacgccagacacgaggccatctcaaggtcagacaggtggggtgaggctgggaggagggagccatacctgtaggggctgaacctattcagagaactctacttccctcctggaagactttatatttccttctgcctaatctgaaaaatgctgatttacctgttgtttaaagagcagcccgcagtccagggtcaaggaggaagaaaatgggagggaagtgaccttttgtacctggacacacttttctgcagccattgagaatgccctgctcacccttgtggaataaagtacacgtttccaacatttatcaagggaaccagtcttctcctgggtcagaatacacagcaggacaaagtaaagagctctcagttacctctcctgttgcagacccaagatctggctgaagacagtggggaaagaggagaagacagaagaggagaaggaggtggaggaagaggaggaggaggaggaggaagaagcggaggaggaggaggaagaagaagcggaggaggaggagacagaggaggagggggagaaggaacagcggcagtggtagaggtggaaaccgtggatggatttcttccctcctgtgcctcttctttgcacaaatggatgttctgtctttttccaggtaaccttgattattcacattcatcactgcctatgaatttctggtttgaccagatgtttaggagcagaatcttcagagctgttgaagggtggggcccttctgcttggccaggacactgacttggccaggccagcaagagagcagacaatgttgcatgagaaaaatgcaagtgcttgtctcctgccatcattcattttccccaatctggctgctcaattttcttgcagtgcatcctgaaggagctctagaccctgcctcctcctctcccatagttcctaactgaaagaaacaagtagactaggatggtaaaggcacatacaatgtcatcaaagatcaggaaattcaggcttcactgaatgaaatgataatagtcagctcgttctttctgaattattgtaaaatgcaccccataagtcacttgacttttctctccaccaacaactttgctcaacacctggctgacaacttcatatttccccagagaaaaagaccagagg

SEQ ID NO: 913416 - DNA, 4001 bp, Homo sapiens
taatcaggctgataacttacagagtcacagctgggtgcagtggctcacacctgtaatcccagcattttgggaagctgaggtgttaggatcacttgaggccagcttgggcaacggagcagacctcatctctattatttatttatttaggacagagtctccctccatcacccaggctggagtgcaatggcacgatcacagctcactataacctccacctctcaggtcaagcgattctcccgtgtcagcctcctgagtagctgggattataggcgtgtgccaccacacctggctaatttttgtatttttagtagaagcagggttttgccatgttgagcaggctggtctggaactcctgacctcaggtgatccacctgcctaggcctcccgaagtgctgggattacaggcatgagccaccgtgcctggccatatttttttaaataataataataataaaagaaaagtaatgaagatctcaggcagagtggtggtaaaaggaatggaaaggagagcatgggtgcaagaacattacagaagtggaatttataggacttgttcaagtagatattgagggatggaagcagactaagatgtatctggggttttaagcctgggtggtgccatcaaccaaaatagatggaaagaggatcacttgagctcaggagttcaagaccagcccaggcaacatagtgagaccctgtctcttaaaaacagaaaaagaaaaaaaaaaattacagattcacaacccctactattctgtatcaagccttttctcatagattctgattcacaaatttagcttacagtaatttcctggggaagtgaaacaatttaataaatgtttttgagatgctgtactggaccagacttcactttctttctttttcttttttctttctcattttttttgagatggagtcacactctgtcgcccaggctggagtgcaagtggtgtgatctcagtccactgcaacctgcaacctccacctcctgggttcaagcgattctcctgccccagtctccccagtagctgggattacaggcgcccgccaccacggccggctaatttttgtatttttagtggagacaggatttcgccattttgcccaggctggtctcaaactcctgacctcaagtgatccaccagcctcggcctctgggattaaaggcatgagccaccgcgccctgcccatacttcactttctgatcctcctccacacataggtcatgtgtccacttggaaacgatcaaacactagtcatgtcccaaaggatgggttatcaaatcctcagaccaaactaataggtccctaaatctgcaggtcactccccgttcctcaatttcatttctctttatcccggtaaacacatcttctgctttagccaaacacactgcttgcacataccacctcattcgctagttgtatcatctcccccttttccaccaataattcccttcacaaccctgctcaaaatacactttccccaaggaagcacttcttgattactgttgctggatatgaactcttttttgttattgttttctcattagtctatgttacagaggcctgcagagttgtattttctttctctcccattcatggcctcccccaacttccaacaggcctgtctcagggcatgcagggtaggaagggagctgcagactgatgctgctaaccatctcccaggcctcctgggccaaaccgcacccgaatcaacccagaccccgcctcacccgtcagttccccagtcaggtaagtggccattttggagaacatgtcccggcagagctcagtgatgtcagcttcagcaggctcctttgcttcctcagctgtctccacggcggcatcgtctgggccaagggagaatgactaagtgtcccgcctacacccggtgctaatccagccaaagcagcctgttccgacatccctccacttgccttcattccatcaagtcggctccattctccatctgccataatttcaagtccttcactgcgtccctgcccatctgacacatcaactcgcctccctcgcaccgcccctcgcccatacccggcacccccgctcatcctggcaccatcccagtcaccctgacaggacaaacactcgcgcgcagcgacaagtgcactcctctcaccagcccgttcctgccaggtgagccaccacacactcaacctcgcccacccgagacggagccccaggccccccaccggacgcttcctccccatccattccgggtacctcgggcgggctcatcactccgggtcgccagtacgccctcggctgccgccgccatagcggaccccgcgctgtttccgggccggggtgctgcgcatgcgcactgggtgtgccccgcccacccggccggccctgcagtcctgcgcctagcggtccagtccagcctcaggtctatgacacagcaaagggcgattccggagccgaaattgaagctacgccaggctgttgtgaattgatccactgccaacagtcgcgacgtctgggactgagggcgagctcatccctacagtcacaccctggagggatcactcatcttgtaccactcacgacccgtctgggaatagtcaaccctgtttgtggcctgctgaccaaaaccactgaagacggattgcccgctctcctgacactccgcactggagttagtcatcaaaagattgctcagggaatccaaagttttacaggttgtctcgtccacactttgggaaaccttcaggcattgatccctggtcctaaatactgtccctcccaatgtcctgagttaacaccaactcactggcccctatttcttaaactgcaggcaggcatctacttctcttcagttgatacagccttccttgaagaaagcttagactgtaacttttttagggctgaggatacactctggttatcttaattgcatttaagctgtttcacaagcctcctaggtgtacagagtacttaatgggatgggagaacaggagtgagtgaaagagatggatgagaagaagtgactggggagcaattgaaggtgcaaaatgaggagggataaaggccacagaagaagggataggagatattcagcaggcctcaggcaggctcctggacacccaaaatcttggtagtttcttttcttatccctggttatcctccctctgcaccctctcaccccaccccgatgccagtacatacacacacacgccagctaccccttatccccagccctcctaccctgactgtctccaccctgaggactgagtctcacttgtcacctgtccccacttttcctatggtgcaaccatagtagccactatttcaagccattcctgcgagccagaagttcttttttttgaaacagagtctcgctctgtcacccaggctggagtacagtaacgtgatctcggctcagctcactgcaacctccacctcccgagttcaaacgattctcatgcctcagcctcccaagtagctgggataacaggcacgcgccaccacacctggctaatttgtttgtatttttattaaagacaggatttcagcattttgcccaggcttgtctggaacttctggcctcaagtgatccacccaacatagcctcccaaagtgctgggattacaagcgtgagtcactgtgctaggcctagaagttcttatagcccagctccttcacatcactgcacctactctatacctcctagagagcatgaacctattccagcccaggcacatggatgacccacaatttcagcctttcttccctctataataccagaagcaaatgcaaagtccaagttttcctaaggagttttattgatagccaccatggaaacccacatggtcttatggaagaataatgtcagaacccaccacatattaattcaaagatctctgaatcctgagttcatttccttgcctgattcccttcaggctccatttttatctcctggttaaagcccactcagtttccaggttcagtggaccaggaggcagcctcttgcagaagatcctt

SEQ ID NO: 913417 - DNA, 4001 bp, Homo sapiens
actcctgacctcaggtgatccacctgcctaggcctcccgaagtgctgggattacaggcatgagccaccgtgcctggccatatttttttaaataataataataataaaagaaaagtaatgaagatctcaggcagagtggtggtaaaaggaatggaaaggagagcatgggtgcaagaacattacagaagtggaatttataggacttgttcaagtagatattgagggatggaagcagactaagatgtatctggggttttaagcctgggtggtgccatcaaccaaaatagatggaaagaggatcacttgagctcaggagttcaagaccagcccaggcaacatagtgagaccctgtctcttaaaaacagaaaaagaaaaaaaaaaattacagattcacaacccctactattctgtatcaagccttttctcatagattctgattcacaaatttagcttacagtaatttcctggggaagtgaaacaatttaataaatgtttttgagatgctgtactggaccagacttcactttctttctttttcttttttctttctcattttttttgagatggagtcacactctgtcgcccaggctggagtgcaagtggtgtgatctcagtccactgcaacctgcaacctccacctcctgggttcaagcgattctcctgccccagtctccccagtagctgggattacaggcgcccgccaccacggccggctaatttttgtatttttagtggagacaggatttcgccattttgcccaggctggtctcaaactcctgacctcaagtgatccaccagcctcggcctctgggattaaaggcatgagccaccgcgccctgcccatacttcactttctgatcctcctccacacataggtcatgtgtccacttggaaacgatcaaacactagtcatgtcccaaaggatgggttatcaaatcctcagaccaaactaataggtccctaaatctgcaggtcactccccgttcctcaatttcatttctctttatcccggtaaacacatcttctgctttagccaaacacactgcttgcacataccacctcattcgctagttgtatcatctcccccttttccaccaataattcccttcacaaccctgctcaaaatacactttccccaaggaagcacttcttgattactgttgctggatatgaactcttttttgttattgttttctcattagtctatgttacagaggcctgcagagttgtattttctttctctcccattcatggcctcccccaacttccaacaggcctgtctcagggcatgcagggtaggaagggagctgcagactgatgctgctaaccatctcccaggcctcctgggccaaaccgcacccgaatcaacccagaccccgcctcacccgtcagttccccagtcaggtaagtggccattttggagaacatgtcccggcagagctcagtgatgtcagcttcagcaggctcctttgcttcctcagctgtctccacggcggcatcgtctgggccaagggagaatgactaagtgtcccgcctacacccggtgctaatccagccaaagcagcctgttccgacatccctccacttgccttcattccatcaagtcggctccattctccatctgccataatttcaagtccttcactgcgtccctgcccatctgacacatcaactcgcctccctcgcaccgcccctcgcccatacccggcacccccgctcatcctggcaccatcccagtcaccctgacaggacaaacactcgcgcgcagcgacaagtgcactcctctcaccagcccgttcctgccaggtgagccaccacacactcaacctcgcccacccgagacggagccccaggccccccaccggacgcttcctccccatccattccgggtacctcgggcgggctcatcactccgggtcgccagtacgccctcggctgccgccgccatagcggaccccgcgctgtttccgggccggggtgctgcgcatgcgcactgggtgtgccccgcccacccggccggccctgcagtcctgcgcctagcggtccagtccagcctcaggtctatgacacagcaaagggcgattccggagccgaaattgaagctacgccaggctgttgtgaattgatccactgccaacagtcgcgacgtctgggactgagggcgagctcatccctacagtcacaccctggagggatcactcatcttgtaccactcacgacccgtctgggaatagtcaaccctgtttgtggcctgctgaccaaaaccactgaagacggattgcccgctctcctgacactccgcactggagttagtcatcaaaagattgctcagggaatccaaagttttacaggttgtctcgtccacactttgggaaaccttcaggcattgatccctggtcctaaatactgtccctcccaatgtcctgagttaacaccaactcactggcccctatttcttaaactgcaggcaggcatctacttctcttcagttgatacagccttccttgaagaaagcttagactgtaacttttttagggctgaggatacactctggttatcttaattgcatttaagctgtttcacaagcctcctaggtgtacagagtacttaatgggatgggagaacaggagtgagtgaaagagatggatgagaagaagtgactggggagcaattgaaggtgcaaaatgaggagggataaaggccacagaagaagggataggagatattcagcaggcctcaggcaggctcctggacacccaaaatcttggtagtttcttttcttatccctggttatcctccctctgcaccctctcaccccaccccgatgccagtacatacacacacacgccagctaccccttatccccagccctcctaccctgactgtctccaccctgaggactgagtctcacttgtcacctgtccccacttttcctatggtgcaaccatagtagccactatttcaagccattcctgcgagccagaagttcttttttttgaaacagagtctcgctctgtcacccaggctggagtacagtaacgtgatctcggctcagctcactgcaacctccacctcccgagttcaaacgattctcatgcctcagcctcccaagtagctgggataacaggcacgcgccaccacacctggctaatttgtttgtatttttattaaagacaggatttcagcattttgcccaggcttgtctggaacttctggcctcaagtgatccacccaacatagcctcccaaagtgctgggattacaagcgtgagtcactgtgctaggcctagaagttcttatagcccagctccttcacatcactgcacctactctatacctcctagagagcatgaacctattccagcccaggcacatggatgacccacaatttcagcctttcttccctctataataccagaagcaaatgcaaagtccaagttttcctaaggagttttattgatagccaccatggaaacccacatggtcttatggaagaataatgtcagaacccaccacatattaattcaaagatctctgaatcctgagttcatttccttgcctgattcccttcaggctccatttttatctcctggttaaagcccactcagtttccaggttcagtggaccaggaggcagcctcttgcagaagatccttcatagactttgctccgggagtgcctcacacttaactcctctgcaacgttggaatctcaccacgggagagtctcctctcctctaaggcttcctcttctcttttatagggaacctctgtgggggaaaacgagaaacccatgggtgctagcaacaaatcttgggatgcacaaaggataagaataggattcactgggaagtaggaagacatctagataccgcctactctcttggtttctacctttttcacagaccatggctatccaggtgcttaggaagagccattaccctccctctctttatcctgtttgttaacttttttttttttaattaacacacagagctaagtaca

SEQ ID NO: 913418 - DNA, 4001 bp, Homo sapiens
acttacagagtcacagctgggtgcagtggctcacacctgtaatcccagcattttgggaagctgaggtgttaggatcacttgaggccagcttgggcaacggagcagacctcatctctattatttatttatttaggacagagtctccctccatcacccaggctggagtgcaatggcacgatcacagctcactataacctccacctctcaggtcaagcgattctcccgtgtcagcctcctgagtagctgggattataggcgtgtgccaccacacctggctaatttttgtatttttagtagaagcagggttttgccatgttgagcaggctggtctggaactcctgacctcaggtgatccacctgcctaggcctcccgaagtgctgggattacaggcatgagccaccgtgcctggccatatttttttaaataataataataataaaagaaaagtaatgaagatctcaggcagagtggtggtaaaaggaatggaaaggagagcatgggtgcaagaacattacagaagtggaatttataggacttgttcaagtagatattgagggatggaagcagactaagatgtatctggggttttaagcctgggtggtgccatcaaccaaaatagatggaaagaggatcacttgagctcaggagttcaagaccagcccaggcaacatagtgagaccctgtctcttaaaaacagaaaaagaaaaaaaaaaattacagattcacaacccctactattctgtatcaagccttttctcatagattctgattcacaaatttagcttacagtaatttcctggggaagtgaaacaatttaataaatgtttttgagatgctgtactggaccagacttcactttctttctttttcttttttctttctcattttttttgagatggagtcacactctgtcgcccaggctggagtgcaagtggtgtgatctcagtccactgcaacctgcaacctccacctcctgggttcaagcgattctcctgccccagtctccccagtagctgggattacaggcgcccgccaccacggccggctaatttttgtatttttagtggagacaggatttcgccattttgcccaggctggtctcaaactcctgacctcaagtgatccaccagcctcggcctctgggattaaaggcatgagccaccgcgccctgcccatacttcactttctgatcctcctccacacataggtcatgtgtccacttggaaacgatcaaacactagtcatgtcccaaaggatgggttatcaaatcctcagaccaaactaataggtccctaaatctgcaggtcactccccgttcctcaatttcatttctctttatcccggtaaacacatcttctgctttagccaaacacactgcttgcacataccacctcattcgctagttgtatcatctcccccttttccaccaataattcccttcacaaccctgctcaaaatacactttccccaaggaagcacttcttgattactgttgctggatatgaactcttttttgttattgttttctcattagtctatgttacagaggcctgcagagttgtattttctttctctcccattcatggcctcccccaacttccaacaggcctgtctcagggcatgcagggtaggaagggagctgcagactgatgctgctaaccatctcccaggcctcctgggccaaaccgcacccgaatcaacccagaccccgcctcacccgtcagttccccagtcaggtaagtggccattttggagaacatgtcccggcagagctcagtgatgtcagcttcagcaggctcctttgcttcctcagctgtctccacggcggcatcgtctgggccaagggagaatgactaagtgtcccgcctacacccggtgctaatccagccaaagcagcctgttccgacatccctccacttgccttcattccatcaagtcggctccattctccatctgccataatttcaagtccttcactgcgtccctgcccatctgacacatcaactcgcctccctcgcaccgcccctcgcccatacccggcacccccgctcatcctggcaccatcccagtcaccctgacaggacaaacactcgcgcgcagcgacaagtgcactcctctcaccagcccgttcctgccaggtgagccaccacacactcaacctcgcccacccgagacggagccccaggccccccaccggacgcttcctccccatccattccgggtacctcgggcgggctcatcactccgggtcgccagtacgccctcggctgccgccgccatagcggaccccgcgctgtttccgggccggggtgctgcgcatgcgcactgggtgtgccccgcccacccggccggccctgcagtcctgcgcctagcggtccagtccagcctcaggtctatgacacagcaaagggcgattccggagccgaaattgaagctacgccaggctgttgtgaattgatccactgccaacagtcgcgacgtctgggactgagggcgagctcatccctacagtcacaccctggagggatcactcatcttgtaccactcacgacccgtctgggaatagtcaaccctgtttgtggcctgctgaccaaaaccactgaagacggattgcccgctctcctgacactccgcactggagttagtcatcaaaagattgctcagggaatccaaagttttacaggttgtctcgtccacactttgggaaaccttcaggcattgatccctggtcctaaatactgtccctcccaatgtcctgagttaacaccaactcactggcccctatttcttaaactgcaggcaggcatctacttctcttcagttgatacagccttccttgaagaaagcttagactgtaacttttttagggctgaggatacactctggttatcttaattgcatttaagctgtttcacaagcctcctaggtgtacagagtacttaatgggatgggagaacaggagtgagtgaaagagatggatgagaagaagtgactggggagcaattgaaggtgcaaaatgaggagggataaaggccacagaagaagggataggagatattcagcaggcctcaggcaggctcctggacacccaaaatcttggtagtttcttttcttatccctggttatcctccctctgcaccctctcaccccaccccgatgccagtacatacacacacacgccagctaccccttatccccagccctcctaccctgactgtctccaccctgaggactgagtctcacttgtcacctgtccccacttttcctatggtgcaaccatagtagccactatttcaagccattcctgcgagccagaagttcttttttttgaaacagagtctcgctctgtcacccaggctggagtacagtaacgtgatctcggctcagctcactgcaacctccacctcccgagttcaaacgattctcatgcctcagcctcccaagtagctgggataacaggcacgcgccaccacacctggctaatttgtttgtatttttattaaagacaggatttcagcattttgcccaggcttgtctggaacttctggcctcaagtgatccacccaacatagcctcccaaagtgctgggattacaagcgtgagtcactgtgctaggcctagaagttcttatagcccagctccttcacatcactgcacctactctatacctcctagagagcatgaacctattccagcccaggcacatggatgacccacaatttcagcctttcttccctctataataccagaagcaaatgcaaagtccaagttttcctaaggagttttattgatagccaccatggaaacccacatggtcttatggaagaataatgtcagaacccaccacatattaattcaaagatctctgaatcctgagttcatttccttgcctgattcccttcaggctccatttttatctcctggttaaagcccactcagtttccaggttcagtggaccaggaggcagcctcttgcagaagatccttcatagactttgctc

SEQ ID NO: 913419 - DNA, 4001 bp, Homo sapiens
tgttaacatatagagtctcataacttgttatatactgtcaataatttgcatccttaaatatcaactgtttagtgtagcttataatgtgtttccagaacatgggagttaaggttcctataaaatataggttgaactactcataacgttgtacacaccaccaacctacacttgcatttggataaatatgctcggaattttgcccacattaagggaaggggttaatacatgcttctctttcatatattgaaccgtgaccactaagcccactaaatccttttattgcaagtggtaatgatcaaagtctctctacttgtttacttccaattattaactgtaaatctctgggaaaaagatcatgccatatcactgtcaagcccaagtgactgcgtaaacatatgcaatcaactttttagtgctcttttctaaagcatccctttgccaaatgacctatgctgacatttagcaaaacctgtaaaagatagtggactggagtcatgatgctgagtgcatcctttagtagaagtcgagagaaaagttgcagtctccaaaaggggaaaaaagaaaaaggagaaaaagaagtagtgagaaagcaagcctccagcaaagctaacgtccagtcaccatcttcactccacaaaaagctccaaatttgaaatgcccacttcccagggagcacctcccaagcgatgttcagagcacttatccaagactcccaacacacaccaccttgaaaacttcagcattttaaacacaaatgcaggagaccttggaaacaactgggaaccgccatcttaccagccatccaatctcagacaagtgtccccccaacttaagttaataacattttcgtcggggctctctccagcctaacacccaccttggcgggatggccgccccccacgcaacccgtccctataaaatgggggcgttctctggctgctggagcccctccagagccctttcttcgggagaggagggaagccacttgacccaagcagctcccgatttcaggaacccgtccccgtttcatccaaatctacctctcaacaaagggcgctgcggccgggagagccgccgaggctggaaataccagtactcctctcgggggccatgtgcgtcgcgagggtgcggaggggcgcccgggggagcggggaactaaaacgtggggccgcgcgcggcgcgccggggctgagcgggcggcggcggctggagcggcgccgagccctgctggcggcggcggcgcggcgcgggctgcgggtcggtcccggcgccgcgggagtcggcgggcggcggcgggcgcgcgctcgcgggcgcggggagggcggcgcgcggggccggcaggcgcggggcgggcggcgcggggcgcggggccgggcgcccacgctgtcagcgccctcccggcggcgcggccggggcgcggggggggctccccttccacccgcggccgccccgagccccgcgcggcccccgccggcccccagccccgtcccgggggcgcctcgcctcctacgtacccggaaagagcagccggcgcgaggcgatcgaagcgggcggaaaagacaatgaaagttaaaagtcgttcagcagaaaatgaatgcgagccaagcggccatcttgaagcgagctgcagacgccgctgtcaatgggcaaccagcgcggccccgagcagccgcggccgccacgctcgtctcatgccgcctccggccggcctcctcctgctccggcgcctcggcctcctccggcgcctcggcctcctcctcctccgcctccgcctcgacctccaacgcctcctcctccggggcctcctcctcctcctcctcggccgccgccgcctcctcccgctccgcactcgggggagggcgcgcgcggagggggcgcgatcggttttattctgcggggctgggaggtgctgctaagccggaacggggctcccgcgcccacatccccattgtctcgccccgatctctgcctctcatactacgattatttcatagttgctgtgggggaggcgggcgggcggggggcgccgtgtgtgtgcgtgcgagcggggggaggggaggagggggaggggagggtggaaaaaaatgcaccgctgaaggcagagtggaaactgacaccggctccaaaatggctcggagtccgcccgccccctccccccgccgcccccccagcgggtcacgtgctcccctcattccttaagggcggcctgggaattagtgtcggtgtagtcaggcccgtggccgccccctcccctccgcgccgcgcgcccggccccctccctcgctccgcgccgcggcggcggagacatttctccacagcgccacacgcgccgccctgctccgcgcggccgccgctccggccccgcacgccgcgcagcccaccccgccccccgttctttctttctcccggccgcccgcctcctcccggggcgcatacgtcccgcggccgccgccccccggccggccccgcgggctgcggcccaggctccggcgccgcggcgcggaacctgcgcccaagttgggctcgcggaaacaacagcgcccgcccctgcccgccagcccgcggccgcgccggcctcttccccgcccgcgggcggccgaggcggggcgcgcgcgggcgacggctggctccgggcaggggctccgcgccgggccgggaccgggcggccgagggtcgggctgtgggcgagccctcgggcgcaggtaacgggccgggcagccgcccgcgcccgcccccggagccccgaagcaggggtctgcgacaaacccaggagatcgcatcgtttcctccgtgtttaactttaatcctgagaaaaggctatcgttaaaagttcacactactcctatctagcttcacacaaagtaataacacacgaactcagatccaaacaaaatatcatcactctttgtggaaaacaacaccttatttattcagggtgtaatactgtctacttcctttcagaagacttgaaaaagatcaaaataggataaatggacagttactactaaacgattcaaatacttgggcagtatctttccctcttaaccctttcacacgtttttaaagtgtcaaaattgatgaatggtataaattcaaaaggaaaattcttttctactgaaaaggacatccagctcgcacaaacggtggttcagctgaaggcaaggcgtttctggttttcctctgcactcgggcggatcgttaacttccccaagttacaactgagttgctctttccaggcttttcgaagcatctttaagtttccccaccaagtcctaaaagacgtgtatacaataccacgtttttaggataaaacatggaaagaagtatccaagctcaagaaagatgcaagaaaaaaaatcaggacacaccttccaaacaagtttaaaattcaacaagattttaacttttgacaaactactatcgggcaaaaaaagcgtttcctcggaaatacctcatgttcaaatcggttatttgccctcacactgaaacatgatttctaaccggatccttaaccgcccagatacatctgaattttctcaagttatctaacaaaggttatgctgtatacacattttctgaaagttgaaagtttgattcatagttacattaaaacgactctgcagaagatgcctttgaaaaattcaatttcacttaaatttccagtaatgagcttcattttttaaaaactatgaaataaattcgttgtcatatccactaataaatgtagttttgaattttcccagtcttaaatgggcaatataaacagttttagaatgttatgtatacttccccctttataaagtcatttaaaaagtttcaaaatccaattttgacagtttaattcaatttctgaaagcaaagacattttcaaagccatgctcttaattttgtttatcttattggaccaaactcatcatgaatagaagaaatttacactaaacactacagaagtttatttcaatcagcaagaacagcaaatacagaccaattctctattaata

SEQ ID NO: 913420 - DNA, 4001 bp, Homo sapiens
attaacaaccatgtgttacttttattacgaacaagctttttaaaatgttaataagatttgaaaaggaaaagcagcaacaagacagcttgaaggagtagcagacttaagaaaaggtttttgtaaactgaaaaaatcttaagaacatttgtactttaaagaacccaaatacgacagagaaaataactcacgctccactaagcaggaaaattagaaggaaaggaaaaaaaccccaaggtgttaactaataagaaagacaaaaaaaaaaaaaaaaattctccctctttgacggaaggttaagaagccagtaacagaaggaatttaatgaaggagctcctgctaagtgcctcaacctcttctgtaaagggtggggagaagtgaagaaagtagaaaaagtttaaagtgggctccacggaaaatggaggaaaaattaaacaagaactgagtctggttctactaaaaacgcattctacatttcaatcggcctttcatacactcaccccattcctagatcagagaattgcccatattttagcttcaaatttaaaaatctaaataattctggttcacattctttatttcaacaactgaaaacaatgagacgcattaagttacactctaattcaaagtttaactcctctcacaagtaaatacaataaagtagttgttttcaactccagcaacaaaatagcgataatttcaagtaagagtaactgaaaaatgttcctaaacgtaaaagtgtttgcaaacagttttggttttttttcttcctaattcgtttgccagaatacgatgttcctgggttcaaatcccagctcccttagacaagttagttaacctctttgcgactcggtttcttcccctaaaacaatgaggaatacaataaaccagaatcgttgtaaggattaaatgacgtaacacaggtgccaagttcatactatgtactctgaacagtttgttaaccgcttaaaagagaaaacctgcaggagtttgaccaaattaaaacatctgagagcatgaaagagtaccacgctcaaacgccagaccctaacacacagcatattatttttcttccctgacgcaagctcatttttttttccttgccaaatctttccactaggagtctggaaagagaaaaaagggtccaggcaatccagcagaaagttttccaaaactgaagtacggaatcaccaggccacggagcggaggccgcgcaggacaacaggtgaagcagctccgggagctcgggggccagggccccttcccgcggggactcgggggcgggccggctgctcctctcactcgacccccgcccgaaactcattttgttctcccctgttcctccccacagcgtccggagccaaatcacaaatatcagcctcgccgctccggggcggggaggtgagcgcctttcccatttaaggattccagaagcgtccccggagcgactttcgcccactccgcatccccaaactcggcctgcaacccgcgagtgggagacaaaagaggggccggcgggggacgcggcgcggggtgccgtgggtctctggctgggcggtcccggcccagcgcgcgccgaggcctgcggagctgccggggccgggccgggcagcccctggctccggccaccgcgcgcccagctgcctctgcagcctcgcccgagcccctctggcctccccgctgcggccagcccctccggtccgcacgcgcactcccaactcacccggaccccagggaacgcatcctccagccctcggcgcggagcgggtgggcgcggcgagccgccggggcgaagtggggcccgaatcggccttcgcccttggcgtgcagcggccccgacccggtcgcccctcgatcgggccgtgcgatcttcgccgcgcgcggacggacgcgccgagcctaagccttcctgcccgcccttggccctcctccctcctcgctcctgcctcctcccttctccttcgccaagcccggcaggcggattccaatctctgcagcggccgccgccaccgccgccgactcttgccaggaggggagggggcggcgcgggtgcgggggcctgggggaggggcgggcgtccgcgggccttgcacggcgcgcgcgcactgggaaggcccccgcccgcgccgcgcgcacccgaccacgggcgcctgccccgccccgccccggacacgaaaagagccgagcgcacggcggaagcgcccgaagagttcgcggagcccggcgcccagttgccggggaggagggccagccgccggcaagggggcgccgagctgctggtgcgggcgggagtcggggctgctcctccgcgcgggcccgccggcccctccccacaagccagccccacagctgccgcccgggtagcttcccgcagacgccgtaggtagcacgcgatggaacgcggcggaggggagcgtggacacggctgccgggcgctgcggccatcggcgccctggacgcccgctccggccttcggggccggatatccccactctcgcgggctctttcgcgtggacccctcctccggccgacactcacactgcggtgaacgccagtcagctggcgtgaaataaggtcgctgggaaggcaccaagtcaccaaggtgggggatggccaggtcgtggtagttgcgacaaagaaaaatataagtcacattgcatttgtttctcgcccacccaccgctcccggcgtctcttcccgggctccttgccagcgtgccgaggcgcaggcagggtgatggaggctccccggccgggaggatctgccggggagagcggcttccctcatcgattcgggagcgccaggcccggcgcgcccgggctcctgtgacctgcgagcccgcgaattccagcggcataagataaggagcggcgagggcccaacaggactgaggtcagccagctataaatacgcctccagctccaccgcgggctcacgctggtgacctcgtgtaccctccggaggctcattccgtccatttggaaaatgcaaataattgtcaccacctcttttcttccatttcccctcattcatggtggaaaatgcttttaaaagtattcgatgacccgtatgtgaggaaagaggagataggcccctttttcaccaaatgtgactttaacctccttagtaatccaagaaatgtatcaagtttaagtcacttaacaaaagatgttcttttaaaggtgcattttaaaaaatcacttttaaaactgggtaaactgggtaaaaagaaagggggaaggaaaacaatgtgccaggcatttgtattgacacacattcttgcctgaagaggtgtttagattccagggtattcccttatattctggtataaatgtttgaattcccgtgtattttgtttcaattttttggtttatcttttattctgtctcccttttcttcttttacccgcctttgcccttaatgctgcagatagcctctgtcattctgaattatttttcaattctgttttcttccctaatctttttttctgggctcttcagctgtctcaggtttgacagtcatgggttgtagtatcttgctatgcaggaagaagaggatacgtgagattacttgcatcaactaaaattggtcacttttctttctcaagtttccttcataatacccagttttagtttttttgttttttggggtttttttgttcttttttttttgagacggagtctcgctctgtcgcccaggctgaagtgcagtggcgccatctcggctcactgcaagctccgcctcctgggttcacgccattctcctgcctcagcctcctgagcagctgggactacaggcgcccgccaccacgcccggctaactttttgtatttttagtacagacggggtgtcaccgtgttaataggtgttctcgatctcctgacctcgtgatcctcccgcctcggcctcccaaagtgctgggattacaagcgtgagccactgcgcccagccccagctttagttctaaaggaaaagatgggccttttgcttaaggagattcacatt

SEQ ID NO: 913421 - DNA, 4001 bp, Homo sapiens
gggcatcttcttcgtctcctagctggagatcctgcagaagccgcttctttttctttgcagctttgggtccactgtttttctttctgtgtttcttctggtccttagcctccatagtggctatttaccaataacaagtaactctaacctacaaggaagaaggttggggtaaggagatgggagaagcattttacaatccaggcaatacccagggaaaaacagtaaatttcatttatttctttatgaagagatgatgtatttgttcactgaacaagggtagaaactgcttaaccatccccaatttcatttctctctgttatgctataaattagatgagttacctctcttaagattacattttatggttaagttactttttattcatcttaagtgtcaacatcagcagtatctatttctgcaaggatagaaatatactatatctgtacttttcagccatttagccattagccacatgtggttacttacaatatacttagggaaactgaaaaaatgagtttttaattaatttcattctaactccaaatagtcacatgtggctaccatactggacagctcagacccaggtatcaactggactgatgaagtggtttcctaacttaaactaaaacttaaattttaataaaaaaatgtgaaacgtttttatgaacctccaatatgatcgcagtattacttttagtacctgttgactctgtaaaactcctaaattacaacttatctacatacatttgaaaaatagaaatagctgtacgtgtgagataggactggttctagatgacacctggagaccccatgaacttacagagacccttccagtgatttctgagttacctgggaatctgtggctaataaattggcaatcactgaattagtgagttattttaggaaatcgggctgcataaaatctgacagcttgattaaaaaaaaaaagcggagcaggatgccatttcattcaattaaggtactgtattcattccgttgaataaatatttgtgtctgtctacgatgtgctaggcactgtgccagtaagtggatacagctattatctgacttgcagaggaaatccaaactattatcttccgcgccacgcaataagggcgacattggaaggctgcacagggtgctactggagcacggaggtgagtcagaggcttcccacagacacacaccagcggaaacaaagtctttatgtattaccataatgtcaagaacactggccaggagttaggagagctgggcgctaggaacgctttgaaaccgaatagctgtgtgatttcagagattatgtttcttctctgctatattttagttcagcacttgtactaatgtttctctccctgtctttcttcttggtgggaaaagcacaatttggggtcaacagatccagctcaggtctaagtctcctaccgggaccacgtcgccaggaaacgacgtcgcccagccaccttccctccccgtctgggctctctgcagggattcatcacgtcactcacccaactaccccaggacacctccgccagatgagaaatatgccgctcctcgggagcaaagatgacccggaggaccgggggaggaccttcccacacgcacgactcgcgatcttcccagtgccccagaaccagggaccccaccgccgcctaccccaacccgcagcaccgaacctgctcgcagccgcgactcctcaggtcagcatggacaccgccggaaacggaaattcacagtcgcgctgactcgccggagggaaacaagaaggcagaaaaaagagaccggcatggggacggctttcaggggagagcctgaagaaagagggctgaacagctgagtgcggacgcaggcgccgtccgcgcagtgcgttccaccgggtccaggtccttccagattcctctccaccccgccctcggaatccgcggcctcaacttccgcggtgggactccggagcagcgtgcgccgcgctcgcctgagttctcgccgaaggccagggcggctctgcggcctggcgccggttagttagtgtggtgcaaaagccggaaggagacacatttggtcctggcctcccggcagtcaccgtgccaaggacgaatggactatcgcttgatttggagtacacttcctcctctttaaagattacagatgagggggatctcgcgttctggggtgccctaaagccctcttttggcagggcgcagtggctcacgcctgtaatccctacactttgggaagccgaggagggaggattgcttgagcccaggaattcaagacaagcctgggcaacatagggagcctacctctctctcttaaaaaaaaaaaaaaaaaaaattagccggcatcgtgccgggcgcctgtggtgcttgtggtcccagctactctggaggctgaggtgggaggatcgcttgatcccaggaggcggagtctgcagtgaactgagatgagccactggacttcagcctgggcaacagagcaagacactgtctctaagaaaaataaataacataaggccctcttttgccaggaccaacaaaccgtgagggcagggacaaactgacccagcctaaactgcctcgccctccctaaacccgggaaaggggctttacctgagtgaacgtagcatcttgccgttttcttactgcacagctttaccttcccagggatccgcccattgccacctgaggaaatgccttggagtccatctaatccccagcccagctacttgggagcctacagagcgtacattgtcagaggatgcatcttcctttagtcttggagggtttcttttcaatatgatcccgctggtgcattcaaggctcaattctacaccaaaaactaggcccactcctgtcacgagaaccccaggcgtcaggtcttctcacaggcaccttgttcttgccctcagcagcccccaggtattcactctgcatattctagatactgggtgctggacttgggaggctacccacgtggcacatgcttcccttatccctgaagagcttagagtgttgtaacttcttcacactacacctcttacttcttgaagatttcagtatccaggtagataatccttccaacatccttttggtctcatgaagcccactcctgtcctctgccctacctcagcttccccctccctccatgatcagaccttagaccttgtcaggtccaaggactgcaacccccacagtatcccactctgaccaggtctatctatcctcctatctgtccaggtcactccctatactgccctgaaacaaaactcctgcaaccttaccagcacctccaatcaagatcttactacttgttcactgtttcttcctttatgaccctctctagtgagccagcttaaactcaatggccaaccattctcattgatcccttgcacacctcctcaactcatgcacctccctgtcatctcctatctgcttggtaagatgggagccctggataaacccagctctccatctattccatgccacgacgatgcaactaaacatggctggaggaaaacaggaccatgccagccgtcctcactttaatcattctttgcctggtctattcaatctcccattgttccaagtgagtatttcgcacttcctcctctctgttcaatccttcccactgcctctcccttccttgcctcctgctttgctaagagaatagaagtggtaaaagtcttccacagactcccacgtccacctccacccatccgcctcttattgcctccctgtgactgtggatgaacaactgctaggtccacccaaagaatcctgcactggactgctggatcccatcatctcttactgctccagggtgtcactccagccagcctatcctctctgcaacatcagcaatattttcctttctactggactcttctcatcgtcacataacatgcagctatttctctcatcttcaaaacaaagaaattactcgaccctatttcctataccaggacctgcaccttttctatgttcccctttgcagcaaaacttcac

SEQ ID NO: 913422 - DNA, 4001 bp, Homo sapiens
agccaccgctccgtcccggatttgcaggcagctggagcccgcgggaccggccaaccccgcccacgccgagcccacagtggccccgtcctgccgcgcggacactcagggcggcccaaggaatcgcctacatgggatccaccccgcgggtaactatctttttatagaataaacaaaacagaaaaacaaaaatctcgtaactccggcgctggccgccttgcactgccaatgactcagcagcctgtgtaagttacatattggagagaggaccgagccccccggagccccctccacctcccagcgcccagatcccagccggacagtgaaacgcacaatgtcaggagtaacgcggcttcacaaccggaaaatgggtgattttatggcaaagagtttataaaaacatcccttggactttattttatgacaaaagataggaaaacacctcttaatctatttcaaaatagtaattagccaatgtttaaatttcaagaggaaaaatccgaattacaggattttaaagaatatggttttaggccaggcgcgcctggtggctcaggcctataatcccagcactttgggaggccgaggcgggaggatcgcttgagcccagttcagaccagcctgggcaacacagtgagaccccgtctcttaaaaaaaaaaaaaggtaaaaaaaaaaagcttgtagtgttcatatgtatatatatatattattcaatatattacggtaactaagtcctgcctagtaaaatctttttttttgtaataaaattagcaactcactaaatttatgtgaatatatggttttaaaaactctcaatgaagattaaaagttcactgtcagaggtttcagcagtcctttcccaagcttatttacatgctaattttgcttagtaaactctggcttcaaagaacacaaaggtcagctgccaccaggtccctcctccgaggctttggccctagggaccctgggaaggcggcttcagtgcccgcttccctgagcaaaggctcgtctggactctgacgcggacccaccgggtggggtgggtctccacgccacccggctgtgcgtggggcaagtcctgcaccccgggcctgcgtttcccgctgcgtgaacggatggtcttgcgaatctagccaagggcacacagcgagcctctactcgggcattaggcaggctgtaacgactgagtgctgcacgggcagcgtccttttgcttgtgttttcttaacccgtaagtcatttaaagctttgttttggaacgaccctctagtgaaattggaacatgcccatttaatgccatattttaaaaacgctgtaaccccctcccatctccgcgttcacccttgaggaaatcctaacagtcaccatggatataaacattaataacaaaattaaagctcataacaggccacttgccacgccttggtgtttggtcattaaaaccaatactggtctgaactacagaccgcggagggcaacgtggactttgaggctgttcggtccaactgcgagacgcagattcacctccaggtggaattctagctcgcgcggagctggagaatcggggctttcccgtgcggtccgacccgggtccaagccaacccccgcccgagtggcgaggccgcgaaccccgggcagtacgcggggtccccacgccccgggctccgcatgcccgcaggaggggtgggtacggaaggggaggatggcgcagcctcgcccggcccgcgatgccccctaggcctccccggcaacctccccttggcgccctcttggccttccccaggcttcccccccgcgccccctcggctcccgcgccgcctcctccgcctcaccctgcaggctctcctcctgcatcccgggcgctccgttctgcgacatggcgccagagggcaactgcggcgatcggagtccgcgccgggctgcgggatgtgcttcagctgcgggcggtgggaaagcggaggtcggagcgccgcggcccagctgcgctcccggactgagcggagccccgcagcccggccggaggaactcacagggcagggcggggccgggcggatctgcggccgcgtcgcccattggccgcgacttggggcctgcgcgtgcgcaggggcgtggggtgcgtgtggcacgtgcggcgcgtgcgcggggcgggtcctgcggtgggcgaggggcagaggcctgcggtgcgcgggacgcgggcggggagaggggcggggcgaggggcgcgcaggcgcgagggcggcagcgaccgcctgaggtgagccggcccgggctggacgccgcgggccgcgtgacgagtgggctgcgcggtcgccgccgcggcgggcggtgggccgggttctcctttgaaggggcggtgggaccggcggactctctgggcactggctaccacggagacgccgctacgcttcggggcggggcccgtctttccatcctgctagtggggaaactgaggcgcggggctggcggcgtccgtgcggggggcgtgaggacgtgcagggaagcggccgctgcggctccgagacggcccgtggggtcgggacctgcgcccggggcgggagctgcgagcggtgggccggagctgagcgtctcgggacgggaccgcgtccccgggtctttgcccgccccgccggggcgcccctgcgtgaacagcggggcccgttgtgtccggggcgtccgcccgcaggaagaagcggaggctcgagcagagtcgaaagagtctgcccgagggaggcgcggaccccaggggcccgggagaggcgcgccgtccgcctctgcggcaaggggcctccggggtgcaaacgcggtgtggggcgggcgtccccggggtgggacgccccgtccacggggcggagtggcgcttggtcgggccgggtgggtgcccggcttccgtgggagccagcctggcgtgggggcctcgcagcctcgggactgggaggcacttttcagaggaaagtcgctttctcatttcccgcttttgatcaaaagtctttcttcttgaaagcattgttgatccaaatccaagtgtcaaggtgcgccccagaaacgctgcttcccagacagtcgtgtctggtcttgcgggaaaggaggaggcgtcccgccaaggaaccaggcgctcagaagctgaaccggggtcacagagccgcgaagccagacctcagtcgctgcgtgcatttcatccctgctcttgcctgttgaatcgtctctagtctttggagtgccatgattttagttttctcaggagtaacaaacatccagaggccagtgtggggcgcatgtctttcatctcagcactttgggaggccgaggcaggaggatcgctggagcccaggagttggagaccagtctgggcaatatggcgaaacgctttctctcccctaaaaaaatacaaaaaacttagctgggtatggtggcacctgctgtgggaggattccttgagcccaggaggtaggggctacagtgagccatgatcaggccactaccctccagcctgggcaacagtgtgagaccctgtctcaaaaaaaaaaaaaaaaaaaccgccagagatacatagcatagcattaataatttcgatagtagaactgtagtgctggccaggcagtggttcttgtgtgtaatcccagcatttggggagcccaaggcaggagggtcacttgagcctgatagttcaagaccaacctggcaacacagaaagactccatctctattaaaacaaaaatgttaccaagtacggtgcacataaggattacaatgaaaaagagaatgtgtatgccagaatgaaaaacggaacctattcgagggagtcaactaaaagtattacgaagaaaatcaaatggagaattgttcagaatagtgtagcctagtggcttgtactttttcccatatgagtttctacttcgtggaaagggtttatgcacatcaagaggtatttgccaccatacatagacttgcttgctcagctaataatcgaaagcaatgcagtcgtccagtgcagccttagccagtga

SEQ ID NO: 913423 - DNA, 4001 bp, Homo sapiens
ttccataaaaacatgacaggcttttaaaaaagtgaacgagaaaaaaatccacagaaaaagagtgctactctttgaaacacaacatccagaacaaaagacagtaccttcaaaacccactcagtcattgagaaatattaactgtcctaaaattccgtaaagagattagtgttggctgggcgcggtggctcacgcctgtaatcccagcactttgggaggccaaggccggcggatcacgaggtaaggagatcgagaccatcctggctaacacggtgaaacccgtctctactaaaaatacaaaaaactagccaggtgtggtggcgggtgcctgtggtcccagctacttgggaggctgaggcaggaggatggcctgaacccgggatgcggagcttgcagtgagccgagatctcgccactgcactccagcctgggctacagagccagattccttctcaaaaaaaaaaaaagagattagcgttgcccgaaaattaggttctttttaaacactttcattttgtctttataaagctacatccaatcctgtgaaaatgcacaggttgctctaagaaaagaagtactcatctccttaaacactattacctgataaatgttatattaagtttacatatcaatgcatttacaatgtatatattcatgcatttatatgggaggtaacaaattagaagatacacctttctatatttgcaaaaatgtaaaatgtcacttgtattctctcaaggcagttttatttaaaaaaaaatttcctcacattgaatagattataaaataaaaatcagatgccccatactacggtacctagcaacccccttcacccaactcccatgggcttctcccacacactatttcatcagtcatctagggagtctgtaaggaatgggttatcctttcccttgcaaaacagataaaacttgtgcacttaatacgctcaaagaatgtgttcagttaattataaaaaaatgaaaactatttgttttcatcatttattccttcagtctatatggtaaaagaatccaattctcattaaaagttaccatatcaactctaaggaacttggtgaatccatccgatcactatcacagaggaactatcccttaattacatgtacagagggtcaccaaattccgcttacaaaagctttccaaccattctatcataccggaggaaaaagtaatgtttctcctatagctatacaaataaatgtcgttagtttttctatagttttcctgggctttcctgttgacaggcaatatttcaaaagaatataagatctgtgatttatcttccacgccttagttacggaaaatgatgctaatacgataattggcttaaggttacaacgctgacgttggaatgtttactgccaaacaaaaggagaaattatacttaattttaaaaaacatctcaggaaagaacatacccctaaaaacgtaaattaaaactggtaacataattagacggtctcttagataatagtaattcaggtttcccctccatcgacagtaactaccaagttttcccatgaaatggaggttagggaccagccttagaatactgagaaagataagagactcccctagaatcgaaagagggaagagaaaccagagaacagaaacatggtgaggaaagagaaaaaacagctctaacgtgccaaggggtctattaacaagaaaaaggcattattgaaccgatttacccaggagtaacccgagcccaaacccccgccgaccacggggcgaactccgaagtctactgaagaaagctccagagcccagtgacaatgagaaccgctcttctctaggagtgggggctctaagaggagaccatgccttccctgaatcgccttccagtttgctcgtcaggagcaagacccacctggagaccgccatggccgggcgccggcggttcggagctccccgcgacctacgcgccgcgcagctgaggcgctagtttccagagagctgagcggcgcaggcccaggccgcggagcacaggggagcggccggtgcggcgtggggcgttccagcgcaggccctcgggcatctgccctgccgcctacccgagctcgtccccgcggcggccggtaagcaggggtccaagacggtagcggaggcggcagtcctccgacccgcacgacttcaaaccgggtaccctcagctccgctctttgctgacgcgggcgtcggcacgcacaactgagcgtcagcgcgccggaagtgacgtaagctcaccgacaggagcttagctcggcgcgagcgcctttggtttggcggcacgcgcctaaataaaagcgctttgtgctgatgtggagagggtgtctagtcttaaaactagggaaggaggtgaagtaagggtccccttatttgacagagaaggaaaaaggcgatttagtccaagtcctggaacttcgaaagcttggtttctaattccacactacccagattctgcttcccaccgtactgcatctaggaagcaagatcagaaggaccttaacatgctcttgtccaggtggtgaagccagtgggaggagtgaaagcaaaaagtcgctatgacactgaagaaatggctcagatgtttgtcattatttgccagaagttctgcctaggtattggagagaaggtcttctgaccaacgattttgccaagtttgatttctcaattgtttatgttgtttgtaccatcattttctcagccagccagatttgaaaactaccatttttaaatttttgttcctttgggggacttatctggcttttcaatatttttaagttcattaggcttttaaacacttctgccaggcccttatcatcttacacttgattttttttttttgaccgagtttcgctctgtcgcccaggctggagtgcagtggcgcgatctcggctcactgccaacctgcgcttaccgggttcaagcgattctaaatgtgcctcaacctcccgagtagctgggaggcacacgagccccacgccgggccaattttttgtattttttagtagagacggggtttcgccatgtaggccaggcttgtctcctgctcctggcctcaagtgatctgcccgcctcggcctcccaaagtgctgggattacaggtgtgagccactgcgcccggcccttaaacttgatttttatgctagtagtcaaaataatatttctccaattttcagttcagcccattttataggccaacagattaatcttcaaaaaacctcactgctttttatcatgtcgctcctatgcttataaagcatgtccattggcttctcattacctgaagaggctatgtctcaatccttgagtctgtttttcatctgtaaaatgaggctaatgagaagtactgcagaagattgtgggaataaaatgaggtcatgaatctagaagagcttacaagaactttgtaaaccataaagtagtatatatgtatgtaaagagaaagaaactaacaagtacctgctgtgtgctgggcacatgacatgcattatccatataatttgtagggaagccttgaaaagttagttttaatcttcgtagacaaggaaactaagctcagaaaggttaagtaatttgcctcaagattcaagctagtaataatatttattgtccagtcattcaacaaatgtttgtcacctctctgtatcagaaactctgcttggcggtgttcatgctattaaaatctaatcaagttgatgttcaagatatctttacattttcactttagtcacctacttgcctcatcagtttatctcccaccattcaataacaagcagatactttttactgatcgtgtacagcaatcatttagccaaaattaagcacctaccatatgagagactggaacttctgaagaaaccagaacagacaaggtgcctactctggttgaatttacattaaaaggaaaggaaaaagaaaatagataaacattgaaaatatatttatgtgctatgtaaagagaatgatggaattaatggtatgattaaagacctactctt

SEQ ID NO: 913424 - DNA, 4001 bp, Homo sapiens
atacatatatctatacatgttacctatatctgcatctgtatatatatgtatgtatgtgtgtatatatatatatatatatatatatctttgtgttgctgtttttatttctatgaaatagtcttccaagtggtatagttatgtcagagatctgtatcttcaattgaaatagttaataccaattcacttgccccaaaattgcagcaattaacattcctatcaccaatttataagtgttgtcatttttttcacaacatctttagtactaggtagtatcatcgtatttatttttgccaagctggtgagtgtcagatggtttcagattcttactttaatttgaactttcctggctaccagtggggttgagcattcttttatctatttattggctgtttaatttttcttttctgaaaactgcctaatcataggttttccgcaattttctactgggttactgtagtctcactagcattttttaaggagccctctatgtactggggacactaacattttgtctgccatacatgctgcagaagtgtatcatttgtcttttgactttgtttatggtaaacaaattgtttcattagtatgaaaatatgtcctgtgtgtgtgtgtgtgtgtgtgtgtgtgtatttcctttgccagtctctaatttgaaaacatatctggggccaggcccagtggctcatgcctgtaatcccagcactttgggaggccaaggcaggtggatcacctgaggtcaggagttcaagaccagcctaaccaatatgatgaaaccttgtctctactaaaaatacaaaattagctgggtgtggtggcgcatgcctgtaatcccagctacttgggaggctgaggcaggacagtcacttgaactctggaggtggaggttgcagtgagccaaactctcaccattgcactccagcctgggaaacaagagcgaaactctgtctcgaggggaaagaaaaaagaaaaagaaacgtgtctgggtacaaacatggccctggtgtttgtacccagctgctggtgtcttcatctgcaattgcatccatgtatgcatgtgtgttaagagcatctttggctgttcaaccagctttcagaggtgcacttgagtttacagcaatgtgtgttttccttgatggctgagtttccaccttgcgtgaggcttctcccacctcaggtaacacatacatgcttttctgatccctttacctcacaggagccaggatgatgaactcctcagcttaaagcccttcaccagcttcccactgccctagacatagacccccaaatcctcaacgtggccttaaggaatctgagaagagagaagagggttccattctaaagcagacctggtcagcacagaataaaccccacacgggactcgctatgcccacagagcaccgcttcagttacagagagagggaggctggggtttgcactcagctacccaaagctcctgctttcttagatcaatatctaagaacttttttagctgatcttgaaatccagagacatctcaatggcctggaaatgtgttcttttttcatcccaccaggcaatctgccccttcgtgtgttttgagagcctgtgccaaggtccctgtgggcgggcaggagctacctacaatggtctctcagctcccagacccctcctgattccctaaactccctccctgccaagtagaccagaggcacccaagtctaacactgggtctagacaggtgctaagacagcacctgtcactaggacacatttcttggtctctgaagtggctgaaaaatacccattgtacttaccgttccaaagcccttttgcccaccacaggcgtgtttacaggggaagtgtgctgagtggaggaactcccatcacactggcctctgagttacaggagagctgggggcgccttctgagcctgaagcctggaagcgctcatcacatctggggctcccccttttcttcttatgggccaaggtgctttgacagggggagcttgccttggtttcctgggtggttgtgagcaccacggcaacggcagggaagcttccaagcacttcctgttccagggccaggtttcaactcaggctcgggctgtgtccaaggccctggctgatggggagaagctgtgagtgatggcatctcagagaccagtgtgggtgccatgtgcctccattcctgttcctcacagcacctggggcaacccagggcacagcctcagtgagaaccaacccccaaatcttcaggcttcatctgtcaaaggagaagattagactagaagcttctcagatgcctcccagctctggcattctggggtgctctatttctagcattttctatctgtgttttgacaaacatatttcaataaaaattgagcattccgcattattaaaagctatgcctaatgaagtactttgctgatgatgatttttaatgctgctctctctgggagctaaggactgcctaaaagtcaaggacaagaccaagagccttcaagctggcatccagagtggaaatgtttgggatttgtttgttttgttttgctttttttttttctctgagatggagtctcactctatcgcccaggctggagtgcagtggtgtgatcttgactcactgcaacctccgcctcctaggttcaccgggttcaagcaattcttgtgcctcagcctcctgaatagctgggatcacaggtgcccgccaccacaccggcctaatttttgtatttttagtagagacagggtttcaccatattagccaggctggtctcgaactcctgacctcaggtgatctgcccacctcggcctcccaaagtgctgagattacaggtgtgagccaccgcacctggccctaagtgcaatcttacagtgtcctcagcgacgtggcctgtgaagcccatgacccaaactaggggatggggaggtggaggccatgtgggtcagagtcacatgggtcaccacgggtccatcaaaggcctggaccaccaccccagggatcacagaaatccctagttacagtaataggaaccaggaggcagtacagcttttaagacccaaggccagcctctcctaggccacatacatcctaaagtaaaacgggaaagtagctgcgctgcctcctgtggctgtgatctagaaactacgaaacactctataaatgggaggtacccctgaatttgtctcccgcctcagccctcaaatcctgtgattctactcctcccaacaccatattctgctttgcacagaagccgatcgctgtggaatgttctgtgagtggcttacccatctctgcatccccagagcccagcaaccaaacttggactttagaaagtgctcaataaacatctctggaattgggtaattggatgtcctagtccataaccaccactctgcctgtgtacctgcttgagtgccacatgcataagtgtgcacatgtgattatgtatgcataggtgtgtgtgtctgcttctgtgtttgagtacgaacatggccctggtgtttgtacccacctatgtcctcatttgcaattgcatccatgtatgcacgtgtgttaagagcatctttggctgttctagtagcttccagaggtgcacttcagcttagagcgatgtctcttggttgtgccttggattttgggtttgagagtgagacgacagggtttcatggtagtatacaactgatcccagcaactgccaccgggttggagaagcagctgattgtcaggcttttggtgtttagtagcagcagcagcagctggtgctgcagacaggatttgaggtggggcccaaaggagtccactggtgctcacctctcagcctagctcttctggagatcaggaggtagggagggacgtgcacaatgagagaaccagtgggagaagaatgtaggcgacaaggggctgaagacactggcatgtcttagacaggggggttaggaacccagttcagggtctgcccaccatccctagacgctcaggggcagcatgagaccggaagcaggcctctaacaactg

SEQ ID NO: 913425 - DNA, 4001 bp, Homo sapiens
agaagaaaaaaaggagtcaaccctctaagtaggaaaacaaaaataagcagtaacagttttctaacttaagtgtagtaactttcacttacttctaaagtccagtaaaagttcaaggtctcttcttcatatttagaattttaatgttgggcagaaatccaagaaccttcttcaggctcaatgaaattttgttaatgatacccctgaattttaattaggtgttttcgaaaacactaatgcaagataaagttttagtgaatttgactagattccaaaaaagtattcttataaatggggcagtttaaagtctaaaattcaattttgttagtatccatgtttatctggatttgttacggtattttaggcaaagatacaaaatagctatttttttaagcaaaggagtaagatttggagtgacaagtcacaataacttctgaaaaagcaagactggactgcaaataatatcaatgtccctaaggccacctgttaagcttaaaatctatgcattccatcattctttagttgtaaccacaaagtctggttttacacctaggaaatacaaaaagcatcagattaaaagcatcaaatatcagactatacgagtttgccaaagataagcacagcaaaaagaaaagcgtgatacaaagttaaagaaatatgttccaaggggtttaagcacacccacaaaatccaatctttgctcacactgtgcttcaacctaaaactgacgggtaaccacaaatcctgacttatccctgacttacttccctctaccaacctccaccctttttatctcctaaatttctcaactgatctcatcacttcttatgggtctttgcaactctcatctccacggcctttcctttcccagaaaatgatacaaagcacctggcctccacattttaccgtcccacaatttacctttaaattttgttttgcttaccctattagatactcattttgccccaatctcctgtacccatgtttccctgacaatctgctcttacttttcatcaccttgtccttattacagtatttagcttctcctttcaaagtagcgttatgtacccctccctgacatttgtaattctagcttacagtcaacacccttttcccctcccagggactgtcattatagccctaggtcctcattcccagtccttatcttctttagtgaggcctcttcccttccagagtttgtcaacagtagtttggccaagctgggattccaccctcaaggcaaaggctatcctccctcctcattctacaaaactataagcctctcaccagccctagcgttccctcctccacccttaaatccatctgcatccagccctgcccgttcccctctacccaccgtatctgtcttcactctatcccgcgctcccttccccagtcgtgaatgcacctcctctcccgggccttaccggtaaccctgacaccaggaaggccccgccagcggcctcacggcgtttctccagagagcttcctccgcttttcagtaacagtccccacgcccctttccctccagggccccgcgcgccgcctggagccccctcctcgattaagctcccgctgtcacttggcctctcatccacaagatggcggagccgctgcccccacccctgggtccgctccgcaacccccagcctcctttctggagctcccatcccatccctccagccgctccgccgccagcctcggcccagggtcccgctgcccggtcccgcagtgggcgggcggcccaggccagcgacgccgccaacgccagcgcctccaccgttccccggcctccaccgtctcctcaccataaacttgagtgccttctcttgcagcaccgcctcggccgggtccataatcgccgaggccactgggtccgctctccgccggggccgcccctttggtgccaggccgcagccaacgcagcgcccggatcccgcctcctcttccttccccccgccctctcttacctctcaggcgcaggctgaggggccaaggagaatcggcttctccgtgcgcaggcgaaagcccactggctcacgggatttgtagttctggaacttcccccaggaaaaaaactgaggctacgccgtgaaccgcaactcccacagttcactgcggcagcgttgcggttgcccacaagccagatttagataagttgccattacgcagaggaaatcggctgatgggaattgtagtttacagcctctaaggatgagaaacgggaggggcacgggtgtctccgtggttaccgagcgacgccagtagcggcttgcctggcatttgatatcaagatggcggccaatgcctcacttgtagcccaaatactaagaaaaactgtggcaagaatcacgggtcctaggacctgcctaactgtggttttaggaagctgaacgtccccaaatttcatgtatctggcatctgcaggtttgcgacccagagtagctgggccaatgggcacctggcagcagctcacagacaaatgcggaatttcaaggtcctcctaagccatcgccacccacacttctcccgaggaatcttttctcccccacagcaagtcagggccgaatagaactcggttcaagaaattctcagtgtttagagctcaaaaagcacataacttgctattgctaactgtgggatgtaagccctgcactaagggtcaaacaggtacttaacaaaagtccttcaacggtggaatataatggcctccagcaaataaagcatataaatattttctttggcctgaaaaggtacaatatgggtttattttggaaattgggtctaccttaggaggagaaaactctagggtttggttaaaagtgatttaggttgttttaagctgctatgtttgtgataattggttatacagcctaaaaaactgacacacacccaaatgcccctcagcaggtggttgtatgaacaaattgtagcatattccatatgtagcacagtggaatattacttagcaatgaaaaagaacagtataacaacaacaacaacaacaaaagtgatttagggccaggcgcggtgactgacgcttgtaatcccagcactgtgggaggctaaggcgggtggatcacctgaggtcaggagttcgagacgagcctggccaacatggagaaacccccgtctctactaaaaatacaaaaattagtcgggcctggtggcacgcgcctgtaattcaagctactcggcaggctgaggcatgagaattgcttgaacccgggaggcggaagttgcagtgagccgagatcacgctactgcactccaggctgggcaacagaacgagactctgtctaaaaaaaaaaaaaaaaaaaagtgagttagattgtgacagccttgtacaaaatatctgaatttataaaataaatgaactaggaaaatactttttgacttataggaaaaaatctccattttaaactatcttattcactcagtcatccaacaaatggtaagcatataaccgtgtgcagacatcatctcaagaaatagggattcatcactacttgggtggctaaaatatcagacttcaccactataattcatctatataaccaaaaaccacttgtaccccaaaaactattgaaataaaaataaaagtaattaattaaacaaaaagaaaaaggaatggggattcattaatgaacaagacagacccagttatttcctcgtggagcttacacttttactctgttgatactttgtcctagcccctatatccacaaaactcagcatgatacttaatacataataggctttcagttaataaaaagttttgttcttgaatttttaaaaaaattctacacaagtgcaaaatggagaagacttcaaacgcattcgtatgaaaactagctggaggttttcagaggactaaggcagtaacaggatggagttacaaaaaaaataaataaataaataaatgaaaagataaggtgggatgatggtgcagccactggaaaagagtattccaggcaaaggtaactgcatttttggtgattgat

SEQ ID NO: 913426 - DNA, 4001 bp, Homo sapiens
ttaaccgaaaggaaatgtatcatctagttactcattcaaaaaatgcaacggaaacatattttgctaaatacctaaaacaaacacaattaatatagacatgattgcctattttttgtcaggttttaaatctacctttagcttctgaaaactaaattagcttctaaaaactgaactctcaaaacatcagcattgtagtggaaaatcctaatgaaacgctggccagtctgggatccagcccacttctaaggacaaaataaaggccaaatacttgagtgtcaatttatgtaaacactgacaatggcgaccataactggctttactgcaaaaatacatgcataatattctgtaatcagtaacttaatggttatcatttaaattaaaaaaatcctaaattcaagccacctgtacttaagcaacttagtaactaagcaatttaggaaccactcttcctacataaacatttatacttaagaacactagccaagaaaacaaactggtaaagatatggtcacattaccttgatcagtgttcaaatcatgcattttcaattgatgatctagtcctccactccaggcatgcgttggatcctataaaatagttttgaaccgtttaaaaactagaacttttgaaagggtttcaacattcttatttctacaagcaagtgttcagtttatgctcgggatatgcactgggctcaactattcatggtaaacaaaccaaaaaacagcataaaaaagcaagtggtcactaaactcctgtgtctggaaattaaaggagggctgctttatcctagccaacacgctagctgagggtaaacatacatttcccctaaacggttcctttcaatacggcagccaaaacagtattgttgcaaatataatgatcgtattttcagaaagtttagagttactccacaagcgtgtaacagaaaaggggagacggagtttccaatgtctgcatgtctccaacccaaaacggtacaggttcaaggcagatgctcctgaaaagctaaagaactgtccaaataaccccaccgacagacgcctctacccaacactggaaaagaaacgctcctcacgtggagaatcgttaacacagtaagagggcaggagcagggcgggagggcacctacgtagaaggcgcagtccaggacggcgccggtgtgctggtacttgagccgcatggagttggccggcacatcgtagagacgcacggacgtgtcccaggaggagacaagcaggaactgggaggtgttggggctgaacttcacggaggagatgccatcctcgggtggctggttcagcttgaactcgttagaaccggtcatctgcagaacaggcgcccagagtccccaggggtcccgcgggctggggctgcgcactgacagcctggcactgggggtccccccagagggaggggccgagaggacgaccgcgaggagactctgcgcttgcgcctgcgccgagcactcgcccgccaaggtccggactcgccccatcatccggcccccgccgcgcccaaaccggcccagcccgcaccgccgtccccctaaacccagcccggcccacagcgatgcccggaccccagactgttccctttcccctctcccggggtcccgtcgccccgggcactcctaaaaataaagggaaaacaacagaaacgaaacgggatcccctgcgaatcgaacggccctgccagttgcggacccgggaagtccctggagagcccgctcccgcacaccgtcgcctcgcctccctaccttgggctcccctcagaagcaacgtttccactactcgccactcgctgcggccgccgccgcctccttgcttccctcagaacactcgcaggctaggcgaaggaggcggagaggaagctccagtgtagacctgccattggctgatttcaaacgccaacgtctcagtctagggggccgattggtccgctcagctgcccagcatcggtcaacccagtcatcctgttccggctcaaagggaaaccgctgcttttccgatcacgtgggctcattttaccaccgcgctggggcatcagcgttcgagctggacgcgtggaaactacacctcccaaggagcatcgcgccaaggctctgttcatgccctctcccgcctgcgtatggcattctgggaaatgtagttttctaggggctgacgctctgcccgccctcttcatagaaagcgggaaagatctttacagctctgtccatggcgccctccccttgaagttagtctctgaaacacaagaatcccattttgggcaatacttatatagtcctaaagttgtctccctatccctgggcgtgcacacgcccgtgaagctaaccaaaagttgatgtagaggaggaaatatttgctctatcaactgcattattttgccttgattttttttttctcatttcttgggaatttccacctataaaccagggtctcccatttcccattgtctcaagttctgctgaagaaacccattcatatttatattatgctttatctctccaccccatctttccacaaacatttattgagcctccactggcgccaggcctggtgagaggctctggaaagatgcatgtaatcagaccagcctttgcccttcaggaaccccccttcagaagggtgaacagcctgggagacagtactctgcaatgtgttaaagctcccaccacttcttttagagctcttttttgaagggtcctgaaacgacagctacaagcctctccccttccactctgtcctgccactccccaaagttgcaggctcagtgtgctccatttgctgttttctagaatcctctagaaatgaggatcaagaaggttgcttgagtatgagaaattattttatctccatgaaagaaaagcaatacttaatcagtagaatgaagtgactgagttattcttgaatgtcaaaggctcactgaaaaatttcaatttaatccatgctttaaccgctttttcactgccttttgtaaaagaaaaatatatatcgttttatttgattttgtgtgaagtgagagaaaattgtggggttaaagtgattaacttttaagggacattaatgagaaagtgttgatgatctttatgcattcacacaccctgaattggatgcacctctttctgtgattcctgacacaagaaacacacatacaacaacaacctttctgcctactgcattgatgacattactgctgaaagactcttgccctccttccttgccagtcctggtacttggttctctatctcttctctttccacaagttaatggctgaattcaaaattttgaaatgcagttccttacttccattctaactttagctaaataattttacctcctgacttatctggttccttctcccagttgtttatttaattatattattgttccaagattctgagcatgaattacccactaataaaatctaagtgtatttcattatccagtgtgtgtatgattcaggtccctctgggcatgcagttgcagcccgactcgatttgagttttaagaaacgtcaatcttttaaatccagtttagaggctgaaaggaggctgatgattttgctgattattcaaatgaattgatagtcttgagacaggaaatctggcaacaatggagtcctgaacatttaaatccaaatgcaaagttgtgtgtgtgtgtgtgtgtgtgtgtgtgtgtgtgtgtgtgtgtaaaacctagttacctgtgagagaggaattcctaagaactaattatactgttggatcacggttgacagctagtttctggattagtaaaaagaatgaaatatacacatcatgacaaactggaaaaggatcattccctaaaattttaagggcacaaatcactgtcattaagtgactgaaatggctataagaaaccacttcctataagggaaacctacagaggatacagtgacccaatactgttaaaaccatgatctcttgtaaaaactgtaatctattgaaatgcaaacaaaaatgatatggatggaat

SEQ ID NO: 913427 - DNA, 4001 bp, Homo sapiens
tcttgggcctcacagaacatgggctttgagggtgggagccaagaggcagacttgggagtgcccgaggccttgttctgaaacacctggggggctgacacccccactaccctcacacccctaccaccagtttccccaccagcgatgatggtagctactcagccagtgggctcctatatgcggttacacgtcagaatggcctgggaggcaggtgccagtaattatccctatattacccatgagaaactgaggaacacagatgttaagtaagttgctcaaggtgatcagccagcaagggtcagagcgaacgggattggtaacatctcctcatgtgaaacaggctgttatcatattcagagggggtcggtctcactgtgaactgcccaagcaggggcctctgcagaaaagcatttccctttcagagacctgccaggggcagtgaccaccatggaggagacgagaggagatgcagacccagcatgctctctacagaagcctttactggggaggggtcagagttcatggatcaccgggaggtgcgagtagagtgttctgaggacactgctggggcgggggcggtggcgggaggccatggcttgggcagactgcccaaaagtccagcttcttaggtcagagctctgctgcccatcctgcggtggtcttgccagggaatgcccaggcatcctggcttcacagagcctccctctgggggcccccatgggcttgctgctgtccatctgtctatgtggaccccagaggccagcagaggggccagtcctccttggcaggtccctctggcttggctgcttttcctgggactccccaaaaagccagtccagggggtccacagtatcagccatgggcagtgtgggctgctggccactgaaacgtgcggtgatgtctcgcagggacacagcagggcggcccttccggcaggcctgggctggcctgtggggtggcctgggttggccctgggccgtggccttgtccagcacagaggtgggctgtgccagtcgagatatagacctcacgtagtcatccaggctaggagagggtgggggctcctgtccaggacccccaagcagcatctcctccgtggtctcccgaattgtgggcagatgggccacggagagcagaagccgggacctcatcactctggcgagaggaggtggcaacctgttgggaaacagaagcctggtggtgagggcctgccatgcgtcccaccgcccctcagcgtcaccacactcctctggggctgcctgtaggaatccggtgccctgagagcaatttgaagtctacagagcccagaccagagctccgactgctgggatcttttcttcctgttcaggttaaaaaccccaaaggcttaagattttatcattatcgtttcagaatgtgcacagataagagaacctaacctaacaaacactggtcagaggaaggctgggtttaaaaccaggatcggccacgcactgaccatgggacctttggcaaggccacctctccaggcctccacttacccatccataaaacagggttataaatacccctggccgggatgttgtaggaaatgcatgaaataacccctgaatccctttataaatgcaaagccctctacagacagccctggtctctaacccatagggaggctgtgcaagttcaggctgggaattgccctcaaaaataaacaaagcccttgtgttttgtctcaaacccaagggcagctgctctctcttacctggagctgaggaggtctgggggtggcaggagaatggatgagcagggacagtccagtccaaaggaagcccctgggaagcttgggggccgaagggtggagggtccggcagggggtccagcgtggggtcgctgggaggaggacagtgcactgagtctcacagtccaccgtagcaggctcttccctgagcagtgtgaagaaccttcgcaggcaagctgcttttataccttcccagcagctatcaatcactgtcacgagggccaaaaatagcctgctcggaaggctgtcttaggaaaacagcttggtgggcggggcctggcccagctgccagcttggaggtgtttttctgcctgtaggaggctggggaatgtttacgctgcagggcaggaaaggggtgggttcactgctggtcaagtaggggcactgggagagggaggggttccactgggccctcacaggtagccccagggccacccctgccccaaagcttgtttcccactctgtgttacaccaccccatcatgactcctgtgaagttgggccaggtccttggcaactttgatgaaaaatcagcagcacaggaccccagtctggaggcagctgaggctgggtccctaggcctgctcctaggagagacacaccctgctcgcaagggaccaagggcggtctgcggggtctgaccctggtcttcttacaccccagatggggtgctttcggaggatttgtttgtttacttgttcaccagatatgaggtgctagtgtgtgctgtgaatgcactaagcacagcaaacgtagcagcggacaaaggtgtggccccctggagctcatattctagtaagggaggagatcaagccagagatgaatgggtgctgtgattcaggcaacagcaagaactgcctgaaggaaagcagcgcagtggcatgctgtggtgggctgccgccacaggtacagtggtcaggggtgtcttccctaagagcagatattggagcagaaacctgaaaaaaatgggaaaatgcacattccaggtggcaggggcagcacgtgcaaagcccctgtggtgagggcgcgccggacagacatgctcagggcacagcaaggggcctgcagactggcccatgtaggagggggtcagtggaccttggggtggatgctgtgtttccctctaggagggagggaaagactgcagggtttgaacaagggcactgcagtctggcttctgcttcaaaggatcgctgcagctgctgggactgggctggggctggggctggggggctgccaaggagcacctgggcaacattagaaagccactgcatctgtccaggagtgaccatgccagcaaaggaggctgccaaggatgagagaggcagcccctgggaagctcctgcactccccagacaggccacagatcctctgccccagccacagccccacctggaacacgcctgcctgtgctgcaggtgggggagaaagaggagtcttgagagttagcccaagcctgagctctgagtactgggcagaccccagactccctaggcaagcaagagggaccggcagtcccaagttcttgaattctaggtgggaactccatgtgcacaaaggcatcggggcagggagtgcctgagacagtgaccaggatttcagtggcacatggcacttctcaccttgcccaagctcttatatcttttgtagaccctttgtctagttcgctggctcttctttgaatttattagcaatgagcagattagtcaagagaccaaaagagggagggaggcggagaattcgctgctggctgacggggctttccctccattcagatgcggccaagctgggggagggtgaacagtgggcggctatgctgggggcacacacatcacctgtgtaggcatgtctggcctgagtcatggagagccagcctgtccccagtacagccaagcccccgaccttgtccaggcaggtcctgaggtcagggccacctgctcagctttcctccctgtcccccttcactcgtcttccagggtgcagtgcacaagcacctcctccaagaagctccattgcatctccttctgcgtccaagcccgagcccctcgtggccagggctgtgtctgctccatcttcctctgcctggcgtccagggtggggctggagggcagtgggtctccatgagtgagccatccccacaagctctctccactgagaggcacccgagaccaagaggcaagaacagaaccccccatagacctttgaactccatagatccatgctggcctctc

SEQ ID NO: 913428 - DNA, 4001 bp, Homo sapiens
aattcaaatttgttgaaggcaagaaagaagagaggtggggtgggggagaacacagcaaaagccaaataaacttgatttcaaaataatgtgaaatgaattttcaaatatttgaaacactacacaggccaaaccaaacacataagcagaggacgtccagcttgcaggtcagcatgtgtgatatttaaattctactgacgtggacaagcaatcccagggggtctgataaaaagtcatgatttccctttaaccttggggtctttccttttcatgagggtgggggatagcagattttcctccttcccagcttgcagcttagataacagttgagtttctagcacggaagctcaggaggaggaaagatgtcaggtcacgctcagagaaaccctgccacaggtagtggggaggggagtgggccacctagttccccacccgagggactcctgtccctaccccaggcactcaccagcagccgcaggacctcactcctggctccctgcgcccagccaactgagggcatgcagagcaccccacctcccacccattccccaccaccacccctcccagcacttccaggcagaaaacgacccctcccagtgcctggctggaaagtgtgatgcccgtctagctgcccagggcctccgcctttgcggcatcaggcctagagagcactctggctgggcagctgtgcatgggttggcctttccttgagtctgagcagggaggagggatggggtgtgcccaccgctcattcccgtggggagaaaatcagccatccctctctcctaccctggacaatgcttggccaggagtaagaaaagggcagtctgaaatgggagatgcctcaatcctactagttctaatgttatttcaaggccttcaaaggaatctggagaccctactgggctagcaaataggatccaggcttcaggccttgggacctgctttaatttaaaaaataagtgaggccaggcgtgttggctctcacctgtaatcccagcactttgggaggccaaggcaggaggatcacttgagcccaggagtttgagaacagcctgggcaacatagtgagtcttcatttctgaaagaaaaaaaaaaaaggttttttaattagccaggtgtggtagtatgtgcctgtggccccagctactcaggaggctgaggcagaaggatcatttgagcccaaaagtttgaggctacagcgagctagaatcatgccactgcgctacagcctgagcgacagagcaacactctgtctcaaaaaaataaaaaataaaaaaaaaataagtggagttgtaattagcatctgagtagttcctgtggcaacgagagattcctaagtgcttgaaaacaacacaacacccttcctggagcacgaggcaagtccagctgccaggccccttgacacccggctactgaccaaccagcaaaggccagctagtactgggagaggatgccttgcccggaccaaggccaggaatcatctggagggcagttgaagccactcccttcccactggggccagggtgcaccagcgggccctgctctggacatatctctgcaagctcagtctaggaccctcctcttcccttggagttccacagagcaggacctgctgtgggcagagaagactgctgtgtggcctcgggctagtccctaccccttactgggccttgtttcccctctctacagaaccagaggactgcctaggtctgagcataccctcacattctcccaggagtccccagcaagggtctccaccacacttccctctccaagccttctcctgcagtcccccaagcactgacctcagagccagaccccagccgtccggagctccgtggagaggtcttctcagctgtggaagggaggcccaaggagccctgggcagtgcctgtgaccccagccctgccaggctctgctgtgccctgcagccctcggtcagcctggccagcagagtggcctccccgtcactccccagctggacctggctttgtctagaagagtttgggccctgccttgggggaggggatagctaagggagtagggatggcaactgggttgggaagagggagaggggagctgtccagagactctgggatgccccctggccttcccaccgcctctctccagcctgtctccttggagccctctcaggggtggaagactctggggagacgcagggggagggttttactgcctctgcggccccatggcgctcaccttcccctgtcggaagtttgaatggtatggtcggcggcagccagaggttcgctattcagtgcctgccagccaccaggttaccctggagaggggctacaagccatggcaggaggggagcagggagagtgctggtccctggcagcccctgaggcccctcctgcagcgtccctgggccccattccttccaggcttttccctcagcttgtagaaaagcaccttccctttgaaggtgtctggctacagaagcgaggggtgaggggcatcttcaaaggtcagggggatcccagggcagaaagcataggactgacggacctccaaggccatgctccccacagtgcgggtgggccacgggagacctccactggaggctctttccaaaacacacacacacacacacacacacacacacttccctcccccagccttctttctccccagaagccagagcttccctgacaaccagctgcctgcttaggagcccaagtctttggcagcttccccaccagggacctccaagctcccagaaatgcaactcaagacaggagtcatggccctgtccaagacctgagcctcagacccattcccttttttggagccccagtttctggtttttagctgttccctcctgcccttgcccataaaaagaggcactgtctgccaaccccaagatggacaagagatttcctatggactgttaaagctggagaggtcctcaggggtcatctaactcctcttctgagagaaaagagcccccgtcttctctcagatgaccaaactgaggcccagagaggtgtgacctgcccaggggcacccagcaagtgagtggtgggggacttggtgtttcccctgtgctgggtgggcaggggcaggcagtaggcatccagggtaggcaaagcatccggcccaaaggtgttttcaatgcccagagtccccattgggattcctgcaccttccatcacagcattcactgccttcattttccttaacttcctctcctgaaaccaactgaacacttcatctgtggcccccattcctcctgagatgacagaagacaaagcttccagggtggtgcaggctgctggagcagggaggcatcaaggaaatctcaccatggataggcatgcaagggcatgctctgggcaacgtggctctcttcaccatcctgagcccttccagatctggacaattgaagcaccctgttacatccctccacctgccagctcctaaggtttctcagggaatggagagagaaagaactgcacggcaaggggcaatccagccatccccagctctggcataaatccagagggctctctggagaaggtggcatcactcatgttgaccttcaccacacatccccatgctaggcaccagccaagacgctttgcaagatgacttctgatcttcccctcaaccctgcaaggctggtcatcattgtgcccagtctagagatgagaaaactgaggctcaagggggctaaagtacttatccatagtgccatagagagtaagtgacaaagcctaaattcatgcttgggtgtgcctgacccagggcccttgttctttttgctccagtgtactcgtcctcctccccaccatcaacatgctcatcagaatccttagacacacttaccgcagtgcccggatgtgcatcgaggccagcgcctgctacaggctcctcgctctgccttcataccaccatgtctatactccctgtcctgtggaggttccagggcatcagtgctgctgattgaggctgtcattccactcttccaaccacag

SEQ ID NO: 913429 - DNA, 4001 bp, Homo sapiens
caagaagtctccacagctcccctcagctatgctccccaagggcagccggtgagcagagcgctcgggcagtgggtgccgagccacctgcgtcctgccactcccagccaaggggcagacactcaggggtaaagtgggaccctcttactgagcctcaccctcttcattcatacaatgggcccacctggccctcacacagcaggtgttgcgagaaggctgggaggagaggccagtgggagcccaagggtggcagggatggaaaggaggtccccctgcgtggactgccagccacttcctcagcacggctgttgagggcttcggagcacacacttctgcctgtgcccctgtatttccacagtgctttgccctcttccggttagcagggcccacccccttttgttctgccctggcttcctctgagaggctcccaggggccgctgccccagatccaccagccccggtagccccaaacactgtttgaggtgctagggtggaggcagaggaaggggccctttaaaggtggaaacatttcctctgctaggccggaacccaaaccacagctcacctccacctggctcctccctgtccccagcagccctggccggccccagaaggagtggtcaggcagaccagaaggggcaggctgggtagggcatggctctgctataagagctcttgagtaagttcaggccttcagggggtaggggagggcaatgtggattgtgaggccctgggtgaagacacagacacccatctcattcccataggcctgggaacctgtcctccttcctcacccactgaggccaacccccttccactgggaagtccagcagcccccctcacccctgccttgcagcctcaccaagatcagagcagtagtcattgtgggaacacctgctgtgtcccaggcactaggctgggttcaggttacagcaagaaaccaaaattagacatatcccttgccttcctaagtgtacgatacagtgagggaaagacattgatcaaatgatcacagcagtaaatgtatgccctgagagaaagcctataataaggtgtcagggaactagaagagggcttccctgaggaagggactcaagctgagagcgtcagaatgcatgagagttaacccagcctaaaaaggaagagcatttcgggcagagggaacggcaagcacaaaagccctgtggtgtgaggaaacacggtgagtctaaatgaggccttagctagagtgagggggtttgggagggatccgatcacaaggacccttgtctgttttcaccctgagaacagtgtgataggtattgtttttcccatttcaaatgggcggactggggctcagggacctcagggaactccatagcaaaactcatgacagatgggtagagtcttggcaagagaaatcatgaatgtctgccaggcaggaagcaggaacagggaagagtaggtgccaccccttcactttctgtttgctcagttattcctcccaacaggtgtcattctgattttcagctgaggaaatggaaaatcagagagcttgaataactttttccaaaatcgtgcagctcataagtggttgggttggcctagctgcgaagcccaggctcactctcctatacttctgagagctgcctacagataggggagtgtggctgggactgagcagtcaaacctgtatagaaggaagaatgacatggaatttcctctgcagcatgcacaggcttagccggctccccatgagtcctgtgcagagtcagcaggacctgggagcccctgaaccccacatgcagggaagcagagaatggggtctggcctggggcagggcagtgggagaaggcctgtcctgggatacctaaaacctgagctcctccaacccccctcacaccctcatcagtgaacccctgggtacctgtgattccagccgcagtggcctgtggccgtccgtggactggaggcctcacccgcggcaggccttcactctcctgcctctccacaagaagcccgagccacagacacaaaacaatatgctcttgcgtgccatttgttgcatgcccggtttttatttgacagtcagaaattcacatgccttccccatctgcccttctacccactggaaccaagccaccttgcagccccctcctgctcctgggcccatttccttccctctaagcccaaggttgcaaacaaagacaccttcgggcaatatctggccaccagatgtgttttggacagcccacacataatattcttctctaaattttattactcatcagccaatttcactttaaaatctagattccttatttttcatgaaaaacaggaagctttgctcatgctagaccagcattcctagcctccatccactttagccatggcctggcttttcagttctcctgtccccaccacctctgacagtctccccaccaggcctcttcccttgccctcctagccaagatttaagtgtgtctacctgccaccccacaccaatcagactgctaggagccatgggcccagggcctcctttgtaaagtcaggataggcttcggtgggctctgagggtttgctgatgttccagaacccactggggatctggtccctactggacccacggtgggacccaggtgtttggggccaaggaggggaaggaggctgtaggtctctgaccacgttcaccctcaggtctacatcactgtgctggacgagaatgacaacagcccccggtttgacttcacctccgactcggcggtcagcatacccgaggactgccctgtgggccagcgagtggctactgtcaaggcctgggaccctgatgctggcagcaatgggcaggtgggccaccgagtgaaacagccaggatccaccatgtcagcggggctcccacagctctcacagctggaggggccttctgagccacccccatcaccaagcaccaggttcttccggtctctgcccctgcaatcacccagtctgtggtcagggagaagggacagagctgcctcagagctatgcaggccggtggccctgcctgggtcatgtggacatggagcccgaaggccagccaaggcgcaacccctcagtgaagttgttttccgggtaactccttcccacgcagccccagctccctgagaggacatgctcgtcctctctcctgcttcctaggcccagccccatggcaggaggcgcttgctgtcgctccaggtttggacaccccagagtgcagagggagaagtgatgaaacccgccagtgttcacacagctttcatctgttccgtgcattaggccgtgtgtttgcgggtgttagcatggcttgcatggtctagggggtcgagggatgctggctttggagacaaaagtgtgtaggttcagacctctggcatttgcaagctgtgtgaccttggctggttgttccatgtttctgagcctcctctctgtgaactgagaacagttgctttctgtcaaggttgccgtaagaaccaagtagagtccaggtaatgccgcagcgtgtgcccaccccagcagcgtgagcacaatcccctctaccctgggaagacgtcagtgccatgggactcaagccccactcttccaggccaggatactgatatctcctagccccggaactttccatgggtgctacactacctccatgggcctgcacccccattttgagggagatgaatcacttctgcttaaaacactgcactcccaaaagcccttgctcaacagagggcccacgtgggcagaggaggaccagggagtcccccttggcttgacctggccacctctcctccacacctgctcacccctcaccctctcttctccccacaggtggtcttctccctggcctctggcaacatcgcgggggcctttgagatcgtcaccaccaatgactccattggcgaagtgtttgtggccaggcccctggacagagaagagctggatcactacatcctccaggtggggcctggcctcccttggactgagagaccactggctaagtgcctagaccg

SEQ ID NO: 913430 - DNA, 4001 bp, Homo sapiens
cgattagctgttgggggatcaacattgtaaagaatttgatctgagaagaacctttcagtatttacctaaaaagtggtggccttgggaacagaccacaagagagaatcttgccatttttctatctaacatacgacacccccaatcagcacaaatgggtggcaggcaggacttgttttaatgaatgacacagctctatgcatcaactatattccccatgaactacagaaactctgctttcattaaaacggaaaatggagtttccaccaagcagcgaattagcgtgtcatcttagtaaatgaacactgctaattaagtccctgttacaacttgatttcttctgtttgttactaagtgattgagcacatcctgaattgcatgtcatgagaatacctggccctccaagaagttgaaaaatgtgcaagctgacaatcctaagagggtagataataatctaagatctataactagctcattcatctgactcaaccattataaaatgattttttttcctgaagcatagcacttctttacatcttttaaaaaattttgtatttttttaaagtccagattcattaaaacccccaaatgatcagtctttttggaaaggacatggtctacgtgggtgagcatatgtatgtgtacactgataattgtgcatagtcttaagcttggtatatatttaaataacacaatttaattggaaaatttcctgtgctacttttgaaattgtattacttacattagagatcacaagggaataataggcttagtaccagtttatcacattaaaatgtacttttaatgtctgctaatttcaaaaggctcatatgagagtccgcatgccttagtggtctgcattttgtattggtaggaatctcgactgggaacagcttatatatctctgagcaaggcatggaattattggctccttgtgtttcctcatttataaaattgcagctaacacttatcttctgcacaaagaatgtcgtttagaccaacgaataaggaagtcaagcaaagcaatgttaattaagacatgattattcaccttgagagccttaacaaaacggaggaaaaaaaacttcctaggaacaatcgtaacagactccgtgtgcaaagatttaaacttttttttttataatatctggcacagcagatgtgttcttaaaatctcaggatattaagtttatgagtaaagttacttaaaacccatttattatggagagctggtgatgggaggggcctaaagatcaaccttttgtcacacaggaagccactggtgtccaaggagattaaataactttcctaaagtcaagctgatgagcaactaaagccataaccagagaagattttccagccagtgtcctttcacctgtatttatttgtttaggaaaatggcaaaataatggaaacaccaatcttctaatattaatcagtccatcaccagtaaacagttattatttcatgacaccttttgagcaatcgcaacactgtaatcattacaaaattagtagcaatttcaaaaagagactggctcatttaaaaatctgagattacttattttacctagaattaaaaaaaaaaaaaacatgaaaaaccaaaaaacaaaacctgcggtagaagcgcgtggttatgagggcgtttgggcacggagccgtccaatggaagaattcatacatttagacccgctggcaccgtgcacggcgcgccggggccggctggggggcgccgggctgcagagggtgtcggggaccccagcgcagctcccagccctgccgccctcccaggccgctcaccagccggggccagacgtgcggcgcctcttcggagaccggatttggcttggccgcagactccgcggactgggaatgagcgctcggaggtctctggtaccggcaccggtaccgggaagggaaaggggcggtgtacctccgattcgggcgtggttcccgccggggtcggcccccagggagtcgtcccctgcgacatcgccgcaatctcggccgagagaagcggcccctcgtcacctaggcaactggggtggggccggcgtccctgggcctgggaacagatcccagcggaaggcggcgctgggcccgagcctctgcccgccgggtagagggctggggaccgcgcagaggagcaggaggccgggagggaggccgacagcagcccgctacggaggccctgaatcctctgggagagaccgagtctttcctgttagtaggagtgaaagtggggaaaaggcaattcaagtagtagtaatttaaatgaaatatgtcaaagtacctaatgctagcacattgcaagtttcaacaaatattaaagtaagatatattattagaacttcaaccactgattgatgtttgatactaagcaatcattgtaaattttaaagtatcatgatggtattgtggtcatgtttagaaggaaaaatatgtctttatcttttagagatacatgccgaacaatttagtgatgatgaaatgatataaaatatgtgatttattccaaaataatgagggaggggcacaggaaatgagtggtggtatagcacatgcatctagattaggcatgtgaatggaaggggttcgatctttaatagtgcacttaatagtacactagaaagaaagtgtactattctccttttgtatatgtttgaagtgttccacaacaaaaacatttacaaacaataagaaatgtcacatagcagcatgagtattcttgacttctttggatgatcaacgcctcctttgaaaacgaaatgtacttggcttgtatttacctgcatgtaggttgctatgcaggacacttcctgtgaaaatcagacatcatttaagtgcttcggtttcctcatctgttaaatgaaataacagtattggcctcaaaacatgactgtgaagattgaacagattaatatatatatgaaaatgtttatatcagccttgacacctagtagtggtctgtgtttgatattattagtgttagtattaatattgtgcttctcctgatgttagtccatattgtagacagctgccaggataatataatatttcatcatgaacctctcctttatattagcccattgtcttttagaccaaatataacacattagctttatataacctcatgataattgtgcctttccttcaaattgtctcatagttcaaagtatacagtttgtactgtcaacctgtgtttatgagttgtctctagtcttgtaaatgtatggcccatcttttcaagtgggttttactgtttcccttgttattttcacttctgaaggagctagtttagttctcagtacaaagaatgcatgcaacaatacatttatgaattacaaccccatttcaataggaccgtattaaaatttcttcaattggtgaaaatatagtcactttttagtgattgctagagttagtacaaaagccaccactcactacagtgcttaatctttttcattccttccttctgatcgccactccaaagaaattgaaaatagctggtcaccttcttcaaggtaaggactctaccatattccttgaatttagtgtttgataaaatgataaagcatttatttctctaacgtggagttccagttttctcaaagatttggtttacttttcaggcgtttaattttgctgccatttctttgacagtttttaggttttcttctcctgtttttggttttggaccccagaactagatgcaaaactccattaaagatggaatcaattctaacagtaataggatggttatctcagggagaggggaattgttttgtaggaattacaattttactttaaaaaatttaatgttgtaatttgttagagaagtcagttttgagggggtaatttaattttttgggacacaaatgttttgctcagtaagaagtgatgtttaaaacccattagcctgaaggttacttttaatttgcacaagttgaagctgattttagcctcccatttcttttgtaggtaggtgccaacaagaaagacaaa

SEQ ID NO: 913431 - DNA, 4001 bp, Homo sapiens
actgttgacccacttgaatttcagcattatctacctttgtttctttttttttttttttctgagatggagtctcgctctgtcgccaggctgtagtgcagtggcgcaatctctgctcactcactgcaagctccgcctcccgggttcacgccattctcctgcctcagccttccaagtagctgggactacaggcacccaccaccaagcccggctaattttttgtatttttagtagagacagggtttcaccgtgttagccaggatgatctcaatctcctgacctcgtgatcctcccgcctcagcctcccaaagtgctgcaattacaggcgtgagccaccgcacccggccagcattatctacctttcttaaccaactaaccattcatagtaatcatggttaacatgtacataccaggtactcttttacatgttttgttttgtatatactaattcaatcatcctaacaacactgtaagataaccctattactatccccattttataggtgaggaaacaagctcagggaggcaattagctctcttacctgcagtcacatagccattaagcggaagatctgggatctgaattgagccatctggctccaccagtcctacttttaatcccaacactatattgcattggtttcacttgttcagagtttaatcatatgaacccagacacataatctagagtgtaatggtaagaaaaaccaagtgtccctggccatatttctctcccattccttccacctcattccctattttcagtattcggcaattaggtattgcttctgccttgctgaaatatgtttttgacataaaaatggccataagatattccagtaaatacagaatgacccaaaccaggcaatgtattatttattttgaccatgagggcatatccttaatcttgacatcttggctggtttggggcatttcgcttgattgaaagaaagggaggagatgaacatttattgagcacttgctcaccatgtcccaggtaatgtgcctggcgctttcacctagattgctctgtttaataccaaaagcaaatccacccaaggtaactaatgaaatcccatttttagagacaaagaaacagactcaaaaaggttaatacttacatcatggtcaaggagactcactttggagggatggcacgtggattcaagcctaagcctcatctaaagctgagtctatttctacaacagcatgctaggtagtagataccctatcctataaaaccagaaaccattctcagactttttttttttttttttttgcctctgagcagtaagtctttacagatttactggttgttaaatgctactgactctagctaattcccaaattaactagattccttttggagcttgtaaaatgtgctacacactcaacttccgaatttagcatgcaagatgatgaccacagcagtaagaatggtgcaactttcttgttagaacaatgcatgcctaaaagcctccttttaatttctaccttcttttatgaggactatgtgatcgaggacacacctaggatactgcatattaatttcaacacagctaatacccaaaatgtcccaccaatttactcttcactgacaatgttaaaagaaaatgatttatgcagatcaatcatctcgctcatcaagtcctaccctgacagccagccttcatcattgctatttaaaaggcactgctgacagaaaagaccgactctttgattaagggtcctgtctggctaaccttttatttgaagaatgattgccgctgagtgacaaatacttttccattcatttcaaggcaaagatattgacattcaaattcttgatggctacactgagcagatgccactgttggcaagaggcatgagagcaacagcaggtactccacggctttgggggcaagggaaaaagaataaaactaaaacacatgcacgccggcgctggctaaaggttctcaacaagtgaaagttgcgggtctttcagccagatcctctttcttcaacagtcagcaaagggcatctgcttgcagtttcgccccggtctccatctcacaagtgcctggctttatgttgactctacttggaactgcaccggcagcgaggactagaagtcaaaagaagctcagaacatgccattcccaacccaagggaaaaacatctctctgtccggaattgcagcaccctggccgacctcaggctgaaagtaccggcctcctttccgcttcacaggatgttaagtgactcaatataaagtggaagaagccggtgaaaaatcacccataaaaaacaaaacagaaatattccatcccatctgctaaagaggaagaagaaaaaataataataaaaggaagaggtaagattgacaaatagagttagcaaaaaagacaaactgaacttattttaaaaaggtggtttttctaattcatttcaggtgaatttagaccttggtcagcatcacacacacacacccccacacacaaacactgcattcatatcctcacagcaggattattttgcttgtttttatttcttaaatgcaaaatattaccttaaaggaaagtgagaaaattatggattaaggaaggctatttgtgacaaaggccatcacaaagcctcaagattaatcatttccaggaacaaaatgaaaatacctcagcaggtcatcaacaattccttttaaatcttgccgagatgcaatgttggttctcacatgcttcacaaaggaaagggtatccgaaaagctgtagctgtgatcctcgaacacattccccacagagggagaggcaggagatagccaagacacagccagaaccttctccccatcaccccagggccaaacaggtgaccagggcttcagagagagagaaaacctgggtgtgaatccaatctctactactcatcagctgggggatttgaaacaagttaccacctcaattctctgtgatctcatctgcaaaatgggagtggtgagattgacctcgcagaattagttatgaatattaaagaatagaaactaaataaagcaactttcccttacctaaacctcttttttcctcctttcttctcctcttctcctctttgctcactagtttgcatgtgaatcgaatcatccatgaggggtatcagcaaaaagatttacagttatagcctcgcttccctcactgtgttacaatgagaacaaataagataatgttcgcattaaagcactttataaatcttaaatcaatacagaaatgtttgctgttgttattgttgttctccacaaacggtatactctaacccattttgatctttttcctcatttatttctcccatctatatttctcatggtgaataataaatcaataaccaattaattagtcaataatcataatatcatctccattcctgagaactactagtggttgtttctgcagctgtctgaaaggagtccctgggagaaatgatgtttcttctataacaaaaatgtatcggaggttattatgagccaggcactgggacaaagaggtgaatgaaaaatgcaaaattcagtcaagtgaggcaaacagaaaaataaagaaatgatttcaatattgctgcaccatataagttaaatacaaaggccaatgaggaggtcaatgaggaaaggtatgactacctggggcaatcagggaagattctgctacagtgatatcaaggcaagtcttcacaaggtggaaaaggaagagtgggtcacttcggagaaagaggatgccaggtgcaaaggcatggaggctcaagacagatcaccatgctctggcagggacaagggggaagttccaatcatactaaagagttaagacttattcctttaggtaatggcaagtttgagcttgaaattgctatcatacagcctatggtttcaaacatgcccctgatgaaaggcaggacacaacaacacttgctgggtacccacacagtgctagcaactggagacacacagatgagcaaaactatcctgacacactcccaggaaggggagccag

SEQ ID NO: 913432 - DNA, 4001 bp, Homo sapiens
ttttagcaaaatcctcgtggaaattatactgctagttttaaaataaaacacaagcactaaaataataaaggttatgtttcatttttattaacttagttttgccacggttgagactggatttgccatagttcaatttatcaagcacttaactatgtgttccgcacataataatcatcttagcatagaggaacatgtcttctaatccgcacaagagatactatttttatcacgtcatagaggaggttaataaacttgcctaggtcataagatcttcagttgatgaagttaggatttcaacccagagccaagtaatgtaatggctgatgttttccacagagaaaatgtaagccgagatgatgctcaaactataaatctggaaccttagggggacaaaaacgtatggatgtctccttcccattactttagcattttaattagattcctgtgtctctatttgtctttggaaatgcaagctgcttgcagttcatcatagctaactcacacaattcattttatgaaacacaaacctgttctcacaaactcactgtcatctctttttaatctttctaattgtgataaaaatcatactgcactttaccctgtgtaacctccaatgatctttgaccaaaagccaaatcttttttttgttgtgtttacttatggacagttaggttctacataggtacttaaacatgaaaattgaaatcatagaggctgggcacagtagctcatgcctgtaatcccagcactttggaaggccgaggtgggcggatcacctgaggtcaggagttcgagaccagcctgactaacatggtgaaacaccgtctgtactaaaaatacaaaaattagctgggctggtggcccgtgcctgtaaccccagctactccggaggctgaggcaggagaatcacctgaacctgtgaggcgctggctggagtgagccaggttcgcgccattgcactccagcctgggcaacaagggcaaaactctgtctcaacaacaataataataataaataaaagaaagaaatcacagaaactataccagaaaataggatacaaaaccaacagtgaggagattgagaaaaggaggcagatacgtaaagaggaaaaggaagggggcccaagtaaggccggaaaaagcggggagaaggaggaggctcattaggtcagaagcaacctgccgtcttctaagttctggccaagggtagatcaacagatccagattcctgagctttaaaatgttattcggccgcttcatcacttgtccccgactttgcagcgactccgatggtagcctgagtctccattgcttggagcagccacagtggacactggacgggatattctgtgcagctgttgctgaactcaaggcaactcttactgcctttctcttttcgggctcaagattccctgcattattgcccataggcatgtgttttaccccatactccttctcccttttatcttgattttcgcggtgctggggagtctgcagggattccatggcgacgggctcactgggacaggggctggggttgtgcgtccctgaggcaaggcaaatacagaaaagcgaatagagacagagggctaagattccaaagcactgaaaggtagaaactgggttagaagagagaggggagcacaaacgcccggagagagcgagccctcgggataccattggctataggctggcctccgaacaactggacggtccaagtcctgagcgtctggttacccgggcaaccgcatggtctcgcgatacatacctcgcgcctgcgcactgcccctgtagcgggggtggggggacccggtccggagactccaccccggggcctaaactcgagtctaaaagattgggcctcgttgtgtcgtttccgggtcgcgcgacgctgtgggccgctttcccctctccggagtgacctaacacaggataacgaaacctgcactgctccgagcgcttcctccccggcccgtcgcgtctgcgaggcgaggccgggaggcgagggctctgcgcacgcgcggcgcaggcgcactgggcgccggtgctgttgccttcaggtgaccacggattcgccatcgtgagttccaggtgggcgcgcggggcccacgtagggcaggaggccagccccggggggatcgggcccgggactctgcggaatctggaggccgaagcccgcgcgcacgcagggtctctgctgcttccccaacgcctgttgcgtggccgcaggacccgccgccctcccggttgggccgcccagtcccgggccgggcgcgtgcacccagagcttccgcgtttctagtccggctcctctgctggattgcagcgccggctgggcaccaggagtacaaagcgaaaacccccgccggcccttctgttctccacggtctccaaggagacacggacaacagaacaacacttccgtgtgctaaatagtaaagcaccaaggtactcgatccaggggcggcgtgcagtggggaggtgagctttgggtcggccgtcgcccctcggctaccggcgggatccagaaaccgggagtcaccaccaataccgttctcaactttacttccagctggtcactactgtgtcgggagattctaccttcttttccgactaacatgtatttttctccagtcctttctgcggcgtctctagtgcaggccaccgtcatttctaacctggacgactccaggagcgtctttgctgctcggggactcttcctttgcccagatccacaaagatctataacgtctttctaatcacgacacctctgctttagatgttaaagttgcttcacactggaacgcttgcaaaggtcttcattatctggtccttacccacctttcctagtttctcaccgctttctctagcatctctgccccagccacattgaacttatttgaacgtgtttttttttttttttttttttttgagacatagcagtcgcccaggctggagtgcagtggcgcgattccggctcactgcaacctccgcctgccgggttcaagcgattctcctgcctcagcctcccgagtagctgggactacaggcgcctgccaccacgcccggctaattttcgtatttttagtagagacgggtcaccacgttggtcaggctagtctcgatctactgacctcaagtgatccgcccgcctgggcttcccaaagtgctgggattacaggcgtgagccacctcgccagccaacttatttcttttaatactgagatacctttctttactccatacttcctttggtaggcattgtttagatgtaggttaagaggtccggcccggcgcggtggctcacgcctgtagtcccagcactttgggaggccgaggcgggcggatcacaaagtcaggagatcgagaccatcctggccaacatggtgaaaccccgtctctactaaaaatacaagaattagccgggcgtgatggcccgtgcctgtagtcccagctactcgggagtctgaggcaggagaatcgcttgaaccctggaggcggaggatgcagtgagccgagattgtgccactgcacttcagcctggcgacagaatgagactccgtctcaaaaaaaaaaaaaaaaaaaaaagttcctctgtgaggactgccttttcccacccccctcaactaagctaggcctctgctggatgttccctaagcatactgttccctgaccttcatgtgcatcaggctttattgtataattacttgctaatattttttcctcgtggactctaagctcatgaggtctgtgagaaaaaatacttaatctttatggcctggcacatcgtggataatcgataaatatttgttgaagaaaggaaggggcctgcggctgagggtgggagtggtattccaggcagagggactaatgtgtataaagacttgcaggtgggaaaatgctggcctcattaaatagtatgttgttcggtgttgaggacttgtgcttggtggggcctaaggagaaagagggcctaagtgggagattgagctggagtgtgga

SEQ ID NO: 913433 - DNA, 4001 bp, Homo sapiens
gactaaaaatacaaaaataagccaggtgtggtggcacgtgcctgtaatcccagctacctcagaggctgagacacgagaatcacttgaacccggggagttggaggttgcaatgagccgagatcatgtcactgcactccagcctgggagacagagtgagactctgtctcaaaaaatgaaaaaagaaaaaaaggcagattggaataggaagagccaggttccaacccaagccccatcatataaggccaagtgactgtaactagctattcacgtcatatgtctctcatctcctctgtaaaatagtggttagcatgggctctctcctctcaatgaaaaagtatataaaatgaaatgaaaaagtattaaacatgttcaagtatataaaaagccccttcaaattaaaaaaaaaaaaaagatatctctccaagcacaaaaaaggggtagataaaaaggctaaccacagaagtaaaaatggcaaaaaaataaaataaaagatgctcgtggatagaacaagaaaccaaaaataacacaaccattagatattacttttcatccagcaaactggtaaaattggaaagattagattcacaagatagggaaagatgggtattctcttacattttgtctgggacagtaggttgctattgccctttggtgtgtttgatagtggccaacaaaatatgaaatatataagccttctggcttggcaaaatctctttcagtactcccctacagaaatattctcacatatgccaaagttatttgtataaagctgttcaatgcagcactatttatttaaatgtccattaattggggaatggttaaataaatgatggaacacctattttataggatatcaaaatgccattaaaaaggattaaatagatctattgatttgttctgacatgaactatattatggaactagaatagtgcctgacacttaggaaccactcggtaagtatctgttgaataaatgaatatgtatacaccttttcatagcactttacataatctatctcctctcattcttatgccaaccctacaatatgagccaagtggctgttattgtgcactctgtaaggatgaggaaattaaaatccaaggaggttatgacctgccgaacatcccaaacataaagtatggaaccaaaacagaatcagatctaccggtcagtactctttggtggctgacatccattctgcctgcaacaaggctaacctgcacgcaaaccctgtagggaaatgccaagggctccggcagctggagagtaactcagtaattgcttgctgatttggactgactgaatcttcttttaccagcaaagccctccattaggtgaggctcggctctctggaccgcagctcgggcccattgggcatctaacaacaggtctgaaaggaggtcattcaacaacaggtcaccatggaaaccctaaccccctcctcgcccctggaacaaaatggagtgggaaggcaaagaggagcatttgttaagcgcccgctatgagccaggcaccatgaatagggaaaaattcatttgagtcttcctttacaaatctccaaaagaaaaagaaactgtgcattgttaaacaaagtacagaacaggcctgcgtcgctgcttaatctaggtcagtgataactgcaaaggaagtttatttcatgcagagggtactccgttcacccctcttacagctgcacgtgtcaggcagcatcatttacatcaccacgtggccctgtctcagcacacccatgcagtataaacctgcccccaacacatactctacctgttcatgtctggaatgtacatttcagccacacaagaaaaaaatgactggttgattagtaaagcacaaacactctctctcatataagctagaggacagccaatatcttcagaaatttcaggtgccatgctttccatagagtagattcttctttcacttttagccatcctactcctgcattatcagaaaatggtgaaaatggtgctgtgtttgggcattgttaccttggaactttcatcttaattacagaagctcttagcaaccgttgcttagtaacaaacacatttgaaatagatttgttgactgattatgagatgctctgaaaagtctgtagaatgaaattcactgatggaaaagaattgcaatgccctggtaaagtaaaaattttttttaactacaaaagtattcacaaaacttgggctatgagcaggtcccaaagatattactgaacttctggaatagtttcataatattttatgctgctttatggctggtctattattttcataatcaattcggacacaattatctgactaaacagctgtcgaagctctgggagataggccttagggttttagtcaatgcagaattctgcacagaaaatcaatggcttcttgatttccacgggttcacaaggtcctccctgccataacgcctcttcccactcaagatttctgaagggcctgaggcttctagtgactcttcaagtcagaagcaaaaaccaaggaaagctttgcctccatctttccaataatatttcttcagcacctattaataaaatctgtgataaaaagtagaaatggagatgcgtttaggactacatccacgcacatcttccccaaagcaaaaccccaaccccacacacactcccctctctgagcctgggacctcctcctgcctctcaacaaggtctcattgcacgttagccattttcacctcaaaaactaggaaccttcgcccagtttctcagaagaaggggtcctcatcagcagagaaagtccctctcctcccttgtatctttctggaattcttctctgaccctgtttctcctccggtttttttttttttttttttagacaaacctctcaaaggaggagcctcccttcactggctttcccttctcacttcccactcagtcctcaacccactgcaggctaactttacctcctgatttcctctttcagtcaccattgctgtggattccagaaagacttcaatgaagagtagtgtaagtttcctcagtcttctctactccataagtcctttcttcccagggagtccttgatatttaccacggttcaagcctacatccctgagtaagaagaatccgcctccacggaaggaacaagagaacatccaccaagcgagcacctgtccagaacattctatctggttgcccagagcaactcatgttcctcacagtctgcttcacccatttaccttagctacccagccccttcagcattcggacttgaggctgcaggcaggaatctttgtactggccttcctgtcgccaaccaaattcaattcactcacaggttccttcatgaaacaaatatttatcaatcacagatatttatcaccatgccaagcattgtctttaggcagtgatgatacaataatgtccagaaaaaataacggaactcttcgttatcttatggagttcacaggatgaagaattactcaaataaatataaaatgagtgctaagaagaactatacaaggctagaagaatttacagtagagagcactagccagaccatccctgttgacagttgaggcctaaaggacaaaaagtcatcaacaagacaaagatgtgtggtgggagaaagttccagaaagggaataacacgtgcaaatgtcccagcttcttctcaaatgatttatccagtatactcctgtgatattatgaaacatgtacattggtttccatccacgttcatggctcatcactcccaggacgcttgttatttcctaagtgactgaaacaataagtatctcttctgttaaagtatgtggactttggtccgtggttcccaaagcagctttggaatagcatcagtgatgaaggtgaaagacagccctgtggtagaatgttgggattctttaggcctcagaaaacagaacctctcaggcagagttttatcctgccctccttttttgttgtcgttgttgttttgtttttgtttttgtttttgttttttagacagagtctcact

SEQ ID NO: 913434 - DNA, 4001 bp, Homo sapiens
gcagtggctgtccagctgtggttatggggtccctgctggggaaaatctctcctcgtaactccttgacttctttgtccagcatgtttttcaaagtctgcctggtgatgatccccccgccttcgccctcctgctcagcatctttctcagaggggcgttcattgacacttggcttttctgtgtcctccagagtttccgtgtggaaactgtcaggtagaaggcccttaggtgttgtcccaccagggtgcccttctttttttgaacgttttgcactaggatttttaggaactttgatttcaagacaagctgaggaagaatctgaactctgatttcttaggcatctgtcagcagaggaagaatccgaaagttgacttcttaggcacctatcagaggcctcagggaattttttaccttttttcttcttgtccaaattctcttcgagtgagtcaatgcttgtatcatacgtgtctttttctgacaggcattttacatcaccgtcctctccctctaattttcctataccacctgctgcctcactttcctcagtttcactggggttttcatcagtaaaagtgctgctttccttcaagagtgggtcgacatttagctcctgggtgtctccagactcaacctcagcactgatgctttggttgtcctcagcctttcccagactcatggggggctccaagcccattggggaactctgattttctgagcactgaggactttcttctctactgactatttcaggaggagaatgaggcctagaaatgacatcttcactgactcccccggaaaagctttcagtggagggaaggaggtgacagtcctggggtacactcatctcctccgtatccaacagtgcaactggtggttggttgtgttcaggagaagacatcccacttgctgtgggagctgagactgtggagccaccttctggcaggtcctcttcaggaaggtgagcagggagaggccacaccaggctggaggctgtcgtttcctctgacctaggggagctgctcaggttcggcttaatctttgtggggcaaacctcaggctcttgaggttcttttcgaggtgaaacgtctccacctccttcctcgtgagaggtgatttccttgctaggttcttcagggttgtcttctctgggaagctgcacatctactgtatgtctaggggctggaattgtaagggtctgcttaggagtgaaaactgcctctgatgccaatgctgagcagcttgctttttcctgggagtgtaaatttctggccagtgtacgaacagttggcagctcacaacagtcaccattgaaaaagtatcctcgagtactctttctggctgttttccgagaagataatattgatttttgattctcaaagtggcattctgttattggttgactgatataaacaacatcacactggttatcataatcatttatcctcagccctgatgcccttttacttttccgagctgtcttgatggaggttgatatcatcttggttcttgagtgtccatttgccgctttgtgtacagctggcatagggccggggcctaaccaaccatctttggaatgatcaaactggcccttatcactgggatgtaaatggtaacccaccttatttcttcccagagagtgaagatggttctcttgctttggccttgcatcttgttcatttgcctctaaatcctggcgcaaaggtgtttttggacactgtaaagtattctctttgtcagcagttctagatgagttccccataaaccctgagttccaagcctcttctgataaagctttgaacaaatttctttgaggaataatacaggtattgccttcctcactattctcagctgccatttttactgtaattagactttctactaaagctgaactctgcatatggtctttaccatcctcacatatgttcacatttgtgtcttgctcttgtccagtggtctgcccctccaagattttagggatgtggtggaagttcactgaggaacaattagatgcagtgaggtatcccggagtgaaactatccactgaactgctattaatagaattcgatttagtggttggaagttcagaggaatctttctggacaacagtcaaggcattctctcttccatctacagggtttatctcaggaggaggcttcttcggggtctgttccgtcaagtgtagagggctgtgagagtctgacgagtctacgaacaaatctacagaagcagaagacttcatatcgagacacagagcatctttttccttatgtttggtgctgagctgggcacagccagcattgcaagtggatacatccattgctcccgaatcagaaggctgcaggtcctcagtgcctggttgagattcagtgtacaggtcgttcagaacacgaatgaattgcttttgatgatgagtacacagtttgaccataaatttctccagtggggacttcgactgattgttagaatctactgcttttgcctctgttgagttctcactagacagagaaagagaaagaaggaattagtattgtcatttaccaaagaaccatttttacattataaaattcacccaacgttattcattttattatttatttattttttgtagatacagggtctcgctatgttggccaggctgatctcgaactcctggcctaaagagatcctcctgcctcagcctcccaaagtgctgggattacaggtgtaagccaccttgcctggctatctgtattataaagagggtgggtactttggcgaaaactgcttctaagtctgctcatatacttttgattcaataaatgtgaattatttacctaattataaggtcagcctgttatagcctcaaattttagtgacgatattcttcatacgttaaaagtaatcattcaaaaatcatttttatcttaaagagaagaaatactgcaaatacatttttttcaaaaaagctaaaattttgaccacactattaactctggttggtcaacatatactttattttaggtctgggtattcctgttaaataatcgtgggtttataagtccacaacactgacaagaattgaggtgcactacagtacaaatcttgggtttagaagtacttaacagaacttacagttttttttttttgttttgttttgttttttaatggagacagtcttgctctgtcgcccaggctggaatgcagtggtgcgagcttggctcactgcaacctctgcctcctgggttcaagcaattctcctacctcagcctcccaagtagctggaactacaggcgcacgccgccacgcctggctaattttttgtattttagtagagacggggtttcaccatgttgcccaggctggtctcgaactcctgagctcaggcaattcgcctgcctcaacctcccaaagtgctaggattacaggcgtgagccgccgcactcggctgagaacttaacagttttaagatagtttctcagcatgaccaattggtcatgctaatgcaggaatcctgctaccctttcctgggagtataaaggaatagaaatcaataacttcacctactttaaatggtgagatgacaagcaagtcccaattcgcagtctcttaagtgaggagatagctatgaagccacactaaactgtacaggcctgtcactgcaaggtagtagtattgtatctttattcaaggcccacttgctacattctccgagatcttcaatacaccttttacaatcaaccacaagaaatcattctatgttaaaaacccctttccaccatttaagtaagtcacccaggacaaatccttagagcttagcgcagacagtggggactgtgtgaaagggtgatgctagactcaagacatgccacaggcaatacctgcttagacagccaggcctttcactagctgctttgtgcttctggatgtctgggttgtactgaacccatgcagtcggtgtgctccaatttcctggagttttatataattttttaaactccctctctctctgtatggattataattcc

SEQ ID NO: 913435 - DNA, 4001 bp, Homo sapiens
gtctctccgtgatataaaatcctgattcattagcattaagtcaccagggaattctgatatgcagaaaagatttcggtttgttaggcctgcgatggaccgttccggtttctttgcggggaggaatgatttgcgatcatttccatggtatgttaaacatttttttggttcttttgacttgaaaactacattcatttttatttctcgtctttttgtgttttttccctctgcctcctctttcttatcttggttggcatcatcacaattatgggtgtcatagttgtcttcctttcgtctggccttattttttgccattggacccaggcccaccccagacagaaatgaggagcgtgtaaacctttcaatgtagggtaaaggctgatgatttcccagagcccgagcaagcctcatcctctctatgtgcttactgacgttcacctgctctcgttgtggcattttaaatgcctccaggggcgcaatcacctttgctgtccatattttttctaggggtacacaaatagcacaaggagaggaatgtttctttttatactccattgcttgtttgtagtccggagacagcaactgtagttccttgagcattctgcattcttcctcttgcttgtaagccaaaagccttcttgctgctatggtgtgaatgccacctagacgctgacaatggagaaaggactattaaaatctcaagagcacaggggcaggcggcacccacagaaacttgctagtggctggttctccctccattgtggaaagtgtttgagcctctctgtagtggaaaacaggtgaacctttggcgtcagataaccttgggttcaaatcctgactctcctctgacctacaatgaattcagaataattttgttgactttacagggtcatggtgaagcctcgacaagacaacatatacgaaagtgaccagtgcaaggtaggagctgaagaaataactgttccatcatttgttatttactcatatttgtaagtgggacgtgtcaataagagtattttgctgtgggccgggcgcggtggctcacgcctgtaatcccagcactttgggaggccgaggcgggtggatcatgaggtcagaagatcgagaccatcctggctaacaaggtgaaaccccgtctctactaaaaaaaaaaaaatacaaaaaattagccgggcgcggtggcgggcgcctgtagtcccagctactcgggaggctgaggcaggagaatggcgtgaacccgggaagcggagcttgcagtgagccgagattgcgccactgcagtccgcagtccggcctgggcgacagagcgagactccgtctcaaaaaaaaaaaaaaaaaaaaaaaaaaaaagagtattttgctgtgcaagtgtggaagccactagcagattcagccaatgggagtctactgtttgagaggcagctctgttactggtggcttctgaacctttggctccctctagctaaactggctggcttcagtggggcctctccgtgtgaaaactgcgggacacttactaggatctctttttccaagggggagtatttcccaagggcaatccgtgggtctgatctgtagaatttgctccatatcctgcaagaagagaagcaggaatatcagaattctggaaaggctcttcctacttttccctcctggagtgggaaggctcataaagggttattctacactagccaggctgaggccgccatgagcaggggtttctgtagccactgggtaggcttctccacttggcctctttctgacatggacagactaaagtgcaagtcagactcaccgcaacggtgaagcagaactcagatcctcttggcaacacgttggggcttgatcctgaaaggaagagttggtattaaatattctaactggcttttcattcttcctttcttgcaccattgtgtcactagccctctgtttttcaatcctctgacagtcattcttccattctctgatcatactccggcaataagctaggacgggaggtgttcacacctggagtttgtttctaagacaatgtgatgagggcccgagggtaagtcacaaacatttcttgcatcataactggcttacctgggggctattgtgaggtctgagtttaagacattgaatgatcccctggggtgaaatggacacacattaccaggctcctggtgtgttggagtcgaagagaatggatagagaatgtggctgggaggcaatctgaccatgtcactgccactgaaaaacccacaagactgctcagttttcacaagaggaagactcagtcaactaaaatctctctcactggctttcactagtctcttcagccttagctcctcatgcttgatcaacgccacactatccatcattctcaaaacaagcgtctgagctattgttcacagtcccctcatgtgttgaataactctcttatccttggcaacttgcttgtctctcaggacccagcttaattgttgcttcctctgaatgtctccttgcagaataaatcaccctttgtccatgttctcatagcactctctgcctcatgctatggtgctttctcacataatgacttgcttggtaagtcagatttcttggtaagtctgtctctccctctattgaaagaaggtaccaacagcatcttattcttctttggtgtgtggttgtcagcatagggcatggtgtagggcagatgctcagtttgctaactcagtaaacaattgtcctgagaccctgttcaaaggtgtggttaagaatggcactggtgggaattgatattgccaaaactctatggaaggtaatttggcaatatgtatcaaaattataaatgtatttgccctttcacccagttatgtgtacaaaataaattactcccaaggttggtcagtgtgactttgtttgaggtgacaaacctcatggcaaattcaaatacccattaaccagtaattggtcagagaattctagttagccatacaatggagtataggactataggagtcaaaaagatcaaggaaggaagacctttacttatatggaaataactccaagaaacataatcaaatgcaaaaagcaagatgaaaacatatataaattctagaatactcttttgtgttggggagggaaaaaataagcatgtatatatttgtatttgcataaagaaaccagaataatacacaaaaaactagtaagacagtaggtattcagcagatgaagaagtggtgggaatgagccatttcatggtatacatgaagatattgtcttgaatgtagaaccacatgaatgtattaggtatttgaaaacataaatttaaaaagtaaggaagcagctcatggaaaaagattgccatgttatcgctgacaaacacaggtcctaaaactcctttcccttaccagaaatccatggtggatattaagagttgggccagtgttcagacccatgtaggcactaaaatacagaggtacttttccagttgacacaggcaaattcagttacctggaccatctgtgagcctggacatcagcagagggcctctgagcagtgaagaaaatgccttttgcagtgcattcattgactttcccatgtgtcccacactcaactgctaattaagtgaccttgagcaagccatacaacacctggcacatcatatgcattcaacaaatatttgtggaacaatcgatgggattgttggactccaattgatggaatatcgtgtacccattaaaaattgagtctaaaaaattttctgtaatatgacataatgggatgcaaaaataggcagaatataaaacttatatagggtataatttggatgctgtaaaaatacaaatatgcaagaggaaaaaaagaccaaaaggaaatacacagtgatactaaggttacttcaggctatgggcttgtggggatattccagggctgatggtgcatcagcagcctggtcaactccagatatttagatggaaaagttattgccctgccacagcaggtacagacaggtaaaggtgtcattgtcaggg

SEQ ID NO: 913436 - DNA, 4001 bp, Homo sapiens
gtgttgccataatattcttggcttggtgatgttgcgacttacctctagtgattggtctggcaaccaggcaagaagttgaggatcctgagaagccctccttggcccgtggggacagaactctgtggtgttggcccatatgggtagtttcagatcataacagggaaggatgagccacctctgcaggctctgagggcttagaagagtttgagagctcaaaatatttggaggcatccacccaaatgtccccatcccgtgcacaagagctccatgttttcccaaccagtgctctgatctttgtgtaatgataatcatctttgaagctaggcaagcctattaaatccatagtttggtcttctgctttttctacactgaatggagtgaatatgggccccattcctggaggccctcaggccttcacaagtggctttcaattgctccctaactgcctacagcttttcattatcctaatgtagagcctcaattcaattgagcaacaagcagccaattccattgtccttggataccttgcttctctctgacctctcaaatgcctgaatcctctctccatccggggctttcccgtccaccagaacattcttccaagtcactgacattgaacgttttaggcagggctcagtggcccgtgcctgtaatcccaacactttgggaggacaaggcaagaggatcactaaaggccaggagttcaagaccagcctgagccttgctctgttgcccaggctggagtgcagtggcatgatcatagctcactgcagcctcgagctcctgcgctcaagcaatcctcccgcctcaacctcctgagtagttgggactccaggcatgagccaccatgcctggccgcaacattcagatggatttttaaactacctgagctaagttaatttcctcatagattggatgtggatgtgagagcaaaagaagagtcaaggatgacccaagggtttgctttgagcacattcctcagtgcttccagggcatatggcctctgaatggtgcccatgggcttataaatccatctcctcccaagagataacacatttattttgtccctggaccttatgaaagttgtcagaatcaaaatagaatcactagtgttttttaaggaaaacaacaaacaaacaaaaaacctgaactggatgcagtggttcatggctgtagtcgcaactcaggaagctgaggcaggaggactatttgagctcaggaggttgaggctgcagtgagctatgatcacaccattgcactccagcctgggcgacagaaagaggcccatctctaaaaaacaaacataaaaagacttcactctcatcactcttgagattaaggatttacctaagtagtaaaatatgtcagatcagattctggcctcaggaactctgaatctgggatgtgaaaaggtttctggagaggcattctgtttctcatatcattaaccacaggaagatattatttggtatacaagaggacattgcttaaagaggtgagaaacagaaactatctctcccttatatttctccaaataccttgtaaagttgtgagttaaagaaaaaagaatgatgttcactcaaaggggagatgcaaaaataaaaaggtaaaaccttttcccttaccctaaggagataatgtgtgcattttaaaaaagttctaatattgtttctgcaagtcaatatataagcattattgaaaagtccaatcttgcctgtgttttacagctctcagctcctttcaggaagcaactaaatcagaaaacagtgttctctcttccttggagctggcacaggttttgataacatcgattgaatgccaagcgtaagtacagattggaagttagaagtattgctattgaccgttttctaatatgtccttcagctcagtaattaatcgatttgtgacaaaatgaataagaagctgaggtcttctaagagcttaccatgtggcagacgcgagctcagtgctgtacattcgcattcatgctcttcatccctgtctctcaagccactcgtcacacccacactctccgggccaggaggcttgcacaacctgcactgggaaactttctcccacctgttcttgactcctgaaacccctccacggtgccatcagcctgatccactaatagcaaaacgcctcacatcccaaactaacttccaaatagtccctccttgttctgacaaaaactgactcttccctgaggacgatgctcacatcttctctcatgcgctggctgtttttctttttctttttttgagatggagtctccctctgtagccaggctggagtgcagtggtgcggtctcagctcactgcaacctccacctcccgggttcaagtggttctcctacctcagcctcccaagtagctgggattacaggcacacaccaccacacccagctaatttttgtatttttagtggagacggggtttcaccatgttgaccaggatggtctcaatctcttgacctcgtgatctgcccgtctcagccccccaaagtgctgggattacaggcgtgagccactgcgcccagccactggctgtttttcattccaggccctcctgccacctcctgcagacctggaggtgatggagggaccctgctggtcctcttttccccttccagaaccttctccttcccttctactgcaaatctcgtaccatcatcatctatcacccctgaaactgtccctagaaactttatacaattaatcagaagagaagggagggagagaaacaaaaataagccaagcttgcacatactcagtgttagtcatggggtcagctgttctctgatccttcctcatagtgttttgctacctattgctccagaatcacacagaccctgtcacaagattagagtcccccttcactgctccacagataacaactgaacattgtgaaatgttgctttccatttgagatattcttgtaggtcatgcatactgatgaaactactgacgccagctggtctgaaggaccccacgagaagctgactcactgaagaatgcagtttctacatcctgatgatttcatccccctttccccaaccaatcaatgactatagtttttcagcccctcaccccccataatccccttgaaaacctcagcctagaactcttcggggagatggatttgagggtcttctcccatctgctcactcggcctccctgctgtcatcaaaccctctctctgctgcaaagcctgctgtcttggtgtattggtctgtttctgcacaacaggcatacaaacatgttggtcctgtaatacccctgcccaacattgttcaccacctttttcaacaacatcagttctcagcccattggcatcctccccaatacttctcctctcttttctgagcatgttcaatgcatagataataatctttccaaaactccaccatcataggtcattaaacttctctcctccttcaggcatcttgacctctaccctcctagaaacagtcactcactttgatggcaatacatggatcttgtcatgcacattcattgcagtccttagccccttttaacttctaattactctggggctcagtcgttgctgttgttttcatctctgtctctacttactccgttggagatctcatgtggttccatggctttaaatactacccacacactgataactcccaaatgaatatctccagtccagtcctctgtcctgaactccaaacctgcatatccaatagcgtactcatcattttcacttgaatatctaaaatacttctctaactcacacgtccactactaaactgattttccctacctatcccactgtacccacaaccttccccatgttagttagttgatgacaatttcgtccttgtggcctaaaacagaacacttcttggattcatccttgactcctctctttctcccctatcctacatccaattcatcaagaatatcccttgtctctttcttcaaaacacatccagattctgacaacttctcactgcctttgctgctcttattc

SEQ ID NO: 913437 - DNA, 4001 bp, Homo sapiens
ggttatattcctggaggtggaatttctgggtgaagggttatgaacatcttacatttcgcttacattgacacccagattttgccaaattgccctctggagagagtgaataaatgagtcccctcatatccaatagtgagtgctcaccacttatcacatcccatgctaagtgctttaaatgtggtaacagatttcattttcccaatagtcctgtgaggtgtccccaacttacagatgagaaaactgggcacagagaggattaattctttgtccaagttttccaggctggtaaacaacagaacagggatgaacatttaaggagtctcgtactggatacccactcctaaccactgtgtacctctatcaatagtatatgaaagcagaaacgagctgtgatgccttggcccagtgattaaaaccttatctataacatgcaggtaattgtggcacctattgcacagagttgctgtgggaaccaaatgagctcatgtaacatcttcagcagagcacccagcacatcgacacactaaaaaatgcgaggaggtgttagatcttttattatttgtgagactggacattttaaagttttattgtctgtgattcttcaatgaattgcctgtttatataatttgcacatttttcattggatttcttaaatttaacttcctttttttgtaccaggacagactagtttgtttatctaggtaagtcaaaagcagaaataagggttacaacttctcttaccttccaccacgtctctgggcaggcacactgcatctaaccaccgtgcacacccttaatcgctgcttgctggtgcctgacatcccttcacagtcactgccaacggcccgtttccatgtgtaaactgatggatgatgtggctggctgtctgtctgacatgctgactcccaaggccaaagtctttgctctcccctgcttagtgcagactttagatggaaacctgcccacagcactaactttgcccgcattcaggatacaacctattggtctggagacacaagatttaatctggagacagactgcttcccattgagtctcggcccagtgcaagttctgggaaggaacgtctttgtatatatgagggacgtatgctgcctttttaggaaacaacagttgatatcagaggggacttcgtaaaggcatgtgtctctctccatctctgtctccatctatgcatatttctaaccatctctctatgtctctgtctgtctctctctctctctctttgagtttcttcctctctgtctacttctctgactttatatttctctcctccatttggccctactttgttttagtctttgcctctctcctttcttccttctttcaaggaatgcattaaagataatttttaaaaacaaagatacctctgagtagcaaagagtctgcttcactgcatgagaattctgattcaacattaaatgtataccagtatctacatgcctacatgttctcattctatgtcagtattttgatttgacttaattaaatttaacttaactctcttgaaatcccaaaaagtaaacatgattatctcccatctcattggttcagaaagttagggagtttcagaagcttattctagtttatcagcaatggagccacagtttacacccagatgtttctagatcccaagcccgaagctccttctgccatgacccttcctattctcctttagcccagaagcatttgtaagttgcagctggaatgagacaaacaagatcattgctcactaccagatcaaagtgagaaacatcatctgtgtaaagggacagagttatgttttagggatcaagccccagtgggctaaggctcccccagtttcctgcccactgaggctcccccgggccagagacccccgcagtccccacttacccaggaggaagaggatcctcagcatgctgacccccaagttcatgctggcgctctgctcttggctcctggctcctggctgctggcagcgcaggcacaatgagccatgtgacccaaggctctggggacaggacaagacccacgtgactgatggggaaggaaaccactgtcacagccaggaggctgttcagttcctctcagcctctctgaagacagggctgaaggaagcccctgtcattctggactccaccagaagctggctgtgattagacccattgtacatgctggggtattatacccagtgttctctcctataatcttccccacagagtgtgggaacaaagctcggtaaggtgcggtttcttgcctaatgacccatgctagtaagtctcagagaggaatgtgggcaaagccggtctgccctgcagtccagcccttgcagtagcctctgccttggagcagaaataggaaatgcccctccagccaatagtccagctcggtcactgtttttgtgccatgggagcctctgagtctaggaatgcctatcactctcttctcagaataagatttttaaatccccaaactaaaatagataaggatcatagtagaaatcagtagtattaacacacagttatcaaaatattttgttaaacttgtgaagtagaaatatacatgcttatttatccacacagtaaatagcaagatctggcagcagatgaaacagctaccaccatctcgacatggtgataaatggaatcgatattgagagatacctgtaacagctggaatgtggatggaaagacctgtgattcctaccagaaataaagttactgggtggtaatgtttctgtggttcgtttgccacactactattagaagaagatgctaagtgttccttagaggttagagaacagagatgtaatttttttcccatccaagtttacaggccccatgtccaggtccttagcctggaggaactttggtagtcacacaggctcagccagcaggctgaaggccttatgctcctgtactcctttatacctgcacgttgtcacaatgcttagatgttcagccaaaaacccaaatgtgcaggaaatgtcactttttaaaatataaatcaacttaatgacaagtcttgagtcccccacccaactgagctggcagaaatcgagctcttttcattcttgggctccctcagtcaaatccctaacggtagcagccaacaccgtgagcacttgctactgagcccaatgccatcttagcatgcaacctgtccaagtccacgcagcagtaaatgtgagagctggactcgaaacccaggcctttggctggcagcctatgcccctcaggctgcatgtgccctctgtgtacaggtaccatcccctgccaaggtccagccagaggcagtccgattgccctggtgccacagatgccccctgggttcttctgcatggctgctgtggctccttctgagtttcacataaataatggacatgagaggagaaggctggtcatgagagaagcaattggcttcatctgggtgccttcaagttccatctgtccacactttattcatttgatgaaattaagatcagtttctacctgcaccaagaaacatactctcttatttctcctggaatatgtggagttttcttaattttgccccagttcatgggaacatgtgtaagaaaaatatttcactttcctctaagtgtattgaaagaaaatgccagtgcagacctgacaatctgtagacagtggctggggacggtggagctacattcaggccaggcccagggcttccagccacaccaggcagttctgtttttatatgaaatcaataagtttcaaatgtcggcaactgatttcaaaatactttcgcatgggatgagtcaacctaaacaccagcatgaacttctgctcccaaacacctctccaaacatccttgggagctcgacctgtcctacatactcccaggaggggaagcatctgcagctacttctgctttcactctgccgtagcctccgagtctggaaaatgcagtctgctccctgcttagacaggcagaggctcaaaacgccccgtaaactagaatctcacgagatgccctgg

SEQ ID NO: 913438 - DNA, 4001 bp, Homo sapiens
tgtgttgctcaggctggtctcaaactcttggcctcaagcaatcctcctgcctcagcctctcaaagcattggaattataggcatgagccactgcgctttgcctaaacaaatttctaaatcaattctgcgggcacaagactatgtggatccctgaatcagcacagacttctttttggcacaattttcagtcaccttggttacttctgtcacaggccatttggtttcaggagtgctagcaaaataaaaccacagaaaaacctctagcatgtggaaatggttacacaatgcatatcttagtatatagtaacatatctttaattgtgatccaatcagaaaattggttccctttaatcttcccctggctcttgttagaaatatttctaaatgtattaatgcactttccttccttagcagatctgaattcagaccaaaatccaattttatctttatctcagttcatctattgtcacatagtatgatgacacctttctgaactctcttatagcaatgtttcctaaatgatgccttccagacttaatttgaattaggatgctatgtccagaattaaggtctcattcacagttatgatgtaattaaggcaacaatagcattttgtaaaaataatctattaaatatatagcaccagctaccctttattgttattaggatatggaagaagtggaatttaacttaacaattctttacttagttaagaggaatatagcagtatttcacagtgttctacaaaaaacattatgacttccatgtattgcattaactggcaagtttaaaaattaacttaactgttatcttgttttccaaaatcaaaacttaggaacaaacggcgtgacaaaagattttctgatctgtgaatttatttaagtcttcgaaaggcaacaaaactaaatcacccactgctctgaggaccagttcccaagtcatcatgtcctgctcctgtagatcaagaaagatttgggcccacttctctatcttgggacttctggtacatgaaaactaatgtggaaacaggttacaaaaactatcatattatattttgaaaatttacatctaacacacaccatgcaacgtagttttgctactcaaaggtgaattacaagatttataaaaatgtattaattcttagagcaaccactggccaggaggcccagaagctctaaacaagtactgtaatgttttttattcaaacctgaagatgtatctctgtgtctatacttatagcctcaattagagagaaagtcaaccaggaggccctttctgaaagtgaagccaaaaaactctcacatcacttccccatctaagccgcagtgaccactctccaacattgaccactctccaacataacccctcaactatagctggatggagttcttgtttattctccctggcatctccaacctttaatttttacaacttccccgcaaatggatagcattccgtgtttctaaggctgattcaaactccacgtctttcaggaagttttttctaactctgtctcttgatctccaacagcatttgtagttcataatgcgaatttttgttcattacattctaccttccaagttcatcttcctgcttatcctaatgtgaagatcaggactaaggcaaggtgttcagcacacacagtaggcactgaattaataatatgccgacccgtatttcttgcaaatcaaacactgctctcgagtgattttcaattctactcattcccaaattggctaacaaaccggtcggccaggcccccgaactacaagtcccagcggcctgcgcggccccggctccggttatcccagcccagctagttctgcccatgcagcagagctccacaaaagtgcgggaatgtctgacagggaagaatcagagaaaccttcaccagcagcccgacattcacctggacggacagtgcacttttcttacgtctgggcagggaaggcagggcgcaccatctaccgcaggctaggatgatcaccaaccgccccaccgcaccctgcgccagccctacggcgcccgcgggctgcaagtagcggcgacccaggagcatgcgcgctgccgcccctggcctgccaggacccagagggagcggagcacgcgcctttgggaatcttcggtgcgccaagtctgttcgccgccggggtctatcacccccgcccctcgcctctgcccgtgagcgtgtgagttgtagcgtaccctggggtctgttctggaggaggcctgagagcggggttgcctggggcgtgggtctctcatccctctcgtcctggtgaagaagaagagtatacccagcgggtgagtaccggccgcgagctcccggctgagcgggcgtccccggggaggacgctgcggggcgccgttgtggcaagagcggtcgcccgcgcagggcgtggaggcgcgaggccgggggacgccagccggcaagttgcacgggttgcagcgccccgggacctactttctctttgccgtcgtccctgccttgctaggaaaagaggggagctttgacttcaggtgatttcctttgtggcttacaaaagagccccctaaatatgcaagcggttccttttatttccagagcttgctgttagcgtactaatgtactatgtttaaagtcttaaatagggcatgccagacacgctcacccatgtgtcgtcattcatcgcttaataaacagagtacggctctcattgtttttctttttcccattgcctcgctccgagttaaaataacgagataaactaaacgtgatgcggttgggaacttgttcagggaaaccggctggggcgaacttcggaaacttgctagtgtagagagccgcacggtggtggtttgtatgctttcactcattcaggctttccacagtgtttaactgcgttctgtgtcaggcattatgccccaacagtcgtcttgtgtaagacttccatgcatttttaagctttgcttttattttctaaatgtacatgttaatagagaataaacattattgacctctttattctgatattaattgcctaagtttcgtaggattgtctttattttttaatagtatggtgaccaaaagtaatactagtgtttaaccttagtaagcaaaatagagtcccagtgtctctgacagcttggcacagtttcatttgagaccgtaaatcccaccctgtctatagtctctgtcatacttggtaacaacccagataatttatcccttctcgcagcctcattcccacaccttctccatctgctgatcgtctcactatctgccttcttctggaaactgtaaactctttttctagactcctcatatgtaaacccctctatatctttttttaaatttatatatatatatattttatcatactttaagttccagggtacatgcgcacaacgtgcaggtttgttacatatgtatacatgtgccatgttggtgtgctgcacccattaactcgtcatttacattaggtatatctcctaatgctatccctccccctccccccattccacaacaggccctggtgtgtgatgttccccttcctgtgtccaggtgttctcattgttcaattctcatatgaaatactatgcagccataaaaaatgatgagttcatgtcatttgtagggacatggatgaagctggaaaccatcattctcagcaaagtatcgcaaggacaaaaaaccaaacaccacatgttctcacccctctatgtctttatatcttcttgttcacaaaacattcctccttgtgatattgggtacctggctgtctcctgaagacactgctttcccagcaattcaccacagcgaaagccatgcctgctggagacactgctttcccagcaattcaccacagcgaaagccgtgcctgcccgcgccccccgccccccagaggtggtatctgtattcgccatctcctcatggccattgctaggccattccatcccaccccaggacccagagctggtatctgtattcgccatctcctcatggccattgctacgccattc

SEQ ID NO: 913439 - DNA, 4001 bp, Homo sapiens
cattgtcatggcccaaacccacttgcttttgtcacctgatcttctgcccctttactctaagtagtgatttctcaaagggttacctgtgaagaccgtcagctcgccctttcgatgtcccttcaagatacgattgaggtctggaaagcggctccagcggaggccagctgcttgctccacatttgacagttctcctagcacctcctcccgaagctgccggaaagatacgatggacttgtgccaggcaggcagggcggtacgaagaatacgagaaagattgaagcctccgttcagggcctccaggggacggggttgctggtctcctggtcgcaccaagaagcatcgtttggggttcagttttcgtgcaaacaacttggcggcttcccaggaccgaaggtcatcccccaaccagaatacaatccgccggaactgttccaggtaagggagtaaggcagggggtaagcaggtcgttcctcggggtagagtaagggtaggcagccccgtggactggttcaaggccaggctgtcaagctcacgactcgtcagtaccacctcagcatctcgacgactaatcagtggtaatccaaacagattgtggtaggcgctgggtcggggaatagtggtttcctcgtagctcactccatccccctggcatttagcctctaggagcttcaggcctcgtaatcctgagcccccaggggagaaccaagggaagacaagactgcgagcaggtcgcagatatcgcacactgaaacgcttgagtgtgtcatctgtaaccttggtaaggccaaacattgtatcagccagctgaacctcctcctgatcaggcagctcccagagaggtattgctcggttccagatcctccggacctcctcgctgtcctcaaattctggtgccttgctaagcagaaacccctccctggccccatcccctcgcccctccacgctggcctggaagtcttcccagctcccttctgctaggctggtcatgcagagaaagtggcctgtggtcttgtcaatgaagaggctgaaggaagtggtaacaccagtctggcctttgagctgtgaagactctgcaaaggggctcagtgcccgcaggcaactgtgaccatcctggaaggggatcccatgcccccgcaaatactggcggatttcagttgcagttacaggcaacactggcatatccaaggcttggagagtctccttcctgtaacgtctgcgaggagggcctggggccaagtttcggggcaggcccctccgacccatccactccccacgcaggggtaacaagatacggagggggtacccacttcggaggaggacccacattcctagccaaatgtgggaagtcactacttgaaatgccttaggtgcctggttagcgtgccttcactagaccaaactctagggatatcccacgcagcactctgcagagctcactctaggtgcattctttctctccatgaatttctcctcttcagcccctctacgttgctgcttcacacatatgcccatctacacgaccctttcgcgtccacgtccttctacaatggctcccccacctctatggtccgttagttagtttctctccgccacctcacctctatgaccctctatacagttcctcactgacacagtttctttgcatcatcttctcacctctactgctcctccacagcatctcctcgtcgtcctcatttctatagtcatctgcatcctttttgtagtccctttgccctaggccccgactagagaccctcttccgcttctccttcccctcactgggacctcaacacggcgagagcacccagcacgactcccgccaatcccccggcccaaaggaatgccagtctctatcctcccccgtgtcttcactccgctctactactccgagctccgccgcgccggcccccagccccaggttaccacttttctctctcccacttcgccggcaacgtgagtctcccgcacatgctactcgccttgacctcggaagcaaaactccgggagcggtcgtcccggaaccggaagcctcgaggtttagtcccgcccccctctcctcgctgcttaggctccgcggcctccaagctgtagctatgacggcgcgcgggactccgagccgcttcttggccagcgttctccacaacggactgggtcgctatgtgcagcagctgcagcgtctgagcttcagcgtcagccgcgacggcgcctcgtctcgcggcgccaggtgagccaagggaagtgcgcaggcgcgggtcggggtgggtgtggaggtggcaacgactccccgggtaggtcgcccccagtcaggggtcatactgctcactgtcccgggtcgcttagggagttcgtggagcgggaggtgatcgacttcgcccgacggaatccaggggtcgtaatatatgtaaactcgcgtccgtgctgcgtgcccagagtagtggccgaataccgtgagtggggccgggctcgggctggagggcgggatcaggggctcgacccgctatcctccttctcgcttggtcgcaccggccagcttccacccactctcacccctcttctgccagttaacggggctgtgcgcgaggagagcatccactgcaagtcggtcgaggagatctcgacgctggtgcagaagctggccgaccagtcgggcttggacgtgatccgcatccgcaagcccttccacaccgacaaccctagcatccagggccagtggcaccccttcaccaacaagccgaccacgttccgcgggctacgcccccgagaggttcaggatcctgccccagcccaggtgcaagcacagtgaagagttgccccaccaactgcagccccaggctttggactgttactccggtaaaggtggttcttcccctttgggattccaagcccaggcaaatggaacccatcaatgggcaagttgacagaggttctgcttgggataatgaagagctgcctgtttctttccagtgcctgcttctgggggcagtgaccttgtgaaccactcatttttatgcaagtggcatccctaaaacctgagatgaggaagacttcaagggttttacagggcccttgttttttaaatccaaattgataataatgatctcaaaacacagtgagaggtctgaaggctggcttctgaagaatccctgatgtcttattggaacaaccactgagctacggagagctctgctgtgatgggctaggcactttatatctgtgtgaatacagatttataaaacaggttaataaacttatccaaggtcacatttcaggtctgtcttcaaaatgtgtgcatatgttaagcacaagcctcagttttcattattttaaaactagacgcagaacatataacaactgtcaggtggttagtatcaaaggccaagtgattaatctaggcctgacccctgaaagggagaggggagtgattctcagaccaagtcctggctgacaagctttctctggtcttagctatacatctccttccccccacgtccctctttgtgcagaaataaaatccatgtcccttgagccagctggtggggggtgctgagaaccttggggaagggcaggaaggctgatattaatgagtattttctaatcttagtttaaaaaggggggatggtggggaaatgagaggcaggaaatgaaaatctagaaacccctgtaagaattcttgaactgttgtcattttcttgtcatgccctaacaccatgatcaatgaatagtgtgaaccttactaaagaggcctgtgtgcctgccaaggagtcaggatggaagcggaggatcccaatttcctctgcaaatagttgtattggggagcagagccaatcctggaggcagatatcaccttctgtataggctcaggagcctgtcccctggtgatcaggggtgggcgcatctagatgaagcagactagtcatagctgtggggaaaaagggtgtttattaaccaacggcagggggaggagctgagcccaggctccccactctgtcacatgcctgttc

SEQ ID NO: 913440 - DNA, 4001 bp, Homo sapiens
ttcgtctctctctttttaaaaaatccatcctcgtttacccaatgctttagttgacatacctctggcccttctatggctggcccagttgttttcaggtataggaaaaagggataatccatctttatgtagacattaaaggagttagttttaattagtaactaccttactaacaaaatggctttttaaaaattatctttttattttagtgtacatagagcagacagtcccaacgggtcatgtttgctcctgacgcttttcctaaaccatttctagatctctggccattgccctttaccccaaactctccaaccaccagcatcaaccaacttataacaatttaataataaaagtaacaacgactctcatttcttctgtgttatacattgtgctaagtgccttacattacctcatttaatcactgcaatagtccagatactctctagattgcgagtggagcttctttgtccagacctcattcagctttgtgctttgccatatgcagagacagctccctacagagcagaaagccccaacttaagagaatgaacctatgacttagtttagcctccaccaacaaaccactgtattacttcaggcaggtcagcctctcttgcttcagtttactgatttgcaagacagatatgataatctgtgcttcatgagactatggtgaagatgaataaccagaagataagatgtaaaagtactttgtaaacaataaggcatcttataaattcattcattcaacagctatttactgagtgtctgttccctgctgagcactgttttcagcactgcagacacaataaagaactaaagagacagatcatgagaggcatcgggtgccactgcgaggtccttggctttgctctaataagttgggaagcctttgaaggttttgaacaaatgaatgacatgatctaacttaggtttaagaggattactctggggccgtgaatagactgtagggcaacccgtctggaagccaatataataatccagaaggtggatgaaggtggcttggtggttatagcagtggaagtgttgaaagtggcttgataatgaatatattttaacgatgaagccgacagaatttgtggataaatcacaggtgaattttggatgaaaaaaagaagagacaacagtgacatcaaggtttttggcttgagcaactggaaagatgatgggatcttcacccatccctgggaagaagactgttgcaagaacaggttaggtagatatcaggaattcatttggggggtatgttaggtttgggatgtccattacacatgcaaatgcagctcttgagtaatcagttcgatatacaagtctaaagttcaataacatttatgtcccacagtcagactggagttaccaatgcgggagtcttcagcatgcagcaatagcattggaagccaaaaggcggaggagctccccagggagtgggggaacacggaggtcagctggtcagatgactgagcacggccaggatggctgaggaggagcctggaaggaataagaacaaagagagatcattactaatgagcaacaaaaggggtgtgttgaaatcagactttggagccacaaagaaccattccaattctgggtcgtccgcttacacacggtgaacggagcacatttcttctctgagccttggttcctttcctgtaaatggagtataaccactcccatcttgcaggagctttttggtgataattaaggtgacttcgtgaaaagtaccagggtctcaaaaatctcaaaatttgtggaaagtatgcagtttctaggttggagaggctagagtttggtttcaaaagcctcgaccacacacaggggcggttacagctcttgaggtcccgggggtcacaggacgccttccgagttggggggaggagaaaacaaaaccacaggaagaaacgaacaacgctttcgggtgggcccgggaccatagagggtcgctccgccactttcctagagcgaccgcggcggcgccagagcgcggcgaggccctcacttccggcggcgcgggaggcgcccagcgagccagagtggtggctggtcccgcgcggtgagtgggattggggcacttggggcgctcggggcctgcgtcggatactcgggtccgctcgggagcgcgctggccgcaacgagggcggcgcgggcccgggcgatggcgtggcttgcgtctcccgcctccgggcagggcctggccgccgggcgggggcgggagggccacgcgggcccagggtggggccgcggcctgcgcggcgggcgggccgggtcaatgaggagcggccggcggagtgctgggaacgggaggcttggactgggggcccgggcgaggcgcggcccgcggcgggtggaactgggcgggtgagcagcagccccggccccttccgtcgctcggagcgttcgaggactagatacgtggaacaaatgcttaggcagcacagggctgctctgagcggttttcagattcagactcattgcaacttctaacatcttgatggtgttgccactttatcattaccctccccattttacgaggaaactgaggcacattccagttagctgggtgtgcaagaacagcagcttctgtcactcaggtttaacttcgtgcttgcccctgctggggagctatgcaaagcacgggtcgccgcgctggactgagcaatggaagatgtggctgccactaagagtacaggctctggagtcaaactgctagggtctgggaacccggccagtgccttctagcattgtgccctcgtttccttaacttaaaacggaaataactgcataaaggtgccaggagaattaaagagctagcacagaatcaagttacacagtgtctggcacatactagtatgattgcctcatccgtaggtggatttgacagtctgagtttctgactagatctgacttccattgtattaaatgcgtgtgcttttatgtataatgaccattatagttattaaaaaaaaaaaaaagcaacaccaacaccatgtacctaacacaatgtctcctgtgtggtagatgttctgtaaatatttgcttaagttaaggagtgggtagtcctaactgtaatcttgtgttatatgcggcttactcttacgctgaccataattacagctgatgtaattattaaatatccagataaagtcctggacctaaagtctcaattatacaataagatgaaaggaaggcaagaaaaattatgtttttgttttcatttatttgctttatatgtttgtatgcaaagaaacccagaataattgtttctattttaaattccacattctgacacaagataatgaaaaatagttccaataattttattgcttttgaagttctagattttccgacattgccacctatgtggggtttgtaggggtttttgttggtttgttttggccgttattttaaatagccacaagtcagccttataaataaataaaatcatttgaaattttgaattttgcagcatttgggtattctaaaaattccatcctagttttacatgtaaactcattttctcccccctctccttttcttgtgtcctacctaccatgcgttttctactcagtttcattccactttctggtaaaagttcttttgcagtttttctgtctccgaaaacagtactttcgttttgggttttcaacaaattgctttcttggatcattaggatctataaaaaccaataataaagcgtgtcttcatagactaagtaaacctaccactccctgtagagaagtttcaattttcaaaacactttatgctacagaattagagctaaactgtcatctagagctatggaaatcgaatgctaaatacagataaacaggaatatatcataaagtagtgtaatttgtcatttcttattcatttggataccttaggcagttactagttagtagaagtttaacatggaactaaatattaaagcatagtaatgttctgttacacaaattttgattgtcttttggagttactccattccc

SEQ ID NO: 913441 - DNA, 4001 bp, Homo sapiens
tggaggaggagaagcgcaggcatgcaagagacaagcctatgagtcataaccactcattatgctgtgggcaaatgtcagtgtgtttctcctcacaggctctctccccagagaccccttccctgatcatctgtttaagattaaccctttcgaccgggtgtggtggctcatgcctgtaatcccagcactttagggggccaaagcgggaaggatcacttgaggtcaggagtttgagaccagcctggccaacatggtgaaaccccatctctactaaaaacacaaaaattagctgggtgtggtggcaggcgcctataatcccagctactcaggaggctgaggcaggagaatcgcttgaacccaggaggcagaggttgcagtgagcccgagatcgggccactgcactttagcctgggtgacagagctagtgggactcctcctctgtctcaaaacaaacaaacaaacaaagattaaccctttcatcactctctattcccagattaattttgcttcacaggatttaccaccacctgatttttttctgtttcacttgtttatcgtctgtctcttcactaaaatgtaaacttcccaagtagagggatttagttttgtttattccgtgtacctagagcagttcctggcacatagcagacacccaataagtatttgttaaatgaatactgtggaatgagttttttacacatgaaattctcagctaatcaaacaaaatagctatgtggagactgctcaagaagcaatgctgccaggagcggtggctcacgcctgtaatcccagcactttggaaggctgatgcaggcagatcatgaggtcaagagttcgagaccagcctggccaacatggtgaaacctcatctctactaagaatacaaaaatagccaggtgtggtggtgcgtgcctgtaatcccagctactcaggaggctgaggcgggagaatcacttgaacccaggaggcggaagttgcagtgagccaagatcacaccactacactccagcctggcgacagagctagactccgtctcaaaaaaaaaaaaaaaaaaggaaaagtacttccttcaattagtcattctaaagacttcatgaattaaactccataaaagacaacagtgtctagcatatataaaatgctaaataaatgtacgtttattatgatgaatatgttgaatatttacaggtggttaactataaacacctctagttgaaaatatatataatatatattacatatattatatataatatatatgtatattatatatgtaatatatacatacacattatatataatatatacgtatatatattatataatacgtaatatataatacttatatatataattcgcctcccaggttcaagcaattctcctgcctcagcctcccaagtaactgggattacaggcatgtgccaccacgctcggctatatatttttttaattattattttttagtagagacgggggtttctccatgattgtcaggctagtttcgaactcccgacctcaggtgatccgcccgcctcggcctcccaaagagctgttttaaagcacaggttcccatggcatcgcttcttcccccaaccctcacacactgtccctaaccaaagagactgcacaccccagaatgcaacacgcgcctccgcgaagaagacctactcatagcaagtacttcacagcctacaattcccaagatgcaacgcgacctccttcccacagcaacgaaagactgcgactccccggactatcaggccgggagagtccacttccagctcacctcggagctccgggagcctttcagcacctgcttggtgagcgcgattacgtcagtaccacaggtggtcaccttctccgtgagaagccccttcacggactgaccgaaccgcgcttgagactctggcgttccagtcgccatcatttcagttagcgaacggttgcgcactgacgatggtgagtcgccggggccaaaagacaagcaaagcggaaggaaaagaggcgtctcttcctccatgggaaaaggaagggacgcatgcgcctgatggaggttgacctttgctcactaaactcatgaactattcattgatatcctgaggaaaacagggtccaggcaaacatctctggaggggatggaggacagtttcattgactctatggttcagaatcggaaagcctgcggcagggcatggcggcgcacgcctgaaatcccagccctttgggagacccaggcaggaggatcacctgagcctgagagttccagaccaccctgggcaacatagcgaaactccatctctttaaaaataaaataaaattaaaattaatacaaataattaaaaagaatcagaaggcccggattacagtcccaatgctaccatttagcagtgtgtggctgcaaattactcagcttctgtcttatattcctcatctgttaaacagaagtaataatgtttccaaggggttatgagaatatcattccattcatatatatatacacatatatatatatacacatatatatacacatatatacacatatatacatatatatacatatatatacacatatatatatacatatatatttttttttccccagagtcttgttctgttgcctaggcctttttttgattaattgagacaaggggccaggcgtggtggctcacgcctgtaatcccaacactttgaaaggccaaggtggatcacttgaggtcaggagttcaaggccaacctatccatatggtgacacacctgtagtcccagcactttgggaggccgaggcagaagggtcactcaaggccaggagttcagtatcagcagcctgggcaacatagcgataacttgtctcattttatttaattttattttattttattttttttttgagatggagtctcgctttgttgcccaggctggagtgcagtggctcgatctcagctcactgcaacatccgcctcctgagttcaagtgattctcctgcctcagcctcccaagtagctgggattacaggtgcttgccaccaggcccggctaatttttgtatttttagtagagatagggtttcaccatgttggccaggctggtctcaaattcctgacatctaatgatccaccagccttggccttccaaaatggtgggattacaggcgtgagccactgcacctggcctcattccattcaattttaacaaacatttcatgaactaaataccagacactgtactaggctggggatagagaaagaaatgaaatacagttcttgtctctgtggaactcccaggctgatgaggcagataggcctgtaaacaaatgaagaaggaaaaacaatctaatagaaaaattggcaaaaggcacaagtaggcaattcaaaaaaaaaaatcaactggctgataaatgtgaaaaatgctcaacatcactagtaatttttattgataacctctttattgtattaataccaaactgatggtaaccaccttgtaagtgaattaatatgtaaaatatttcaagtaggccaggtgccgtggctcacgcctgtaatcccagcactttgggaagttgaggcgggaggatcacctgaggtcaggagttcgagaccagcctgcccaacatggtggaaccccgtctctactaaaaatacaaaaattagccgggcgtggtggtgggcacctgtagtcccagctactctggaggctgaggcaggagaatttcttgaacccgggaggcagaggttgcagtgagccgagatcatgccactgtattccagcctaggcgacagagtgagactctgtctcaaaaaaaaaataaaatatttcaagtagctccatttcttttttagttaataaaagatgtgagaatgttattgtattgaaaattttgttcaaaattacctgtattcaatatcaacattacttcctcttccaagtgtctagattcatatgtctccgttgaatctcatttactgtttactttttgtccttaataaactttattgagtttatgtgcat

SEQ ID NO: 913442 - DNA, 4001 bp, Homo sapiens
gcctcctgatccgcccacctcagcctcccaaagtgctgggattacaggtgtgagccaccgcgcccagccacccctttaaaatgattattctgtgcccagggctcatctcctccacttcctctccagcttctgtcatccaacccactcttaaaagaaagacgctagctccagtgaggtttgctaaccaagttaaaggagagagagctcttggctgtgaagtctggggaggcgcctggagaaaggagatctggggaggtagacaataagccactgcatcttccccagctctctgcaaagagggcttcaggctagaaaaggttagtgaccagcaagagagacttctggaagctaggagtagccagtacacaggaggccatctgtcccactccacaggaaatgagtacctacctgtcgaggaatgctacctcttggtggctgggtagtggtcctcactcgggggtcgtcatcctgcacgatttccccattggccaagatccgcaccatcctcccaggcgctgtgggtccctgatgggctgcacctgcattgtgtggtcagggtgggcaggctaatggaagccaagtggcacagaagttctccccaccacaaaacctttagctgttagtgatctgggaccagactcgtgaagatctgtggaggattttccccctgacctcaaaaagcttgaaggaaaaaatttaccagaaattgagggaggcttgcagtcagtgatgttcacagaggtgacccacgctgagtagatgctgtgtctgattaacaaaaaggggagaaataaaggcaagttgtttgccaggcaaaaagatttcagacattgagtccaccaggaaaactatcaaaaagatccttggcaaaggaagttttactgccaatcactacactgccaacagcacaactgggactagagcctctgctgtggcccacgccccgtggaaggcccatcctgcaaggctcacctcactcaagcctcacaacactcccccgaggagggtactagcgcggccattgcacaggcggaggcacagggagacttaagtggcctgcccgggatcacacctacggacagcagagaaggaacacgaggccagaagctctggttctagggccctccctgggtactaaactgggagtccagggcaccagcatccccagtggggttccaattcccttccactaaaaaatgggtcgagtgtgttgctcccccagggagtcaatgtcaccacctgggccttccccaggaacacccagggagatgagggtcacttcggggttactttacaaccactgcctggtagcggcagaccatcctagccatcatgcgcctcggaagagcacacctttgctgcagagggcacgcccctcacctgtccctcacttcgcagggaacaccagtccaaccttggctaacgggcgcagggcccagccttcccaaaatatgggagggggttgctgcggtggccctcgaaaggctccactccgcggacccctggactgcggggcccctccacgcctccccttgagtctgggtaaaggccattcattctcaggagatgagcctcagtgtccacctacattccagatagcactggtgacatgtatgccgaaaaaggtcaggagccctgtggtcttgcccgtagcctggagcccgggacaggcgcgtccccctcctgaagcccgctggccctggcgcaggccgagcggatggtggtcgcgcgcagtccctttgtgctttgtcatcgcgcccccgcccggtgggccacccgcgcgcccggcccgcggcgcacctgacattccgggccgggggcgggagggacgctgccccggccgccagccccagcctctggagcccgacaccggctccaagtcccggcccgggctgcagcgagggatgcgctccctccccggcgcggcgactcacctgcaggcgcgactccgggcctcggcggcgtccactcccggcggctccaggcggtttcctcccacctgacctcacaggaagcgcgcgccggaggggcgcggcccagtggcggcgcacatcgccctctgtaggccgcctgaggaattgcacctgcccggcccagggttgggggcggcgcggggtgctgggggtcggggagatggggcgtgggaaggagtgggaggtggggatggagagaaaagaggatgggaggagaagacacgtggaaaagaaggagaagaaggaggagggagaaaagaaggaaaaggaagcggcgtccacggaggaaaaacccagggggtgggggcgccctggcctgggaggaagggcgggcgcaggctcagatgaccagtgttatgtttgctgacccagctccgtggatgccccttgagtaggacccaaccctgccctctaggagttccaagttcagtggggaagatgaggcaggaacggggcagaaccctctgtaggcttccaggagaagatgcgtttgagctggggcaggagggtaggtaaggatagagaaggtcactcttggcagaaggaaccacctgcagggagtgaatgatccacctctgcctccttcctgatgttttaaaatccacttctcccccaccaccttcataagctgctccctgtggacctgctcaccagtgggggagaatgagctgtgcagtcccacagtctgggttcaggttctggactctagcaagttacttagctgctcagtgtcacaaagcaggtgtaatcatagccttacaggacttctgtgaagattaagtatgatgtctctggcacattggcaatgttgataaacgttagctatgattatcatttaataaatgtttgtgggagtggcagatatttgttgagcatttattagaacccagattctgctagctgctgggcagaaggaacaaaactaagagagagatttagacctggcctggaggactcatagtcggccaccatagtctgattatttgatcatgaaaccttatcagcaaaaaatgtttcacgggtcgctctggtatctgtatcttatttatatgttactatttttgtttgtttctaaattacacatgtgtactgtgagaacagattggcatgatggataaaaggtggctgctggagccatcctgtgtttgaatgttggtgtgactgctttctggcactttcgtgtcaagtgcttggatgagagcctggctgcagtacatgctcaacggctgctgactgttatgatcattacctcttctactatcaagtcgattgtaaagcatgcacattttaaaagcataggatgtaaagtaaatataaaccaaaatcctagtgctttctccccacaccccagtgtgttccaggtatgccaagtgcacgcatgaaagcagtaatcacaaggcaggatgcccgattgtcagaggtggcctgtgatcccaaatcgcaatgtgcacattggaattacctggaatgtttagaaaccatcccaatacctaggttccaccccagagatcacaatgtcgttgatctgggttacaatctgtgcatggagacattttaaaaaccagtcttctaatgagcagctagggccgagaaacactgccttccatgaacagaaccccataagtaggtcacggaactcaggagccccaagagggaggtaacctctgtgggctgggaaaccaggggatacaggcagaaaatcatggatgttttcaggaagatttgagctggtataactgctgccagagagatacactccagctggagagaaccgtaagagtcgagaggaagaagcaagtccctacagaaaagtcaagaacagctttggggtgggaagtgatagtgcttgactggacttagaaatagcctattattaccaactaaaatagcctaaggaggcaacataccacttttgctatctctccaccttcttcaggtgtctctcctgctcaagaacctgcaatggtccctactgtctgctccaacaagccccaactcattggcaaggctttgacaaccctccaactc

SEQ ID NO: 913443 - DNA, 4001 bp, Homo sapiens
gggacttttagcctttagactgaaaaaatatatttctattgtttaagtcccatagtctatggtattttgttttggcaatcccaatagacaaatacaaacatggaggtatttgcaacagaaatttctctatcaactgttctctcacagaaagtaacttcctctgctgattgaaatcctacccatccttcaaactcaaactcaaatgccatctcttccaggaggctttccctgattgctcagctaaaactaatttttgtgtccttaggcttcagggtattttgcctggaagactcttagtttgggtcataggatgggagttcatcaatggtcattcctgggctctcatctcattctatatgttctctccaagtcaatgactcacatctttctatctccatttcagactttttctctgaactccagaacaacagagctgattcagcacctctgtctaggtagccgaaagcacatgaagcttaattcagatgctccttgacttatgatggggctaggtcccaatgagcccactgtaagtggaaagtgggcttaatacctggataagcccatcataaagtggaaaaatcgttaagtggaaccattgtaggttcagatgtgcctcaacttaggatagggttacctcccaataaacccatgctaaagtcaagaagtctaagttggggactatctgtatgaccaaaatagactgttcctttggaacgattccacatattcctccaaattttggtccatctttggtgtctttgattttagtggacagtacatccatccatcagcactgtttcaagtcagacactgattagatccggataacattctttttacccttacctcccacctccatcctctcaggaagtaccattgctttcactttgatccatggtctcctttatggtccaagctactctcatctcagccctggaccaccccaacagacttgtcttccttgtttccactcttgccccctctaatctgttctcctcagagcagcaacagcttcatcccctgcctaaaacttatctgcggcactgcaggatctggcctgattacctctccagcctcatcccccatcagtttaacaaatattaatacatcatttattgaatgcctccagccattgcctatattattagtccctctgcctggaaggcattcctctctttacctggttagtttctactcattctttaaaggtctacttaaatgtgggctcatttaaggctccacttaaatgagcctttccagacctctccctctcccctcccattatggctagtcacaggtcccactgtggttagctcccatggcaccacctagcctcagtcagagcttaggcacagctgtcatttagcagttaacaaggagattacttcaaggacattcatcactgtttaacagtgtgtcctcagtccctggaagggtgtccaacacacactgcgtgcttaataaaagtctgctgcatgaacgattaagagatggaataccagcaacgctacttcccagccatttgagttgtgaaagtcacttaatattcttgatcctcagtttcccaattcttaaagcagggttatgtaattttttctatggaggtaatttctgtaatttgctgggcactgggtgggcccacagctcactcttggatagaagagccttcccactcttttagcccagccctggaagccataggttgcaacatcatcctggggaagacttcctggagaggtggcgcttcgtgggggtctgaggaaggcctaggcacagggcaccacctgcacggatgctcagaggctggggccctcaggggcgcacgcggcgaggaggcccaccttgcaggccctgcaggcggaaggtgtggtgctccaccggtaggcctgccgcgctgtagggcccatagcgcaggatgaccactgcgttcttgggcatcgccaggcctccgccgccgcagaggcaagggagaaacacacgctgctaagcaacctctcttccggcccgggcgcgtgggcgtcgctacgcgccgggcggggccggggtggcgctaggggatcctcccggccccaagctgctcacgtgaccctcagcgcctggtccgcaaatacgcgcgtttgagctggtgtggcaagtgttagtgataaataacagcagcagccaggcacagtaagttcgtgtcaggcggcgtgcgaagcattttccctgcgttatctggttgaatcagtttaccatccctaggaagtattttatgttttttgtttacaaaaccgaggctctgggagggcaagttgcggtcccaagagtgacaggggtgtagtatggattggaaacccttgcatttcttctattttcttgcctctttttgattgattgggagtattcgttcatcattcttcttcccccaccttcttcccccggccccttctgtcaccagttaggctatttggtggagccaaaactgaattcgtccaattcccttttatttgctcagttctgctcattggaatttggacataaaagacatccaccacttctaggcatggctcctaaaaagtctcctccacacctgctgtctccctcttcttatcggtagccagatacgggatcccagggaggacccgaggctcccggggagacagacccaaaacgtgggaggaacctggaccactgagtagctgcgccgaatagagccccacccatctgcattagttggtgaccgaagccagaaggaaacatttattccataaccactgagattttgggggttgtttattacagaaattagcccaacctaacaatcgcaatacccttgcgattacagcatttctttactttctaaatattcaattgtagttgatatttttaccctccttttgaacagtaaaggattttaaaaaccctttcccactaattctcccaacgtatgctactgtgtattttaattctctccacgtgtacagtatgttctatgatacatatttctttgatgagaattagtttatacacgattgttaaatagaggaatgatatcagcagaattttgacattattatgggtcatacataatttcccccagcacttgagtttcgcaccatcggacaagaaccactgaattcaccaacacagctgaacccagcagactatggaggaaggcaggactgtacatgatgtcattattcatcctcttggctctatgtggttacctgtcttgtcttagaaggacttattttctggttctctataaactttgtacacgtctttaaaggcaaaaatcctctactcactgtagtgtttttattaattagaaatttaacgttgttttaactttgctaaaagttttgtatgaatagttgttttccgttactcttctgttttcaagaccgcttatgtttctttatctcttgctttctgtagttttactgtaacagtaaaggatttaaaaaaccctttcccactaattctctcaacgtatgctactgtatattttacctctcttgggatttgttgagattcttgaaactgaattaaagtccttcatcagtttttggaaaagtttgagtcattatttcttcacatattgcttttgttccattttctcattctcagggactccagctaggtatatgttagaccttctcattgtaatctgcatgtgtcttctctgtgcttttctcttttttcttcttccatacttcttttggggttgtatgtatacacgtttgtatgcatgcattcattcatttttacctgtaatccagtctacgaattttctttttggctcttaactgagaagaaaagccaggaatttgattgtttattccagttatatatttttcaattctagaattttagtttgttctcttttcaaatctgctgtgccactttcagtttcttcccaagtgttttaggtttggctttatctccttcattgtagtaaagataggtattttatagactgtgtttgagaattccattgtttggagaacccatgtgtt

SEQ ID NO: 913444 - DNA, 4001 bp, Homo sapiens
atgtcacagttcagaatcctgaggtcccagagcaattcaaatgcttctggctcctttcagtggaaagctgcagccagcctaaatcatctccctgtgctgggcccaggaagagatgaccctttagtataccatgttgtttgagtagccaagacctctgggagtaaaggcccctggccatataagcaatataggggaaggcgtcctgagctcctcttggggcctctctgctactgggtgctctgcaagctgggtccctgtgccctggatctctagaaatgtttctcaaattggggctgctgaacagagggcagcccagccaagtgagggcaggaagtgggcaagaaagcaggaagggtctcacagggccaccagggagggcagtgcagggcaggtggcccatgacaggtgggatgctggcttgcctgcctgccaccatcctctgttccttctggaagccatgccctgccatgagccatggccttggtgctgagactgtccattccacctcccattctcctcctccctctgactgtcaccttgagaagcatccaccctggggcttagggcagctgtgtctgtgacatgtggagccctcctcctcctcagaggcccaggccagcctccaagtgctgagatagccagctgcctgtgggcacccaggttgctaaggtatcttccaggttcagcctcctcctctccctcttatcctatcaccctctccttctattccatcctgcccactgggtccctgtgccaagccctccacctccctcctgcctccctccgagtccctgcatgactcatactttccctgggccctccctataaagtttggttccacaggctctttgaagagatccagcctcttcagctctgggcaggcaagaactaggcaaccaggccatgggtaccagggcctctgcccccagcccgggagcccctgtgttggggccaggatactatctgaacatgctgacagtctggactttggaaggggaaaatggtgcttccctgtgtgggcttctgtgtttgagctgaggaaactgaggccagagagatgccgtaatttatccagggacccagaaggggctcatagctgagctgaagagtgtcccacatcctccccagtactccacactggtccctgagtggcagccttgctaggatggcaggaatcagctgaccacttattcctgggccatcagacccttagaatagggaccaggtgggcagtgctgcctctgtgtctgaaagtggacccaccgtgaccagtgcccagtgcccaccaaggctcagccaggggtttcaccagggcatggggcactggctgagcataccacgccctctgtgtcctctgcaacactagagccctgagactagaggggcagaaagatgccagctgtcaaaagccagtgatatccaccagaacacactgaccgcccccaccctgtgcctctccttctttgcagaagctacctgtgccctgggttctctgggcagggaagggctggacaggcagccctcaggggacagccctgcctgccacttgggcagctgtcagagcatgcagatgtgcccgatgcctagctggggcacttggcacagttgccactgcaccctgcctaggggtcccagcagcctctgggcggtgggtggagtggggtgcacggtcacacaggctgagagggcccccaggacgcccccatcccacagttcccactccagtctgctgtcttctcccagctttttcccagcgccccgcctcccccgaccttacctagggacgcagccaggaagagagcgaagagcagggatccccagcgccagctgccggcctccagggccgtggggacgcccatgtcgccgtcggacgcgcagaggaacttctggtgccggggagcgggcgggacgcggccggcgcggggaagcctcccgcgactgagtgcgagcgagtgagcgctgcgggcggccccagcgccgtgctccaggcacccgcccccttcgcgcagcgcccccggggggccgtgtgggggaactgcctctccgagggccgcgtgggaggggcttcccggaggccggccccgtgggtggggagccagcgtgcgtcccagcgagtcagctccacttgatcggcagtttaaagcccgttctaccgtcccccagtccttttggagagaaattattattgctgcgcagcctaagaagtagatctacctctaacagcgtgatagacgttaccatggcttgcatctgccctcagccaccagcctttgagtgatctggggacagagacttgtaccctacatcctccagccagaccagggcttggtatgtggtaggcactcccagctgtggaatgagtgagtaaatgagtgaatgaatgaaatctgacattgtgaagagctaggcaagctggagccagtttaactgtagattcagagcctgaggcaccctgagtgcatgcgcgcgcgcacacacacacacacacacacacacacacacacacacagaacaggtgcaggactacacgccaagatcagcacatccctaccccgggacacacacagatatgcaggcaacacctgttggcgtgccccacagcacatcctgcaagctcccctccggcagaggcctcagctgtccgcctggctgtgcacccgccctccctccctggtgcctggatatctgcaggacactctgatgcaccctaacttctagtgcctctgctcttgcacccacacccagcactgctggcaccactggaatgtctctcccctcctaattcttctcatccctcagggctcagctcaagtcctcccacttcacgaaatgtcctgacccttcctttttcccggcaaatccttactgtccacacccccttcagctaccacctccagcctgagataaccagcagttggttcttcttccggctgttctgccctccagagcgaaactacaaacctctctctgatgtttctgagaccctagcacaaagctgggcgtggagaaggttttactgcacttttatctgaatggacaaaccaatgagtgagtgagtgattgtgtgatggaggagcagaggtgatcgtggccaggaccagggatcacaggagtggaagagcacagccattttactcagtttaccccagtctagctgaagcttccaggggtttttctggcactttagggatcttgggttaataggtgactcctaggctgagaggcagaggacactcagagtctgactgggtcaggaaccagggtatcaggactcaatgggagccaggagtcctgggggccttgtgggtggcctgatccaagtcacgggctctctggaggcccttagcccttgctctaagggcagggaaggctacaacagaggaaggctgaggcatcatgttattactaagtgaacttgtgcaggcccagtccccctggagccagtgaactccccaggatgggagccccagaggctggcaggacataacccaggtccttgggcatgctcctggccttgtgaccccaccttggaaggcagcccagggcccttcctgctggcatagcatgagctcccttccaccaggggaggtacaaagccaactgagatcaggtggacaccgggcccttctcaccctgacatcctctggcaagtgaggggggtcccttaagggcaagatcctagagcaccaccccatctcaacccttcctggactggctttgctcaggacacccttgaaaccagactccctcttccccagggcctagcagccggggagggcctggaattagagaaaggggagcaattgccctgccaaccccttccccagggggatagagcctctgagctgggcccagttccctccccccttttcacttcctttctccctaccacactgcccaccactgagcctcctggggttgcatcagggtgagacacaggcattgcccaaggaccatggtccagaaacctcaagcactgtttcctcaacaccagggcagga

SEQ ID NO: 913445 - DNA, 4001 bp, Homo sapiens
tgggattacaggcgtgagccaccgtgcccggccttttttttttttgtttgagatggagtcttgctctgtcccccagtttggagtgtagtggctcaatctcagctcactgtgcaacctttgcctcccgggttcaagcagttctcctgcctcagcctcccgagtagctgagattacaggcgcccgccactacgcctggctaattttttgtactttcaatagagatggggtttcaccatgttggccgggttggtctcaaactcctaacctcaagtgatcaacccgcctcagcctcccaaagtgctgggattacaagcatgagccaccatgccagaccaacactgtgctaaattattcatgtgttgtctgagttaatcctcccaagaatcctatgaggaaggtagtatcactagccccatttaacagtagagaaaatggaggcacagacagattgagtgacttgcacgaggcaatgcagctccaaatgcaaagagtcagggttcgaacccaggcagccatctccagagtcctcatgcgcggtactaggatttatcacctctcaggagagtccaactagggcaaaaggagagcagcccccctttcaagctttctactttatggttgctgggtttctaggcaacagctatcagaattttttttttttttttgagacggagtctcactctgttgccaggctggagtgcagtggcgtaatcctggctcactgcaacctccgcctcccgggttcaagtgatcctcctgcctcagcctcctgagtagctgagattacaggcacatgccaccacgcccggctaatttttgtatttttagtagagacggggtttcaccatgttggccaggatggtctcggtctcttgaccttgtgatccacccgctttgggctcccaaagtgctgggattacagttgtaagccacccgcccagcccagaatttttttttttttttccatacacagtcttgctctgtcgcccaggttggagtgcagtggcccatctcggctcactgcaacctctgcttcccaggttcaagctattatcctgcctcagcctcctgagtagctgggattacaggcgtgcaccaccacacccggctaatttttgtatttttagtagagacgggggtttcaccatgttggccaggctggtctcaaactcctgacctcgtggttcacccacctcggcctcccaaagtgctgggattacaggcgtgagccactgcgcccagcctcatctatcagaattttaatcctctcctagataacaattctttcctcctagaagattcccaggccagatgaggagaccacactcagccattggtttcaaagtaaaacttcactgttctcacagtaacctcagcctttctgctgcaatctggtttcattgaagtggtttccgttttcaccagaacccctctttctgaagtattctcagcccattatattaacagcactcagcctgctttccacgtatgccctatctttcccaagctgaccacagcagcacccctgcctatacccctccatactcactcccattgggtccaccttccttccaagaaggaaacatttaagccctccctttgaattagatgaagtaagaggagttgctgaggtgttttttaaaaatcaattctgggctaggtgcaatggctcacacctgtaatcctaatactgtgggaggcctagacgggaggattgcttgagcccaggagctcgaggctgcagtgagctatgattgcactactgcactccagcctgggtgacagagcaagaccctgtctctaaagaaaaaaaatcagttttattgagatataattcatatatcatacaacttacccatttattctttctcttttctagagacagggtcttgctctgtcacccaggctgatctcaaactcctaggccagagtgatcctcccacctcagcctcctgagtggctggaattacaggctcataccaccacgtctggcaccatttgaagtgtacaatgcaatggtttttagtagattcacagaattgtgagacatcacaatcaattttagaacacttcatcacctcacaaagaaatcctgtacccactcacaatcactccgtttttctccccaaccccctcagccctaggcaatcactaatttactactttctgtcctctctgtgggtttgccaattctgggcatttcatatcaatagaatcctataatatgtggttctttgtgactggcctctttcactcttaacatgatgttttcaagttttatccatggcatagcatgtgtcagtgaggttgctgagttttaataacaaattgagggaaaagatggtctaggcgaggtgcagtggctcacatctgtaaattccagcactttgggataccaaagtgggaggatcccttgagttcaggagttccagaacagcctgggcaacataaagaggccccatctcaaaaaaaaaaaaaaaaaaaaaaggatgttctaggtctctttttgaggtttcagtcacattgagattcattcaacaatctttgtcatttctttctttctttctttttttttttgagatggaatctcgctctgtcgcccaggctggagtgcagtggcgcaatctcggcttactgcaatctctgcctcccaggttcaagcaattctctgcctcagcctcccgagtagctgggattacaggtgcctgccaccatgccccactaatttttttctatttttagtagagacgaggtttcaccgtcttggccaggccgatcttaaattcctgacctcatgatccacctgcttcggcctcccaaagtgctgggattacaggcatgagccactgcgcccggccctttgtcatttttttaaagtacccatacacaggacattattttagatacaaatgaggcagtcctagtcctcaaggagctcaccactttgcaaagtgctatactaagtctgcataaaatgcatggaaaaataatgaagaagcaattgattctgcctggtgaagtcaatgacgactttacagaagaggtgatattttacctggacattcaaatacacacagaaatttgccaaactagaagaaaggcattgtaggcgtagggaagttcatggaggcatgaaaaggtgaggtgttctaaggaaatgaggaatagtccattgtggtggagaactctggggggcaatgagtaggtggagatggtggggaaggatctggtgggatccagctggtgatgaccctgctgcaggactgattctcagcagcaggcactggttctgctcagtgactaaacagatgctgtcctgagatcctctccgcgtggcccctgccatcagcctctctccacttcttcatgatccagcaaccacagggttaatgcctgtggcacagcaaaggcctctgagatcctccctcctccagctggctcaggcgaaagtgtcctactggggtatcttgatagttaaatattttgactatcacctcttgccctcaggcactatttttcaaaatccagaaagtgaattaagttctagaagccataaaaaaattggctttttaaactaaacatttttattcaattgtaaaagtagctacaaatgtaaaatactttcatagcattccacagccattgttaacatctctggcttcttgggttcctttgtaatctcaacctcttttactcggtcttaaatgttaggattcctaaagcctgatcttaaacttcctattcccaccctaagctttctcccttaggatcttgttagcacccaggcttaaatgaccaccaataaacagatggcttacaaagctgatctctagccagacctctcttctgcactccagactcttattttctgttgtctacttgacaccccttttggttgtcactcacaggggacctcaaagtcaacctgccccaaactggccgagtcttcatgccccagtgtggagacatctcccatcactttctgtctcagatgatagcac

SEQ ID NO: 913446 - DNA, 4001 bp, Homo sapiens
gtgatcacgcctctgcactccagcctaggcagcaggagtgaaaccctgtctcaaaatatacatacataaaaaacaagaaaaaaagggaaaagaaaaaaaagaacccaagatgatcaggttaaatagctaatgcacgcagggctaaataaataccttaggtgacgtgttgataggtgcagcaaaccaccatggcacacgtttacctatgtaacaaacctgaacatcctgcccatgtaactcagaacttaaaattaaattaaattaaattaaattaaattaagttaaacaaacaagaagaaagtgttgtgctcactcagtagctgtagacttaggtggtggggaggtactaacatggatcccaaggggccccaggaagcaggtggggctggtgagagaactgccttgtaggatgccacatgacttgagagcaaagatagcaccaagacgacaggggccctcattcccacctggcttagttactctcctctgaaagcctgtttctcctccaagcccaatacctggctgctcccctcttccctggcaacatcagattgggggtgttgagacgtctagaggtaccccttttccagaacctgagaccagggtagctgttttatggagctttaaatgaggcccagtgaaaaggccccaggtcgggggccttttctccactccactccagaggactgctggagagggagccccctccctccatccctgccagaccttaggctgcccacagagcccctggactcagagtgaaggcacacaaagctttattggctccgttccaggcaatgacatcagtgtggggctcttgcctgctcccatctgtcttctcttggtgggtcttcaggggcctcagggtctatctcacctgcgctgtgtcctcccagctctccctccaacaggggccatcttctgtggcagaccccactcatggagtttaaagagcccataatccccgtgaggagcctaagaaagtagggatttgggcacagcatctcaccctggcctgcatagatggccccataggagagaaaacagacgtgtgtgtgagccagccttgctgggggcaggggcgtctccatccatggttaggtggcttccaagaagtcacagatctagtgtctgcgattaggcaggctgtggctctggtggcttgggtggccatggtgactgtggtgactgtggccatagaaggtgtgtgtgtgattggcaccagctatggtgttttcccgctgggtgaggaaattcttttgcagcttcatctctacctcctcgagggccctcagctcctcctggttgatgtccttggactctaggtgacctgagtgctggtaagctatggcccgctgcagcatggagtgagccaggtgccgcccctgggtgtcaatctccttggtgcaggcagccacagcggcccacgtggcctcatcagtggatggggcttttccagactcctggtggatctcttggatcactgagggcccagatgtcttctgcctgctggtgaaggattcccggtgcagagcggagcccacttctccgtgcctcgtggtgaaggtctctatgtgaaccgtggagctgacctcttcactcccactctcagtctgggtagcattgccactagcgctggcattgttgtcgagggccagcttctcttcggaaaggcggctaaagtgggatttaatccagctttcattctttgctttatgggattctggtgacttgtccttgtctgatggacactcagaggtttcctttcttctcctctttctctgaacccacagcatgagacctccacctcctagcaagagggcagtccccagcaccaccttgcatgatggctgctggatgagctccaagaaggtctccaggaccctacaccaggcaggcagagctaagagcacgctgggtgatctctggtggtatgattcatgcttgaaagggcaggctccccaaggatgtctgacaggcaggccccctgctgcaccctccctaggtgccccccaccacctcaacaatgaaccccattgtgaggaaggcagttgcgggtggggtggggagagtggggtggggagaggccgcagcatccctcatgtctagcctggcaggcattgcctgaggcctgggtcctgtctcctaccctgacagctgtccccaggctcagtgaaagggctgcttctccaattctgagtccttctgccttctgcttggaatccattctacaacttaggcctttgtatcttccagtctttggtttctctctctccccatctggtggcccccagggggcaaagtatgctgggtcaggctggccatgacagaatgatccccttgactgggctggtatccattcctagccatctgagaccagtgcacctccatccagtgcccatgtctgctgccagcctggcatattccatcctcatttgcagcccctcgcctcactacagggcagagttcagagggaaaagaacccaggaaggagctcattctggagtaactaacatgaggtcacaatgggctgagggtggagaggcaagcagtgggctgagaaggcagagtggacaggagacttcatcgggtctagatccctggggccactccgggatggtagctgctacctcttgccttagtgaggcacctacaaacccagaatttgcccccccataaataggcatggttcgggttgtgagcaggtgggctggctggccaggctttccataggtgcagacaactaaaagcctaattaatctccaaggcctctcagggtataaacaggcctgggccactgtatttttttttcccctcaaaagcatctagcccatttaaaaaaaaataagaaatgccaaaatggggttgtaaacattgtgatgctttaaacaaaatattttctttaacagagtaatggttttaatatatacaaaatattatatctttgcaagaaagcatggtccactctatgtatggaaggaataggacacaagtgttttatggagaacctcatcttcccagtcctgctggactagttctgtggttggctaacctcatttggaaataacaattcaaagtccatctttgagggtgtttatgggtgtgagttcagggccatagagcccttctgtaatgaccccttcctctagtctctggtcataatttttatttaaaaagaatactcttggctgggcgctgtggctcacgcctgtaatcccaacactttgggaggccgaggcggacgatcacgaggtcaggagattgagaccatcctggctaacacggtgaaaccccatctctactaaaaatacacacacacacacaaaaaattagccgtgcatggtggtgggagcctgtagtcccagctactcaggaggctgaggcaggaaaatggcgtgaacctggaaggcagagcttgcagtaagccgagatcgtgccactgcactgcagcctgggagacagagcaagactccatcacaaaaaaaaaaaaaaaagaaagaaaaaacaaaaagaatactctctattcaaataatcagtacaaattagcaatgctaaaaagattttttaaaaagagctacacggggccgggcatggtggctcatgcctgtaatcccagcattttgggaggcagaggcaggcagatcacttgagctcaggaattcgagatcagcctgggcaacacggcaaaatcccatctctactaaaaatacaaaaaattagccgggtatagtggtgtgcacctttggtcccagctactcgggaggctgagatgggcagattgctttagtcccaggaggcagaggttgcagtgagccgagatcgtgccactgcagtccagcctgggtggcagactgagaccccatcttaaaaataaataaataaataagaggcccagcgcggtggctcacgcctgtaatcccagcactttgggaggccgaggccggcggaccgtgaggtcaggagttcaagaccagcttggccaacatggtgaaaccccatct

SEQ ID NO: 913447 - DNA, 4001 bp, Homo sapiens
tgtggtcccttcttctcaccctggagctgtgtctgtgtgaggggcttgcccctaagccagcccacctggcaccatgaggcccctgccttatacaacggtaagttctcccatagcagctaagctaattctggctacctactgatttgaaaaggtttttagaaagaaatttgcattttcccagaaacatcagctctacattatccaaataaacaacaaagctagaacacagggggcaaaggattatgaaagggacgggttttaaacaaggatcaaggaatagcaaataatgacatcggcaaacacttctatgattctgctatggtctgagtgtgtctcctgaaaattcatgttgaaatcctaacccccaagatgacgatattagcaggtgtggactttggaggtgactaggtcatgaaagtggagccctataaatgggattagtgcccttctaaaagcagggtgggagcgggtgtgggggacgtgggggaaaactcccttgcccgttgcaccatgtggagacacagccaggaggtactgtctgtgcagaagggaccctcatcagacctggaatctgccagtgggcttcccagcctccagaactgggagaaacaaattcctgttgcttataagccacccagcctatgttgttttgttacagcagcccgaggggactaagacgggtactgtgtcctagattagctcatttaatattcactatgatctatgaagcaggcactactcttcatcattcatgaacgattatttcccgctgagaaaactgaggcacagagcagtcagtcgcctaactcacggcccctgtgagagggtcgccaagattctggaatccgggcagtctggctccagagtccgtgctcttagtgtccagctatacacttgaagaagtgaaaactgcagctcttttcggacagtgatcccctcgaaaaacaaacaaaaaactgaagcccagcggctggagcaaggggcctggaaaggcgttgagcgagggccggggcgcgagggctccggggcgggccggcggggactgcctctcccgctggtcacctggggttgaactggaattgttcaatagaggcctcgaggccctccatgatcttccggccctcctctgtctcaggcgagtcgccccagttcgccattgcagccccggacgtgcgcctcccgcggagccgctcgctctcctgagtcggagtcgggaacccggcgtccgttgccatggcgactcccaggtaaccggcgaagcgcgggaatccgtgggcgggggccggggagggccgcgagtggaggggggtggggaacggggtggggaggggaagggggaaggagatggggaggagggggatagggagaaggttggggatgggggggaaggggagagggaaaggaagtagaggaggtgtggagggaaggaagagggggaaggagtgggggaagggggaagagatggaaaggaggatggggagggagcacgcgcgggaggaggggagtggagagggggaggaggaggcggggcgggctcccaagccaccccgctgcgctttcactgtcccgcctgcctcaaggcttccccacaagactcccacagcctggaggctgctgcgataccccagaggaaagctgcacccccgtaaataacccttcagcctcccgccgtgcccctggaccctgctcgcttcctcctctacccaggcgcggagctcagcctacctcgtggacccgcgcatttgcgggggcttgaattcccgagcttctcgcttcctacgcgcgcagcagacccgcagctcggtggccttggctttcatggcctcccagcgtgtgccaaaggtccccctcaaggaggaggaaaagcagtgaacccatctaataactatgctcatgacataatgagccctgcgatcccggaccaaggccatcataagaggagagcaggctgcctaataagctgtctccacctgccacaaacgtaggcgttcctggacaaaatatttccttgcagagattaaacagatttctatttaatgaggtcagaatgtgaggcgttaagtcttaaactataccatctagtgtggaattcaattttaccaggtttctacaataataagagttaatagtgaaactgttgtcatccttagttttaaattatgtatcactcattgtcaactaataggagacacctattctaatatcagtatgtcattgtttttctgtaaacgactggctaaatttatttttaaaatgtcattgtctggtttagaactgtctatactacatctgcatttcaatatattatctacagaaaaataagttttttctcctctctcttattattattattattattttttggagccggagtctcgctctgtcgcccaggctggggtgcagtggcgcgatctgggctcactgcaacctccgcctcccgggttcaagcaattctcctgcttcagcctcccgagcagctgggactacaggcacacagcaccaagccaggctaattttttgtatttttagtagagacggggtttcaccgcgttgtgcaggctagtctaactcctgagctcaggcaatctgcccccctcggcctcccaaagtgctagataacaggcgtgagccacagagcccggcctcttctctgtcttgtaacagtaagtgaaaataacttagctggatttagaagctcaaaacaggaaaagaaaagcactgtagcattatcactactattatgtttaaagacaaagattaaaagccccaaatgccaataaaacatcataaccaatgccaaaatcatcttctgtgaaggcttattttttgggggggagatgaagagagaagagaaaaagagttacttttactctttggaggtttttaattacaaactctaacttcagactttatttggggaatttttattatataatcaaaaggtattttaaaagaaagaaatttatatatctacaataacttttctttttcctaagtgatattttaccacaatgtatatacatgttttaaaataaagattaaaattttaagttaaaatttcaaaacctatctgtttagagctgggccaagacagtgtaaagaatgtgacaagctgttggctattttcctagtgcaattataaatgaatcgtttgaaactgaggagagagatcgcacagaagatttcatgagtcattggtcagctctgtacagcatttgttgactgatatagtctgcatagttacgccatcccacaaaaacatgcattgaacagaacatctttgtttgaaaccttgctatagcatatcaaggagtttcagatttcagtgtctaagagaccacgctatgatgatgattgtttttgaaaccgttaactacataatacttctcttcttgtcagttacctgtattttatctcacaggtgttccggcttataaaattgtttatttcagatcagattctcacctgtagtaactggcgttgatgtggtcaaaacatttgtcatattaaatccaggcctcttttatcacatgctaaattcattgatggctttagtggaaagctcatgaactctgcagtaaatattaaatatatacaggctttgaaacttactcgatttagaattttgggcaagtaagttaacatttcagagcctctattttctcacaagtaaaaactggataatgaatgtttctcaaagttggggtaatctataaagcagaaaaacacgcagcacatgcatgaggcaactgcaagagaaataccaactaggcctttgaaggactctattccttcttcctaaaccactactagggaaaacattgtttaaagatgtcagtgttttggctggattcggtggctcatgcctgtaatcccaacactttgggaggcggaggcaggcagatcacttgaggtcagaagtttaagaccagcctggctaacatggtgaaaccctgtctctactaaaaatacaaaaattacctgtgcatggtaatgcacgc

SEQ ID NO: 913448 - DNA, 4001 bp, Homo sapiens
gcccagttctggtgccaccagcaggcttgggttcttgagatttctggcagagactggaggaatagggctatttcaagacatgaggcctcccctcttcagtaagggtctccagggcttccttagggtcaggaaaagacaaagacacttacttctgtcctggcaaaaagaaatcaaggtgggaggatgcaaggccatctctggccttcctgtctactctcaacagctttctctccccaggttccaggagacctaagcccctctgctccaggacacagcattctaccagcccccttcttacccaccgcacacagttgttcccttcccagtgagcttctggtcatccaagagcagacaaacttgttcccagagacccaggggcagatgtgtgttggacttgggtcacccggggaaggctatttataaatcaccccgataagcacaatctgccctgctcagcccaggccacatggacacgctgtgtgtctggtgattctactgctaagctaaccctcccagcaccgtgacagcaaactggacatttcctgtatcagccaggcctaaaaagtgggccctggaaggtgcaggaggctcaggagccagccagccactggtcctgaagggtctggcttacaaactattctaacagcaagaactttcactgctttttttttttttttttttgtattaaattgacccatctcaagatgtgttcttgtaacacagtggtcagcaaactttttctgtaaagggccacattgtaagcgttttcagttttgcaggccatatggtttctgctgatatagtgtagaagcagctttagacaatatgcaaatgaatgaaggtggctgtgtgccaatacaactttatttacaaaaccagatgctcagaccacagaccagagttaccagccactactgcaaagggaactcaaatgctggaaaacaggacctcatttactacacacatctgtttaatctgcttcccaggttcctatacttagggagctacctgaaaggcctacacaatgatttttcttaaggctatctagctttccacacacattgaccactgccgttctcaatgttcaattcttctccaccagaaaataaaagaggtaattttagactcagtcaagcataccctgtgggagtctggtgggggccctcccagggtgtgtaagaacaggcagcctgtggcgggctttgttttggggacacacatgctcgcagagcccacaggccagaacgtctcagtcaccagtttttctctttgttacagctggtgtgaccctgcctggcccagcgctgggggagctaagaaagccagcctccctcagccctgaatgctgaaaacctgggaccatggggtcacccatttgacagcgcagtggcctgggcacatctgtgcactcagccatgtgggagcagagatccctgacagatgacacctaaggacaaagtcacacatgtacacggttccgggtacgtggtccccgaggcccatccagcacaccaagaaccttagccccaacaccaatgggctcccggcacacacataccaccctgcacagcaccctggcaccgaactacttccccagcacagcatcggcccagcgggaacatccctcccgccatgaacttgagcctccctgcccacgctaaggagccagacaagtgtctgggctgtaccttccgctctctgcgtgtccagctgctcaggcctcctcgggaatgggagagaaacccggctctgcccagcagccaagacttctttcctctttatccaggctgcccaaaggtgataggagagtggattcaggacccaagcctcctctagctcacaaacctacccacctgaggaagatcagtgaccagaagccggccagacacgggaagtccgcgaagcttacctaaatagagacccagccgggggaaaccaaatggtgttcttggtggggaagaggcaaacagtccgcactgcaacacccgcgtggtgtcaagtaacagtcagattaaacaaacagcctcagctgctatttttacttccaaatcagccacgagtaacagatcacttggggagtgagaaattgcttgccgcttagccggaccctaaccacgattccaacttcaatccagaatgattgctaaagctattccagcacctagagtcaaataaaaatatcccgaggtgggaaggaaaacatttgtttagggaaacattaaaaacaggagagtgtgtgccttggagccagagcccagagccctgctgatgtcccggggcagaaatagcccgtttcatcatcggctctggacgaccgccgcccgcattcctcgagtaaggagccgtcctctgctgtgcttttggagcagaataatctgcagctaggggaaggccaggctgggtctcagggtgagagttacagaaggatatgaaataatcggggaagaggcaaggtaagtgtccacttggtaagcttggctacagcaagcccggttgtttgcaaagtccaagcaccagtggacaagtcccgttctgccaggctcccctctccacctctgggaagggctggcctcccttcaaccctgaggtgggctcatgcctgccttcccaatggctgctttctgtctcaggctggggtcacctgctccccaaactgcccacagatcccccaactttttccactggcttttccttggcttgtgccatgccagctcccagagtgccttccttactctcccaagctggccctaggatagtctgcttgctaccaggatttaatgcaagagtgggtttttttccccctttctctccaaggttcttttttatgcttccctgactgtggcctgagaaagcggagatgactggcccccgctgggtgtcctgctctgtgcagcgctcaaagcctctgcaagtttgcagtgtgctgtgtctttgggtctatttgtagactgtcccttctgcccctgtgggctcttcaagggcagcaacctgtgtcccagccccaagctggggcctggcaccacctccagccttgaaccggctgacagccagggccacagggacccaggtctatgtacttttgtctaaaccaagtcacaaagaacagctcctccttgccctgcagactaaggtgtgagattccaaccagcaggagcattcagacccgcctcctcctgggagcctcaagacttgccttttgccctgagagcttcagaacctcgctgtggggatgattacttgctgctccgcactcagagatgctttgagggaggcccaaagtgaacccctcaattttacccacccacctccctacctccccatttgccaaaacaaacgcatgccaaaaggtcagacaaaagccatcaacttgagatgggagccaacatttaaaaagtacacaggattttgagccctggctccattatttcctggtcagttgacatgtcacatacttacccttcctgagcctcagtttacccatctctaaagtggagagaatgcctgtgctctgtgggattcagggtcaggggagctcatgtacatgaatatgctcgtctattgcaaagcttcccaaaatgttagtcatttatttgttattttttcccatgatttttgctacacctcaaccatctgtatcaacatttacttactattttcctttaaagaaaatttaaattgacttgctttttttcttgaacagaagaactttatggaaaacaacaatacttaatagatcatggatttgacatatttgttaatttccctccctcccagtacacattgaaacaaatttacagtcagttcatatgtcatctgtttgacccaaatcattttgttccagatgttagaaaatgttgcattactaaacctcattttatggaggagtttgctttggggtgtgagtaacatgagctgaaagcttcggcagggccgctggtcttcctaatttgctttcctcccctcctcagcaccttccttccccagcttacgtttcattcttc

SEQ ID NO: 913449 - DNA, 4001 bp, Homo sapiens
gtcaggagttggagaccagcctggccaatatggtgaaactccgtcattactaaaaacacaaaaattagccaggcatggtggtgcgcgcctgtagtcacagctactcagaaggctaaggcagaagaatcgctggaacccgagagacggaggttgcagtgagccaagatcatgccactgcactccagcctgggcgacagagcgagactccgtctcaaaaaaaaaaaaaaaaagttgaacaataaattgtaatacctaaaagtccaatgaaaacaccttaaaggcttctctagtcactgaaatgggtattccccctttacagtcgtaacaagagggatccctctttcccttgactgtgatctgatatcctgaaagtcttcacacagaagctattgtgcacacaaatccaacttaaggtacacccaaaataattccaatcctgctaagttacgggcagggacacaaatcatatttaccctagtttacaaagcaactaaaggatagcaaagaaaaagctctcactaagctcaaaactttttctggccgggcgcagtggctcacacctgtaatccgaacactttgggagatcgaggtgggtgaatcatctgaggtcagaagtttgagaccagcctggccaacatggcgaaaccctgtctctactaaaaatacaaaaattagccgggcgtggtagctcacgtctgtaatcccagctgcttggggggctgacggggaagaatcgctcgaacctggaaggcggaggttgcagtgagccgagatcacgccattgcactccagcctgggcaacgagagcgaaactccgtctcaaaaaaacaaaaaacaaaacaaacaaacaaacaaaaaaaaaaaggccgggcgcggtggctcacgcctttaatcacagcactttgggaggccgaggcgggcggatcacctgaggttgggagttcgagaccagcctgaccaacatggagaaatcccgtctctatcaaaaatataaaattagctgggcgtggtagcgcaaggctgaggcaggagaatcgcttgaaccccggaggcagaggttgtggtaagccgagatcgggcaactgcactccagactgggcgacaacagcgaaactccatctcaaaataaataaataaataaataaataaataaaataaaataaaaaactttctggagaggaagaactgcggagggtcggatgatccagtgacatacatttgggtatggcccaagtttctgcttccccattcgccaggggcagcacgcctcagcttctccttctccaggggaccaggtttctctctactttttccttccctataccctcctgggaacaggttcctttcctgggctctcgccgagtaacccaaagaaaacacagtagcttcactgattccgtgtgaagagtgggttaaagcctgtcagagcctggagagggacaggactggagcccttccgggacacctgaagacttcgcacaaacccgctttcctctatccctgagattctcagaggtgccttgccctacgcccgcaccccaggaccaagaacagcaggagaggaagctctcggggcagctggcggggtcaaaggtcagcacctcggaagccagaaggccccgcagggatgcgggagagggacgtgaccgggaccgtgtggtccgagggaccggccgctggaagagcgaagccgtttctctctaggctcggccgcccccaggcccagccctccccggcatacgcagcttcagcagccgtcctccctccctctcccctcgcgtcctcgtcgtccccgcggccagcgcaggccccgcccccagaaccgcctcggggccaaggcctagtatggcaggacccgcagggttggtcaggttcgaggaccgggccgggcctggccgccgccgcttaccgagcccgcggctcctcctctaccacccgcgccgttcccgggcccgctcgctctcgacgccaccgacgctgccgctgctccgggctcacgggcgcgctcccgacctccccgacccttcccgtgtccccgcgccccgccgggtcctaaagcccggcgcgcaatgggttagtccacgcccgcttcctgagaccggctcagaccacgattcccagcaagcatcgcaaagactacaactcccgaaaggcatcgcgagaaataaattcgcagtggacttgtctattgagggcctactgggtcgcaatagcagttttccgaaacatggccgactctttgacctcagcaattttacttctaggaatacatgtatcctctagaaatactggcgaagtttggaaagatatattttccaaatgtgtattacaactttgtacgtgaaagattgaaaacaaactcattctttcaacaaatacgtgtgtgcctgataagtgcaaagtagcgtgtaaagctctattaacttggccagaaatctattttcttttcttttccttttttttttttttgagacaggatcttgcccttgcccaggctggagtgccgcagtggcacaattacagctcagtgcagcctccacctcctaggctcaagcagtcctcctgcctctgcctctggtagctgggattacaggcacgtgccaccactccctgcctctgagtctttgttttctttttttttttttttttcgagatggtgtctcactctattgcccaggctggagtgcagtggtgcgatctcggctcactgcaacctctgcctcccgggttcaagagagtctcctgcctcagcctccccagtagctgggattacaggagtgtaccaccacgcccggctaatttttgtattttttagtagagacaaggtttcaccatgttgccaggctggtctcaagctcctggcctcaggtgatccacccgcctctgcctcccaaaatgctgggattacaggcgtgagccaccgcacccagcctgagtctctgtttttttatacacaaatggaaggtttaaaaagatgtgctataacagcaagaatactattaaaaagaaaaaacaagtaaaaaaaataaaataagccaggcgcggtggctcacacctgtaatcccaacactttggaaggcaaaggcgggtggatcacctgaggtcaggagttcgagaccagcctggccaacatggtgaaaccccatctctactaaaaatacaaaaaatggccgggcgtgttggcagtcctctgtaatcccagctactcgggaggctgaggcaggagaatcgcttgaacctgggaggcgaaggttgcagtgagccaagatcgcgccatcgcactccaacctgggcgacagagcgagactccgtctcaaaacaaaaaagaagtggagaagagttctgtgggcggcaagccacccaggtgccgagtcaagagaccgaagacacaagctgttccagtataataaagaaaataattaaaataagaatagctatattagaaatagaatatagatgtgattatatatgaatattagtaatcattagtttgtagcattacttttattaataacttatattttacaattataatttaggaaaaccaggccatacagagttaggagctgaagggacacggtgagaagtgaccagaaggcaagagtgtgagccctctgtcacgcccagacagggccactagaggactccttggtctagcggtaatgccagtgcctaagaaggcacccgttacttagcagaccttggactagccatagcgccagtgcctgggaaggcacctgttacttagcagacgggcctttccctgaggaagttagagaacactctgcttcaccacctcttgttggaagcctgacatcagccaggcctacccgcagccaaccggaggcttaaacctctccgagatgctgtgcttcagcggtcacgctcctggttcactttcctgttccgctctgtacctagatagcagtagcagaactagtaaaagtattaaagtctttgatctttctgagaaatgcacagaagaaataatgacgtaagct

SEQ ID NO: 913450 - DNA, 4001 bp, Homo sapiens
tcctcatcacattgtgtctatcctggtccaaattcattcaacaggcattaagtgcttcctctgcataccaggccatgttctgggacgtgtggtctaagttctgcccctcagaacccggccatcagccatcttcagcgatggaatgctctcaatgcatgtctgagaagctagagcgcctagactggtccagttggctgcacagacacagacagtgggtcaaggcagggacagtgaccaggacccgggttcccctgccaggcacagctgcagggtacgtccacacttaccgctatagcctggtgtgattggcaggtttctcatgaaggtcttggaaggctccatgatttcgctctctgttagtggagggaagagggaatgaaacggtctcatcaaaagtcactgccttaaggaattactattgagtgtgcacaagctcttgggagtggaagaatgactgccaggagttggggctgagaggcagcactaccaccttacccaaagccagagacacagctggcttcagtcacaaaccaatgacctattaccaagggcccatcaccttttatgttaacttggataacagtgtgtagatcacacctaccagggtctcctctcccctccatccgacctccagccatccaacaattgtgaactgtactcatactatggctgtgaaacatgatagaggctgggaatgcaaagcttctgagcaagcccagaagcccctgtgttaggttcatgagcctcaggtgaggagagagatgaggcccgcacacccccagacctccttcttgatccaggtgaaatcaggttgcagtggtgatttttgccagcccccaccattacccctggaacatctggcaatgtccagaggcatatttggctgtcagaagtgggggatgggatgctactgaacatcctgcaatgctcagaagcctccccccacccgccggcacacacatgcacacacacacacacacacacacacacacacacacacaaacaagggagaagaaattctggcttgaaggaatcaggaagtcccaaaaggcagacatggagtccaaggagggtaagcagaggccaccctctgcttcagggggctccactgaaacatcagtttatgtggatgctgtttctgcaataagacaccttccctctttgggtatcgctggtcattccccccaagtgggctgaggccttgccaagtcctgccctgctgagccagttcatctctttaaagaaatgcctttgaggctggaagaagaggattcagggtggaggagagggccacagtcatggcttagtcagcaatgatggggattgttaagacagttcagcccccgccaggctgacagcagtgaggactgtgccgcgtctaggccactctaacccctggcatcacgtacctgactcctgggaggaagcactgggcctggagtcagacagacctggctgtgagaccatgtcccacccatactgaccacctgcttacttttctgaaagctttccacgcttgtttaatcctctcaacagccccatgatataaatgctatattatacccattccccaatttaaaaaggcaacagacagggaacactggctatccccatgtggttgcagcagaaccgcattctcctttaatccccacagcttccctaagaatgagttcctgttggaacccccattttataaatgtgaaaaataaggcacagagaggttaggtaactggtttcagggttccagagtgaaagggggtgcgaacagatgacctctaaactctcagggacaggatatgttgcccaaaagcatcagctggggtataagcctgcctggaggaggtgggcagggaggagggtgggaagaaaggcggtgtcctgagaaagggggctaggagtgggtagaaagtagggcccctcctagccaccctcttccaatcccacctcagcgctcacctgggcggggctggcgctatccggtgcccacttggcctctgcccggccgcccaggatccctgccttccaccaggcctttgtgcgctcacccggtggagcacaaaggccccaccaccgccagcctgcccctcccccacccttcccgcggtcccacctggaaggtgggcgcttcccccagcgcccggcacagcccggaccccggtgtaaagtcgggcatctgcgcagtaaacatctggcctcggagctgtcctccgcgccttggctgccccagccaggggaaggatatgcggagggctctaagtcaaagcgggcgtttttgcgggtgtagacactgcggcgcctgggtctgcaggtctggccggggaagcgggtgggcgggaacagggggcggggccggcagtgggcgggaggaggcgaggcctgggggccctggcgcctccaatacaggagcttcctgggcctggcagcccctccctccctgtctcctgttaggaggggcagattttcaggtggccgggacaggtgaaggcagagaggagtggctgtccacctggggaaggtgagtcatccttctttctaatcactcttggagggacacccagacttcctctcattgaattgaaacccaccaagatgtccgccctatgaaccagcatgtgctggctgctccctttacagaaaatgacgctgaagctgcgctacttccaggacacgcttgtttgctgcacctcccggccttccctacctctacttttctgaaaattgaactgcaaatgaaggctggtggagccgaccaccatttatacctctcttttatcaccccatttagaacatacctcgggccatcaggaagctttcagagccaactgtggagggcgactcaggtgtaggctctggacacagccagtttcacgtgacggctgggatgcccaggggcaagagcccagccaggccttctgcatgttttaatgacttacactggggtgcagtggcattggcagtggtcactctgcttacctgccctccctctggctagaccactttcttccagagaaaaggggctctgtgcccatcgatggggccttggttcccagcaaacaaagggcctagtcttgttagaataacttaagaaaacttacagcacctggaaaaaactgaaactctctctccaccacctgagatggggtagagagggagatcagtactgacgtgtccatcatgcagtttgcaaacccaggatggggggaaaaaaaatctgggccacatgagattcagagttttgctttattaggcgtctgtgaagacaagagagtttgcagacacagtcccgtctggtggtgaactgctgcaaagttctgtgaagtttgaatttatcttgtagtgaatgagaccccagtagctgatattttagaatactggtccatatttcaagcagatgagaggtgtggcattatggccaacaacttttatattagccatccactcaagccgtttcccagcatacatatgcagcttaatcacagctatacatctctacaatgtgaaattcgatctttgactaataatgcattctgactcctgtttacattggtgcatgcgattctttgctaccctggcaattaaccagacctggactctaaaagctaaacttggtctaaataacattctaagggtaaggcaacctctataatctggactcagccatcattttgcaaaaacagttgtatggttcctcctctttcccctcctgtctgtaacttgtctgttactcagcatttattcatgcctgctgtgtacggaaagggcagttacaaaggaaagccttgatgattctgcttccaagaaacgtgaagatcagataatatgccagggacaattgagtaatgggtcaagacaacaggccttgtaggtattttctaaggttagaaaaatgtgttcaagtgtacttatccagtgctcttattctagaatattccagtgggggtagggaaggagggatggatttgggggtttcatttaaggactctgacaactggggctgcagc

SEQ ID NO: 913451 - DNA, 4001 bp, Homo sapiens
gtttatgtagcacagtcttagatccctccaccatttctaataggcttccaagaagaaaatgtattcaaagttccagactgactaccaaattaactttcggaagacagactgctgtgagtttaaggaaagagacacacttctcaaaatttcattctaataaaactcttccactaactagctatgacctcctaccaattcaccttgattgttagttctaaatttcaacatttataaaaataactaggctgatctacactgtcttttaagatctctaaagttgtaaacttctatgcctactggcacatttttatcttctctcccataacatatggtatcaatatcagagaatcaataattattgcaaaaagtgagaaaaatcaaaacactacttcagaagaacactttcccgtgtacaagtcacacacctgtcatccaggacagtacaaacattcttgcccctactggttccacagtactcctctcctaagtacacttccatatttcttgctgaacttaaaatgccaatagaagcgatttcttcacctccatcagggccacacctcaggtaaaggaagcaggggttttcatctttgttgttgtggtttctcttcaaaatcaccagatcctgactgagaagaaaattggtgaaaacatcacacagtatagttctctgaacatgactcttcttttttgagacggagtctggctctgtcgcccaggctggaatgcagtggctccatctcggctcactgcacgctccgccttccgggttcacgccattctcctgcctcagcctcccaagcagctgggactacaggcacccgccaccgcgcccggctaattttttgtatttttcgtagagacggggtttcgccgtgttagccaggatggtcttgatctcctgacgtcgtgatccgcccgcctcggcctcccaaagtgctgggattacaggtgtgagccaccgtgcccggccggggcttctttcttctaactcacttccacttgcccttgaggtccaagcaccttcccaagcatccaagaagcgctcaacacagaattcatacggaaatgaaggtgtcacacatcagggctttcccaaactctattttttcctcaatcaacattctactcaatcccctgcaattgactctcggataattacataaatcactgggcacctactgggtgcagggcacaatgaaagacaaaagtgtatctttttcgaaattaagtcgacagcgatcatctatagctggactttttacacagcctgttttggtggacaggaggtgtcttgtttgagggtagaggggcggactgactttgacagcagccctgaggggctatcacgcctgatggggacgttatatgaaattccgagtccgggtcaccttccccctctcacgcccaggagcctcggccccttcccggccggacccacccccctccgcccaccccggacgacctcgcagctcccctccccaactagagacctggtaccaactgctctcccggatcccgggctcagaccctctcgcctcccctcacagctcccctagaagcgcggcagttgccgagcatagcgaccccgtccccgtcggcccggcgcaccctggagcaggcggtgccagcagctcctcccagtcgaagtcaccggggccgagaccggcccgggtgaggaggaggctgtgggtcagggccccgcctgcaacatcccaagaagaggccagcgtggggcggcgggtgaggcccccgtcctcggtccgcgtctccattccgccgccttcagtcaggccagcccagccccggaacctctcttccagtgcttgaatttccgccggtacagcgtggaaatgggcaggcaaagcgacttccggctcactccgcttcaagtacccgccgcttcttgctttggtggggagagcaggcaccagagacacgcatgcgcatgtgccagctggcctcaggcgcggcgttcaaagtgtgcggggaggaggtcgagagcggagcatgcgcactggcagacccttgctctttcgctggagactatgcgcaggcgcggtgcactgcgcgccggcacgagggtgttttcgacgttggctgtggggaaacagcaagcggcgtggacgaccgttgctgagctggtgtggaacgtctgtgatcaggtaggtgtagtctcgtcgctctacgctgcgtgcaagaccgactcctgacctcgttctttcccaaggggacgccagggccttttctgcttccattccgtcggatctgcagcatttgtggcagctagcgcggcggacgcgctgccgattcgggttatttttacttcgaattctcctagcctccctcacacatattctcgctttagaggggggctgaagcggatgatggggttttggggttgaagggcatctgtgatgggcattgagccacgctggccttcgccgggtgctgtctcagctgacgccccctgaccccatgtgcaaccctcaggccgcaggaacccgggcatccagggctggacgctctaggtgacagaaatttgaaatgcaagaaagacccagacaccgaaggcaggggctgccccatgagatcgctcctcatggcactggaaacagcgagtggaaagggggggtctcagaactctgttgaagtagaatatgaactcagtcttgaaggaacttaaggctacggatgcagaacagtgggagcagatggaactttctagatgccccacgggatgggactgtatatagtgtgccccctcatcctcctcctgtagaggcttgtgcagattatttttctgtcttttgaaaaaagcaaactctgaaattccacttgtctataatctagagttccaaagttgtgtttaaggtggtatcctctctaggaaataacgtttttgctcacccatactctaattttctttcagagctgtctattctgggttcatgactcagtgcgcattactttaatctttttgcttatgttttcgtttgagtttatgtactaggacttgtgccctctagctaaaaatgagaataaactttgcattctgtttacctgtgtcaaagcaagaaaaatgatgaccaaatgtatttttctataagtaatcaccagaatgtacgtatggtaggtgaattcaccaagattgaaagagagaaatgtcaccaaaggtctatcatagcagaattgtaaagtcctcgtttgcaaagatttttttaatatttcagactcattctaagttgtccttgtcattatttttgtcctgtatgtcctgcttcctgtggttgtaagttaactttgatccacattaatacatgtggacaatccgaaggaaaataggctcttcagaaactaatctgcaatttcatgagcaatagcaatattataaactggattttgacttccttaaataaagctgaatgtccaggaatcagaaaacaaaagattcctatggtctatcctttcctttatttccatacagccaataaaccaccaagtcttcattttcttaaagaaaaattttcctatctctgcttcttctgtttccaagcactagctttatctgaacaattccaggagtttgtcagtagctttcattttgattccttccatttcagtctttgcactgccctcttctccttctggtgatcaatgttcctgactgaatcaacaccttcactccttagcatagcatgcagagtcctttgtactttgaaccctgcctaccttccagtttcctctacctagaatgccatttttttcaatagtaggaaaaatcctatttatcatgcgaaaccaagcttacttcatcctgctacagaattaaacaaattcctctgtgctacaattaccacttttttaggtagtataattctcctttgatgtcagactttgcctgtttatatatctgtgttccctactatctgcatgcttgctgagatagacattatgttgagtacaggtttgttgtatggaattgataggttggtgacagc

SEQ ID NO: 913452 - DNA, 4001 bp, Homo sapiens
gcccagaggccttcagtctgtttaataattacacttactctcctacctacatcattagtgtcagaggcagggaaggggcactcaaattcttacttcttggatttttaaatgccttctcttatttgtagtcttatggaagtcaaggtttattctgaattttcaccatccttttaaaaatactctctgttaatattttaaaacagatgtttctcagagagaatcacttttcagctttaaattcagctaatcatcttggtgtgatttggcgctattgactacacagtttctctgggaagtcttcctgtcttcaacttctggtctcctgtctttttcctcttggctagtgtgtcttactttcttttgggggtttcctccttgacatttctctgtcctgcctttgtgccctcttcccaaacctgagggaccaatccagccgaggagaggccagatcccctccgtgagcaccgcctcagaggccggctgcctccaagttgcctcaaacagcttttgcaaaaggaaaccaagccccctcatggttctctgtcctttcttcctcctgtgtcatcgccttggccagtggttgagcaaaaaccaaacgcctgacttcatctggggcaacatcctccccaccctcctgttgccctcatcagaaacagaggcgcccactctgcaccctccccctcacctccaacatccaactgaaagccaaggctggtttgctcctgagacaaaggctctgctccattgcgtcagttcacctccctgccctgctggtgtcagcaaggtcacaatcaagctggtgaccccaccagcctcatctcccagccggtcctgccaaaccttcttgacattgccagtttgtgaccgtgaaggccacatggtcctccaaaactcaaatgcaagggattcgtttctccccaagaaaaggtgcaaaattgaagcacacatgtagggggaccctgggagttcaaggagcccaggttagaaatccttaaacccagcctgcttcccacaggggctggcttgatgaccgtgagtgctgccttcaccttttccccactgagctaactcctaactcctcacccgtgacacggctcaagatcgcttctcttagaaggaagtcccgatccgctgctaccccacatggcccccaagctggattggtgcctgcgttcgttcccagcgctgctgtgaaaagtgactacaaagggagcagctggatacaacagggatttactccttcccagttctggaggccagaaatccaggtgtcaggaccgtgctccctctgaaggccctaggggaggacccttccttgcccttctcagtgtcccgtggtgtctggcatcctctgtgtccctcggcttgggacagcccctctctaatctctgcctccacctgcacatggccatcttccctgaatgtgcctccaaaactctctcctttataaagacaccagtcattggacataagccccaccctactccagtgtgacctcatcttaactccatgacatctgcaaaggtccttatccaaatggcccttatcccaataaggtcacattcacagggatcaggggttaggcctggaacgtatctttttcagaacactattcagccagcccacaccagcgcccccaacaggcgctaccgtgcatccttttcatgctgttgtgtaatgatctgttcctgagtgtctccccaagttggcccaggtctttagagatacctggttcatctcctttcccctggggcctcatacagtactgggcccagaagatactcagcgtggacagaatgaacagattactttatattttaataagggttatatctgtggaaaaaaattagaacataccttctccagacagtttgagcatattctactgaggtttcaaagccattttactcagtttcaaaggtcttttaatgacaaggatgtatttggcgacatgaaagaaaaaaatgtccggagtttacctctgtggctaggctcagaatgagtcaggcttccaccttccagcctcggccaaagaacctcaaagctctatatgtaatgaagtcaccggaatgtttacagggcaaccaggggaggtggcatacaagcccaccttgtgacatttcttgttagcagcaatcgtctctttgatgtttacatttgaggcttctttgatgagtaaaacaagtttgcatgagagttatttaaaagttttcttagtattaaaatacatccagataacgtcacactggtgattaatctacttgttaccaatttttttacaaatggtttatgtagaaaattgagcaatataacagtttaccatgcaagctcttataagactgattggttttcaatttagtgaaatatctttgacactaaattataatgagcattgttttataatttatacccaaccaaatttgaggtagcttatagttaataatgcagtttaaaaacagtaaaactgacttttaaaaaaagcacataatgagctggagaagtcattgactcaaacccaaaagcctgggctaaagatagcaccggcagcctggcgtggtggctcatgcctgtaatcccagcactttgggaggccaaggtgggtggatcccctaaggtcagaagttcgagaccagcctgaccaacatggagaaaccccatctctactaaaagtacaaaattagccaggcatgatggcgcatgcctgtaatccaagctacttgggaggctgagacaggacaatcgcttgaacctgggaggcagaggttgcggtgagccaagatagcaccattgtactccagcctgggcaacaagagtgaaactccatttcaaaaacaaacaaacaaacaaaaaaagagatggcactggtacagatgaatcacaactacagggtgagttccccactgctgaagcaaaaggggaaatgtgagaaactgcataacttattgcctttccaatgaaatacacaattttataaggagagccattttatctcctgggataaagcctcagtcattacataaatgcatagtggctttgtaagcagtttcacaaacacaagacaaatgtaaatttcactggataatctcaagccccttgcgtctggtcagtgtctccgtcatgtcataatggctaaaacgcattgcacgtttatcatgagccacacacctgctaaacgctggacaggtgttatctcctttaatggaagaaatgaccttgtggagagggcactatgactactcattttacagatgaggaagttgagctccatttaagtctcttaccaggtgtcacccctccagtaagactaaagctgcgagtttgcaatatgaataatcactgtacatgattaggagaaggtaaaagtagaacagcttgagttttgacgcctggtccaggttgactcttggtgccaccacattttaatgctgtctagccttggacgagccacgtaacctcctggcctctgtttgttcctctgtaagagagaggctggcataggctttgttgggctgggaattattaaatgaggcaaataaaggttttcatgggctcagcacagtgctatcatggaacgctccctcaaaaaacagtgtgttattagatacagttttacacatagtttccatctctctcagaaaattatggtttataataaagacattttaaaagcctattctactgaattttgtggtcacttgggctctagctgaatctgagacccctggagtgtgaagcacagtcttctggcccttggcagccagggtgggttgttccagctttgctttccctgtggctggagtgtgggtctctcctggtgacagagcaggggcaccagactcaaggatgatgacaacagccaaatacaataatgcacgtgaaagcaccccgctcatgggtaccgcactgatgtgatcatgccactatctcagtgcagcaaacatttatggagaagatagcacttttgagggcctgagttgggtgctgagacagcaaagatgcag

SEQ ID NO: 913453 - DNA, 4001 bp, Homo sapiens
ccgggctcaggggctcccatgggcctctcaggggacccccacccatgcgttgattcatgcacttcctgccctcccccgccccagcagctgctcccggccacctttccctcctctcattgacccctgacctgccagtgccaggggccccccagagccgcatggaaggtcctgctcagagagcacctgggcacccagcctctcctgtccctcctcttgcccctcctcctcccgcttctcccagctcccgcccttcacttcctctgtgccctcccacagtgaggcagcagggggcagaaaggcaggctcttccgggccctcccaggcctcccagcacctgaggcctcctcagcctggaccaagtgcggggtgcccaggcccctgctgtggctctggagaaaggccaggctccttcccagcagggtgggcatcctgccagcccgagcagctgaagcactgacctcaggacccccacctcctcctgcccaccccaccctcctgtctgggccaggccggcgggccatcttgcaccttctgcctgggtctagccctcatctctccttcctcccactgcctaggtcccttcggtactccactgcccacaagcccctccaagctggggcacgggccatccggctcaaggctgggcctcgccaaggcccacaatagctcacctgctagtgcttctaccccgggcctctccaagaagctgctggaacctccccacacgcctctgcaggtcaagggtacccagggcccaccctgaggcccctatgccctcgccctggccccaccacggggctcctctgcccagacgtcccaggtccagagtggaggctcagccttgggcctcagtccgctcccggcccggatgtgagggtgggtcgcagctgcacggcctcgctgcccaccaggcctgcggaagggaggacacgccctcccacagaccctgtgatggcggctgccatggaaggtgtctaggcccttttgggcatcccctgcccccgtctaggtccccaggtacttgcagaaaagaaggggtgagcacagccttctgtaagggggcgcccgagtcctggccaaggtggccgcccaccctggggctccacagtccaggcagccacctcttcagtctctccccttaatgtggggcagagtggatagagggactccctcctctgaccagccaggcaggcagggaaacccgggcacgggagcccagggctggtggccatgccctgagggaactggctgcacttgcagcccaggccacaggccccaggacaccccagacctcttggcaggaccccagggttaaaaggcagtttgtggcgccacttctcccctgatgatggacaccttgaaggggctctgggcaccagcggaacaaacgtcatagggaaactcagcagctgacctaccaccaggacccacctgtcctctgccctcccagaatcctggtcatgcgtccagcaagctcccagggaggacacgccaggcactgggcccatggacacgctgtagagaaacgccgcaatcgttaggggcatgtgactaagacgcctccttcccataggcacccacggggtgcggctctttccaaaacgccacattaaaacagctgcaggaggaccgaaggggcctcgtgcccatcccctgctgctactccccagcccgccctcagcctcctgccgctggagctctgcccacctgcacaccccactcttcttcatccccagccccataagcgagactaccttgaggccagtaggtgcttcctgagagtttaggaataacaggggaactacagcaaatagcaacaattttaaaagcaaacaaggcatcagcccttgccatcctcaagccgtgaccacccctgcccaggacggagctccagcggctgcacacttcccccagggctcgccctgcagctacctctcagctcctgggaggaaactccacatttcagctgctttatacccagagaagcctcctgcctcccttcccagtcctggcagatcctgggcctctcctgcctgcctggcctcttggaaataactggctgagcctctctgtgtgtctggcacagcatggggcccagaggccagagccaccggaggtaccctgcagagagggtagggttgcaaaatcctcccccccacccccacaactgcagaacacaccctgggcccagctgggctctagaggtgcccaggagagggaactgaattatttcaggaattggagatgcccctgtggctgaggaggagctggggctggggccggggccagggccggggctctgacctgccactctgccccacattaagggcagagaccgaagaggtggctgcctggaccttggagccccagggtgggcggccaccttggccaggactcgggcgcccccttacagaaggctgtgctcaccccttcttttctgcaagtacctggggacctagacgggggcagggggcctgggggtctgggcctgggggccagaccctccatcatttcctaggctggtgctcagaaatggaggaatctcaggacaggtccctgtggtctacggggtggcaggcctgaggctggccctctctgcagaggacaccttgggggctgctgatcagccttgaggccagagatggctctcacctgcttccccgtcacaggaccagcactgtcagcctcacctggaggctttctgcagggctggttctcttgtcccatcagtgtctgtgtggggtcaccctgttcccctaggagggtgggtctgcaggggggaagccagagtggcccttggagacctcaggaccccagagggaatgagcagggagccttgagggtctggaggaggaattcagagaggcaggaagccggggagccctgaggagaggcgagagggagtgagcgagcgggggagggagtgaggggggagggagccctgaggaaggggaggggagtgagcggggagggagtgaggagggagggagccctgaggagaggggaggagagtgagtgggagtgagggggggagccctgaggagaggggaggaggagtgggggggtggggagccctgaggaaggggaggggagtgagcagggagggagtgaggcggggagccctgaggaaggggagagggagtgagtggggagggagtgaggggagggagccctgaggaaggggagtggggggaggggaagggtgaggcaggaagccagggagccctgaggagaggggagaggagtgagggggaggggaaggtgtgaggggagtgggggttgagaggagagggaaggaagggaagggggaggggagggcgatgggggagcccccacagacaccccagctgctggctgggcgctgggcaccccccaaccgttgggccttgctcccactaggggcagtcgtgtcccagccccacagtcaggtctgagtcagggacccgtggcgcccgccctccctcagctgagctcaccaacagctgagaaatattcatttaaaaaagcccccattaaagagctaactcattgctgacactgcaactttttattttattttattttatttatttatttattttggagacggagtctcgctctgtcgcccaggctggagtgcagtggcgtgatctcggctcactgcaagctccgcctcccgggttcacgccattctcctgcctcagcctcccgagtagctgggactacaggcgcccgccaccacgcctggctaattttttgtatttttagtagagatggggtttcaccgtgttagccaggatggtctcagtctcttgacctcgtgatccacctgccttggcctcccaaggtgctgggattacaggcgtgagccaccgcacctggccttattttattttatttgagacagagtctcactctgttgcccaggctggagtgcagtggcacgatctcagctcactgcaacctccgtctcctgggctcaaggaattctcctacctcagcctcccaagtagctgggacta

SEQ ID NO: 913454 - DNA, 4001 bp, Homo sapiens
ggtaagactcccattaaacagataaacagatggagaaacaccaccccaaaacataacaatgatctcgcagtgtatacttgacttcgctcatttatttattgtttttttttttgtttgtttttgtttttgagacagggtttcagtcacccaggctggagtgcagtggtgcgttcgcggctccttgcagccccgccctctcgggctcaggtgatcctcccatctccgcctcccgagtaggtgggactacagtagtgtatcagcacacccggctatttttttttttttttttttttgtagagacagggtttcgccatgttgcctaggctggtctccaacctggtctcctgggctcaagcgatccgcccgcctcggcctcccacagtgctgggattccaggcgtgagctaccgcgcccggcctatttacttttcttactaagctggggatcaccgtcgccctcggcttggcaggaaggcgggggtaggggagcggtgggaaaggggggtgggcgacgactctgatagagggaaaagaggaagggaaagttggggcttactgcagggcaagctccttaggagaaggtggggaggaggaaggagggaggtccaggcccttcttccatcccacgtcctccacttcccaaggtgcaagaagaaaagaggtacagaacacccagaggtgccctcgattccgtcttgcacttgcccttctcccaccgtccagcaataaagcgagagaaacaagtgcaggaaactggccggcagtcatgggagaagccaaaaagacaggtgagcagcgcgtccgcctcccgcgcacaggtgagggctcacttctgcctgtcggcggcggcacacacaggaaagagccaagcgcgtgcacgcgggcccgcccctaggccttgcggcggcttcagctcaggcccttgctcttcctggggcggccgcgctccgcggcttcccgggctgggctgctgtcgccgctgtcgggccggcgccgcacgcgccactccacgcggtggtcgggctcgagcacgcgcggcgtcgcctgcagcaggaactggccgcggcgctgggtgacgcgcacgtcggcgcgggggtaggtgccgtacgcgcgccgcagctcccggcgcacgaagtccggtagctgcagaggggggccccgcgcgcgctccacgcggccccagcgcagctcggtttgcaggctcccgccctccggccacggcgcccagctctcggccaccgccgcgggcgcctgcagcgacagtcccgagatgccggcggcggcgcagggccggcgcagggtcgtggcgtaggccggagggcaggcccaccagggcggcgcggcctcgggtggcgcggcggggccgtagaagcggtggtattcccgtggggccgcccactcgcccgcatgcaggctcccgggccggctgcggaagctgtgggcctggactgggggtagcagcagaggggcggccaggtaggtgcaggtgagcagctgcggcggcggcggccagacgccctgtttgggcggcggccagctgtacacatacatggtcggccccccaggcggctgctgttcttactgggggctcctgcggatccagacctgcggcggaggaagggatatgtagacagactttctacttaaccgcctcctgtccctgtgggccggttccccgggacgccggttcatggctttgggggaattcatcccaaatcgaacattcagctccccgcctagcctcttgtcccaaggtcgggcagagcctcaggctcccagcagacaataaggagccttttcaagccctccgccgggatgctcttcccagtgactccccactcacttgtctccttcagccttggggagccggcgggatccagagcggggctcctctccgcactttgtagctgcgttgctccgctccatgccctgcctcagccactcctcctggttaccaggcaaaaggaaacaccttgagctggccaggagctaccagcgtctgtctacacctgggtgagccgtactggtcgtagtggccccaccctacaaggatgcccttcctacagtattactgatggctgtctaatccggttagctcccagtcactacaccccagcctcccagcgcctgcaggtggattgggttatcctcacatttgagtgaaactcctgcacaccagacactgaatcgagttgtctgggagcatctaactgcaagttatgtcgatccgaggaaggggggtactgatattacccctgctttccatagcaaaaagctgcttgcctcacagttggtgtccagtgtattcagtgactggagcttatgtaggttaaataactcatcccaactcacacagctggctatagtaagggcaaaattcaacccccagtctgtctcaagactcaggctcacaatgttggtcttattgcccacctgtgcaggagcttctcgcagactgtctcgaagtcctcccactctagaatgttacataagcgctttaatttttttttttttttttttgagatggggtcttgctctgttgtctaggctggagtgcagcggcatgatctcggcacactgcagccaccgtcttccaggttcaagcgattctcccacctcagcctcccgaggagctgggattacaggtgcaccaccacctcctgctaatttttgtagttttagtagagacggggttttcactatgttggccaggctggtcccgaactcctgacctcaggtgatccaccctccttggcttcccaaagtgctgattttacaggcgtgagccatcgcgcccggctgctttaaattcttttcttccttttttttttttttttttttgagacagaatcttgctctgtcgcccaggctggagtgcggtggcacgatcttggcttactgcaacctctgcctcccagcttcaagcgattcttctgcctcagcctcccaagtaggtgggactacaggcgtgccccaccacacctggctaatttttgtattttttagtagaaatggcgtttcaccatattggccagactggtcttgaactcccaaccccgtgatccgcccaccttggcctcccaaagttttgggattacaaggatgagctactgcgcccggcctactttaaattcttaatagctatgtgaagtgcatagtgatgtcatgctcttttagtagataaggaaccagaggctcagagaagttaggccactgtcccaggttcacacagcctgtaagtaccacagtggaatttgaacccagtccaactgatgtcaaaggccagaagccatttgagtgaaggcaggaagattgcttcatccagatggggtgagccctgtctgagttccagtcccttctggtgtgggtcacaacccctgcacctcttccttctccagtggggagagtggtagttatggatgattaaaactgaaaccgtctcccagctgcagggctgccatgttgccacactttccttccccatctcctgttgactgaagcagtatcaccagcagccctgacagaaaggttcttctgggttctcagtatccctcaaaactcagctaccctctggtggtggccaccatttggtgactcaccctggtgatgtcatgctattcgtgactgagccactgctccaagtcttaattcgggccagtccttttgaaggcaggtgctggggctgggctgtggatggaaaaaaggggcctggttagggtttcatttggactctaacactgtcatagaaacccagattcaggctggtgaacctgatgcacagctaaggccaaacagtgggagatagagaaaggtttatttgatttggccaaagtgagaaggcgggagagcaaatctctcaaatccctattaacagaaaaaaagcagcagggtggcttacacctgtaatcctagcacttttggaggctgaggcaggtggactgcttgagctcaggagttcgagatcagcctgggcaacatggtgaaacaccggctctacaaaaa

SEQ ID NO: 913455 - DNA, 4001 bp, Homo sapiens
tgtggtggctcatgcctgtgatcctagcactctgggaggccaaggtgggaggatggcttgagtccagaagttcaagaccagcctgggcaacttagagagacctcgtctctgcaaaaaattttaaaaattagcagggcattgtggtgcgcacctgttttcccagctactggaaaacctgaggtgcgagtattgcttgagccctggaagtcaagcctgcactgagccgtggtcatgccactgcactccgacctgggcaagagagcaagatcttgcttcaaaaaaggaaaagcacacaattgtgaactatctaaatgtctaagcatgtaaattcatcatagtacgttcacttgtagcaagttatacctgaaaatattagttgattaatgctacttcaagagtttgctacagatagtcctaaatggataggaaactttatgggggaaggtatctatcctcatttaattgtcactagggtatcactggcaacctccaacatgtccaaaaatagaggtctgataaattgcatgtcacgggctgtgtttatgaggaattctaatcactgttttccttattatatatgtggcacattttcatcgcagaaactttgtaaaacaaacacttgttataatcccactactcagagatggctgctgctgacactgggttgtaaatgcttccagaatatcttcaatcataagcattttgggtgattataacaatatatatagtgataaataaaaaagatataaccttgaacatataggtacatcaattaatttttaaaaattctacatgcaaggaaataaacaaaatgttgaacatggctactcttgaatcatggaattgagtgtttttcttctctttatatatttctatagctccagctccccccacccaaaagtttgagtaaccataaccactaaaacaaaaaataaatgtaggcagtttctagagggttagacaagagaaaaatggattgaaacactcagctatctgaatcaagaaaggcagccaggcatggtggctcacgcctgtaatcccagcactttgggaggccgaggtgggaggattacgaggttaggagttcaagaccagcctggccaagatggtgaaacctgtctgtactaaaaatacaaaaattagctgggcttggtggtgggcacctgtaatctcagctacttgggaggctgaggcagagaattgcttgaacccaggaggcggagattgcagtgagctgagatagcgccactgcactccagcctgggtgacagagcaagactccatctcaaaaaaaaaaaaaaaaagaaaaaagaaaaaagggcaagagagctaaatattcatatctatagaggtaaaaagatggtgtccccttctaaacatgcataaacataccccacctccctaccacacacaccttcatttcagctgctcatggatattttctgggcatgaggttttgggatgttcagacttagatggtctactaattaatgtattcatttgcccaacactaatttactctgttccaagcatgacacaagtacaagagaatggctccagaaattctagataggtaggacttaagcacagtaatctagctgagaggttgtatgtgtgtttgcatggcgaacacaccactttacttaggctgggtatgtatttgggggtgcaggggctgtgaatggaacccccaagccacctgcaggcagtcctgagccccaaacctataggttcaggagaaagagcccatctttccggggctcaggactgcctgccaaggcctgcccgccaaggcctgccctccaacaaatcctgatcagagtcttcccagatgctgaaatcctgctcagggatctgcaccctgggggctgccctaccttctgtggagaagatggagaagcagagaagcaggatacagagcaggctggaaaggactagaagcctcatggtgagaaggcagattttcacgtcctgggaagggagctgtgctgcagaagtcctcccttggggccaccttggacatttatagagtcatagagaggtgtttcccaatgggcagagccctagtagccttgcaattctcctaaagggtaaagtcagcccctcccaagaggaaaaccagcctttcaagatgcatttagtaacctgtaacacagaaagctgtaaatgcccagcccagagaggtttcagaactggcttcagtggtgagagcaggaaccaactgcccaggaagagccactgtctagagttgaacgttaacttttagtgtcagtaataatcctatcaaatgcagctcttcctgctcattcctcagctgtgtctggaaaaaggatcataaaacccttgcaggttctgatccaaggatgagtcttgagtaaccaatgagatgtagagagcacaggtcctggagtcagatgacctgggtttgagtcctggttctgccacttagcagtgtgacatcaaacttgtccttgaatgtctttgagtcggcttcccatctgtgaaatgggcacaggactatctctctcacaagcctgtattgaggcatgtatgagaagccatctgcaccaaggtgctcacacagctcttaaaggaggtggggccacaggtggactttgatgtttaagacagtgatgaaatgagaagacacttcaagtacagggtcaccctgaacaaggcctggaagagaggagcctctgcccagggcaggcatgggggaaagtctgaccacaggtgcaggaggctcagatgccacccattcactggacacgtgacctgggctgagccatgcgcttggctccagggacacagaagacactgtgcctcgcctcaaggagctcctgttggtggaggaagctgtgcagacaagtgactgtctcacagcattgtaagtgctgtctatactgaaggaaggggacgtaggttgctcagtcagaaggtgggggagggaggggacactctgcagagatggaataagattgggtcggagatggcctggcatggtaggccaggtcatggtgggcttcctggaccagcagaggaatcagactggcaaaagggaggccgggggatccttcagccgggtagagactgatgacaggaatgctttgggctccttttccatcagagtgggtctgagttccctttaataatggtgcatgggtgcctgaacacttgctaggctctggcctcagatggtgtcagagggttcagagcccctgggcctatgagaggtggtgggtaggaggaatatttttcggaagaaattaggatgtttcccatgcaccctgatgagcctctgcctgggctgctctcaaacctccactcccaaactgagggaagagagataccctctcatattgttttatattgttttatactcagtacctcttttaagaaaaaacaaggaagtaaaaccaaagacaggcagcccggcgccaggcctgaaaccaggcctgggcctgcctggactaaacccagtagttaaaaatcaactcataacttaaaaaccaatgttattcatagattccagacattgtatagaagaacattgtgaaactccctgccctgttctgtttctctctgaccaccggtgcatgcagcccctgtcacgtaccgcctgcttgctcaaatcaatcacgaccctttcatgtgaaatctttagtgttgtgagcccttaaaaggaacagaaattgtgtattcagggagctcagatttgaaggcagtagcttgccgatgctcccagctgaataaagccctgccttctacaactcagtgtctgagaggttttgtctgcggctcaccctgctacatttcttggttccctgactgggaaacgaggtgactgacggatggccgaggcagccccttaggcggcttaggcctgccctgtggagcatccgtgaggggaactccggccagcctgagtgacgtgatccaaagagcgctcccgggtaggcaattgccccaatggaacgccttgccagagcagcgtgtagcag

SEQ ID NO: 913456 - DNA, 4001 bp, Homo sapiens
ttgtttctccctccggcctttgtctaccacccccgagtcggtcaccctgccacgcccattccggactcccccaggcctctccactccccagaaagcccgtaagctaccctctgttgcggaggatcccacggccaggggtcgcttcccgcgccgggactccccagcgcacgagctgtccccgggacccagctcccggcttcccgcccctcgagggtcgcgctcgcaggggcgcgcaccgatcgagggtcccagactccggaactgccctctccaggccgcggggcgccctcctgcgcgcacgacccccgcctctccagggtgggacggcgtccccccttgccgtcgctccagggagcccggccgccgcgcccttcctccgcgggctcccacccccatttccggggtctcctccctctcgcccgcaccttcccgcgctccctccccgccctccccgccgcccgcccgcgctcacctggttgtttttgcagagatcagcccacatgctggtgccgtcccctccgcgcatcaggacgtggtaggtgaagaagtagatgcccgggatggagcaggtgaacttgccggtggtggggtcgtagtggtttccgaggttggtgaccacgtcgtcgaacttgagcacctcgtagccttcatgctgccgcttgaggccggcgtagaaggcgatcttgggcaccgtgctgtaggtggcggcgctgatggccccggccgcgttcaggccgggcgccccgggcgggcccggcaggccttggcggcccggctcgcccttctcgcccgggggccccatggggccgggtggcccgggctctccggggggcccgcgcggacccgccttcccgggcctgccggcctcgcctttggggccctggatgaaggtgggcagggactgcatgaggccgcggtcgggcgtggcagcggtgctgggcgccttggtgcccccgtaggggtcgcagaccatgcggcaggtgcccagcatctcgtagtgcgccgacgtgccggccgagctcaccagcaccgggatgaggatcaccagcagcagcaccatcaccacccccagcgccccggcggcgatcaggcgcctcctgctgcccaccagccggctcagcgcggggcgatcctcttgtctgcttttggacagaattttgaaggttgggcggggacctcttcagagccgaaaacaaccccctgcgaaccccaactcccctgggcgtgcgtgcgccggccgctgctgccgactcctgctccccccgcggaggctgcggctggggagggagcgcgggcgcccagtgacttgagccgaagtcccgagcccggggtgggggccgggggaggggtgcgcggggcgccctcgccccccgcgagctccttcgcacctgtggctgcagccggcgccggcgcggccaccgggagggcagagccagccgccgcctcctgagctcgcccgggcagctcacacttttatgccgccgccgcctgcgatcgacttttccgtttttgcagactgcgcctgttcgcaccaactttccgtctgaagttgcctttttctgcctcctcctcctcttctttcgctcgctcagttcgcccgtccgctgccttttttttttattgcctcctttctctcttcctcctttgccaccaccacaactcgaatagacgcgcaccccaaagccccgcgtgggcccgggcgtcccccgggtgcgcccagcggcggcggcggcgggcacggtcggcacggcgaggctcagagctggggcggaggagcgagcgagcagcggcgagcgcctcacggccgggagcggagcgagagagagactgaaggcagaattctgcctgggtaccacctgccaggagaagaggaggctgacaaacgcgcgccggagcaatttataggcacccaaggcacagaggaaggggagccgctttggcatctcattgcagcatctgctctgctcatcccactcagagagagtttggcattactctgacaatgtgggatttttttttttttttcggcctctctttttttctctctctgcacatggatgaacagtgagattctgaatactcccttgctgaaccaagcgatggcaggtcctgctggacccacctggggaagggagacagctgtgcgacagctttcagagctcaagggtcacacctaaatccccgatttccccactgccagcagccccagttggagggtggaggtgaaggttgaaaggagggtggctgagttgacagtttctttgctagctcctctacaatcagtgcttcaggtgttttcaaaatgccactgttaacagaaggagggccttttagaattttccagatggtagatgtgattttcttttaacctgatggttttcctcctctgccttgtaaatgaataagatgttgccccaagaacagtgaggtatgttgaaaagccaaagaacatttgtgaatgattttaaatgaacatgtccaccgcctctgggggaggagggggttggtcctttttacaaatgctgcaccgtggtgagtgcatacatacgtactgtgcttacagtcttacagttctagcagtctttcgggggataccgccaatggccctgaagttgcgtttacttaaagtcgctaaatgtacaagaaataaccacttgtcaaaatggcgtcaaaagatcaagcaagaagcttttgcacaagtgctgggcaaggtcttttcctagcatatggaaagagttctataagctccatagcagatttcccgaatatacattgagggaggggagaagtaggagaaatacaagaaagaagagcccccattctcagtgggtgagctgcagaaggaacagcatggtttatcatattactggaaggcctccagggtagatatcaggcaagttaccccaccaacaaatacataagacacacaagaatggctttaaataaataagtagaattgaatcctaaatcatacttttgcattcaggagcaacagatgtcaatcaaacgtgggtgacatttgcttgtcaatacgaggatgatggctgggaagacggtgacttattacatcagggtgagaatctgaaatgagaaaagcaggaacaaataagactacagcaagcaaacagtaacatcctgggtgacgatcagcagcctgtgatcttgtctgcgggtgtcacagcatggacttctcctttcctccctgtgcctcaatctccccgccccccagcctactccagtccaccccaccaatttagttctttctttctttctttcttctctgtttcaaaacaaaataaggtcaaacgagcagacagaaggaaacaaagactgaatgattcttttaagagaaatgtcagtagctccttcaggccttggctgggagaatcaaccctaaaagctgtgctgtgtggctcagcggggtgggggtctccacctcctggctactgagagagccacactgctcctggtattggaaaatagggcttcccacttctcaagcccttaacttttattttagggtagtggttttataaatgcgcgcctattgcttgggcataattatacacatagttccataatatttttgttcacatgagctgccttattttcatatttttaaggagcaaacacataataagttgtctcctggccataatacttactttcctaacacaccttctggattgcttcttaaaagtcaccttccttttggaggacaaaatggtgaggtttgctgccagcactgggggggtaggatattaataaaactctgatgcaccagattatcaaatttcataaggcctctctattgctatgaagagttctgtaggtgacacaaaaggagtttttaaaaggtagagatgtatagagaagttctcatcaaaacctcaagctatgtggagttttcccattgactaacgcttaagatatattggagtcaaatgctcataaaatgctcatcaatgcttataaaatattaagagttgaaatggactctc

SEQ ID NO: 913457 - DNA, 4001 bp, Homo sapiens
tttaacttaaggttttctttaggcggctaatcttatactctaaaaagtttgtaacacttattcccaaatcttatttaaaaagcaattaattttttgactggataaaaaccatctatccctgcagatgtcgtctttagaaatcttggctggctacctgactcctccattgatttctgatatgtcaactgttgcattcaaaagacaaatggcaccaaatatgtaacaactgcaaaaacctttaaataaaaggggtttttcatgcttttacttatttaataaaattgaatactctctttaaggtttgacagtatagttatctctccctgccctcccaccccaccccgtcaccatttccaactttattattgagatcatatcagattttgaccttgtttgtcctgtaagtctcacatatatctcttttctgtggccaattttccaaggtcacgggtttctttaccttcaatactttaagtattgattagcttgctttgtcaattttctatttgttttgcagtcaggaatgtcaaaccagtgttaagcaattcagcactgcagtttgcccagcctgcataaacctcctgttcccttttacaacccttcctgaaaatagagtagctgctcgcaaaaggagtatgaaaatcaagccagcgcttgctcggagctggtcggctagtgtaaggcacagcatattgcaattagcatccaatcatgttaagtagtgatacacttcaatatttgtgtgagcctgccttgtagaatttaatactcagacagccattttgcaaaacacagcagggccatgaaataagggctatttcagtgaaagagtcacaggatgataaagctgttgcaacagctgtgtcatccatccagtgattattatctactatttttctgaagctgctcaaaataggatttagtgttagcctctgcgcctatctataatttgtcaaactccgtggtatttcttccccccaccatcccatcattcaaatatgaaaacaggactactctaggtaaaagagagtatcaactggtttgaatgaggcagatctctgagacaatggacttctcaaaccaatccccgcgcaagttatttccaaccttatcaaagtcacaaggcacaaaagacagataaaaacatctctgggaaaaaataaatatctcagaatctcctatacctcagattccttgaaaactcatggtacgaaatgatcgactgtctggttggttcagcacagggaataaaaacagctgaaagaggcaacatgcaccagacagacacgaatagtattttcagctcccagctgcaattctacagcaatagaaacttacataggacacccgtactcgccggcgatgcaccagcccgcagcactgcatgaagagggggcagaacgcagtcagcgtgtggcttcaccaagctgcactgtgccttgtcttctcgtcacagcctcggtccatttcttcccaccttctactcccaggtaagaggcatgagcaaatcacttagcttctgcctcctaggtagtttctaaaaaagccaccgttcctgcaggcatgccaaaactttgttctcccctgtttgtctttttttgggggtggggggcgtaatttgagatcttcttcaagggggtttcctatttgcaaaaatctacaagaagtagcattaattttccggaagtaagtattgctaacacagagttaggactgtccagatcgtcagagtttcttggtgacgcttttacagtagccattctcaactcgggagattttcaaacatctgagtgtcttgcatttcgcgaccctgcagtactctgcttttgaaaagcaggaggcctactcctgctgctgtttatgtgactgcttcttagcacgctgctgttcctgctcccgcggctgctcgcctatgattgccttcttcacaatgcacaggctgacagcagcatcctggattcactgttacctctgtaacgttttgggcatatctgatttgctacttctccctcctcccctgaccctgaaaaatgactgagtctagactcgaattcactgtggattcctaggactacagaaacatcctccaaaccgtcagatgctttgtcctgcagtaggtatttcacatgaattgtaaggaggatcgccagagtggcctcaggacctgactcgctcaagcactgcggcgcacagttgtttggtgctcgctggcaaatgttcattttctgggttaaagcatgttaaataaacataactctggaaggcgaatttgatccgactcagacctcattaattcattagatctcataccacctatgatttagatataataaactacataaggctgccttccaagtgtgagagctcccaagtcaatattctttgtaagctattatttagatctttccctaaagacccagttttcagggactgagctgatcctaatattctccctaaagaccatgtaaatgtcacacctaaaaagatgaatcattaagacatgtggagattcagctgttcattggtatgatatcagccattctaatacgcaatatctttagtgtgtcacagatattgatccaaatttgcacccatgcccaagtcattccatattctgttgagacctaagaaggtatgttaatgatttcatgtcacagattaaccaccactacatcctttaggctcctggaaaaataaaagacaattaattctcaacactttaccagtattttctcaaggcttttttgagatagggtcttactctactgcccaagctgaagtgcagtggtgcaatcatggctcactgcagccttgaactcttgattgccttgctcaggcagtcctcccacctccgactcccaagtagctagaattgtaggtgcatgccaccacacctgcttaatttttttttttttttttttttctgagacagagtctcactctgtcacccagactggagtgcagtggcacaacctcagctcactgcaacctccacctccagggctcaagcaattctcctgcctcagactcctgagtagctgggactacaggtgtgcaccaccatgcctggctacttttactttttttttttgtttgttttttgtttttttttcagtagagatggagtttcaccatgttggccaggctggtcttgaactcttggactcaagtgatctgccaagcttggcctcccaaagtgttgagattacaggtgtaagccacagtgcccagcctaattttaaaaatttttttatagagacaggggtctcactttgttgcccaggctggtctcaaactcctggctccaggccattctcctgccccagcctcccaaagtgctaggattacaagtgtgagtcaccatgcctggcctttaaagtctatgatttaaagcaacacttttatattattattaatagtctaagaggttgatagaggtgacaaaaaaattctgccttaatctccttatttaactgacaaactgggtcccaaaatgattccatgttttgtttatcagtaatataagcaatagcataatttaaactctgaaacttatataatctacatagtctgtgaaaattctatggtcctatcatatactagttaaacctttgtggatttgaaggtccaaaaggaaaataacatagtctatagacagaaaataaggacactttagtgattaaatcagaaacctagagtaaaacaaaatttctgaattacactgtaaattggctcttgaagtacatcctggaaaaaaaaaaaaatccctcaccattttctgaaccatacatgatatattccaagtaggtaggacttcaatttgattttttaaagaaacttcagtgagaggaacactaagtaatataaaagaacacataattcaaattcaagtttttttttgttttttgtttgcttgtttgtttgtttttgacacagagtttcgctcttgtcacccaggctcgagtgcagtggcatgatctcagctcactgcaacctccacc

SEQ ID NO: 913458 - DNA, 4001 bp, Homo sapiens
atataaattctttgaaggcagaaattgtgtcttttcacatcagaatcatttccacattgctgctgtacaataacttgacttacatttaatcattgtacataaatcacaaagtaaattagtatctcttatctgaatgcagttatgtgagccctgactttgatgtccaggaatttaggaactctatttttatcataagaataaaaacttttctaaaatatccctcaaggaagatcaaaggcaaatgagggtctaaatgtcctttcctttgatggaggactcgaatactgatagtattcaagaccttcatcctagaataaccgaggtctccgggtacatttttcattctgtctaacctggcaagcatctagataaaaatcaggagtctagaacaaatgcaaactctattggttaaaattcagatcctctggcagaggccagatgggaatgtagctggttcattacatgtccctactcggcttgtgaagcaaacagcccagggtggaccaaaatctagctgttttaccactacaaaagaaatagatttctgattacacaagtccttggtgtccacattcttccccttctcaagtcaaagtgaattatgtgttttaagttagcacattaatttcccaatggtaaaagaaagttcaataaagctagactactatgccacttggaactgccatgattacaatatcaaaatatctagagcactcatgttccacctatcaaaacaacagcaagaaaacatttgccacctttattagcttgtcacactcctgcccccactactacagcaaatgatactctaacatgctctctagtgtgtgtatgtgtgtctacgtattaatatataagtatatatacacacacatatatatcttaccgcaaattaaaatctggcaaatgtaggcttgaaatcaacaagccaacacagttaagcaaacagacatttctccagaatgctgcctgaaatgtaaccaagacctcttcacatcactggccagccaacagccagcccgcagctaggagtctgaagtcatttccctgccgggagaaaagttgagcgactcctcatcgctgagacctggaggtgtctgtaacccaaactgtacctgctgaagccttacgtaaaaacgtaaaaaccaccttgtcattgcccagcgcctacaactgacatctccaatttcacaacaacctgcagcgaagctgactttttccagaaaccgcaaacactcaacggagagaaaggggatcctggagatccctgaaatggctaacatttcaggggagacggaaaaataaaaactttcttgtccccagctcactcgcttcttaagggaaaggcatgaggtgggacaggcaaaccttggcaagtgcccgaggggactggagagctgtcagccccaggtgcgcagcgtggtccgggcagctctggggggatccggcagggcacccccatattcgctcccctcctgcccacctgcaccccatcatcctcacacccacgcccaccccggctcggagcgtggccaggagagtcggcatcgtagaaagcgctgcgggaagcgggccccctcccgcccacccggactcacgatcttcagcaggtccagtccactcccctgattcatgtctctccatgtgcctctcccgggaaggggcgaggagggccagctggagcaacccgggagaagtctgggaggactggcaggtctcccccgcccttccccactggcttttcggaagcagagaaaaatggaagccgaggcagagccaggaaaaggcgcaaaggggcagggtccccggcgccaggagaggagcagagggtgggcaggcgacgaggggaggaggtgcgaggctagagatccctgcagtggaggcgccgggagaacccgaggtcggtgccctgcccggcggctcacaaaggaaggagaaggcgccgcgctctcgctacctgtgcggcggctccgagcgcccccgcgggagccacgttctctagcagttccatctggatctcctgcgccaccgccgccgccgctgtgggaggcgacttggacatgtccctttggaccattggcgaaaagtcggctcggagcgaagcagccagcccccggcggcgggtcccctcctcctcgcccccgcctccccgcgctctgatcggctctgggggccgcccagggctcaggcccggccgttctcggcgcagcgccccgcagcgccccgggactcggcgccctgctgccaggcgctcagtgcgcgggacggggccggggcatcgggcgaagcgagccgctcgggaggcgggacgcgggggcgcggctgcggtgcctgggagaggggagccctcagcggggcagccggggccgggagagcgggcgcagcgcggcggggatcggagccgcgggcgccgggaaaggtcctcgccaggaggggagggaactccgggagcgcgagccagggggaggcgcgtcggaaagcgagagtgacaagcagcctacaagccgaaaagttcctcgcgggaggcgcgcgccgcgtgggctccgactcagccgctgcgcgtcgccgtggcacacaggctgaaaagtttgcgaagccacagaagccaggcccggcgctcagggggccttgatcctgttcccatggccccagaccacccctcaggaacccttagagcagatctcttaactttggaggggaaggacgacggaggctgggttcctacactgaaagttttaaatttgtaaagcctgctggcagcccgggagagcaaatgtctgcaaagaacatcttctgggcagctgaaagcccttgctaatgtcagtaataaggatccagagaaagaaatggcattgataaagatcatcaggtgatcccacctgaatctgcagctggcctcgtcaactaggtgggaatccacccaacctgagaccgaatgttttgctttatgactgctgtcttcatctttgccaaattaaattagcacttctttccaaacataattgaagtttgttgttgttgttgcttgttgttgttttagacggagtctcactctgtcgcccaggctggagtgcaatggcgcgatctcagctcactgcaacctccgcctcctgggttcaagcgattctctagcctcagcctcacgaatagctgggattacagccacaggccaccaagcccagataatttttgtgtttttagtgcagacggggtttcaccatgttgcccgggctggtcttgaactcctgacctcaagtaatccaccggcctcggcctcccaaagtgctgggatcacaggggtgggacaccacgccaggccagggttgaggtttttctataggggtgaaaagtcttagtgtcacatttttgacaaaacaagcacttccttaagatccagaattcttgataacaggatagtgactatggtgagggtgtttcacttacaacattccgttcagatagtcccaaggagccacatttttacatgattgagtgcaacttatttcaacaaattttactacagtggaaacttctgtaatgagttttccaggcatttttttttttttttttttgagacagaatttcactcttgtcacccaggcaggaatacagtggcacgatcttggctcactgcaaccttcgcctcctgggttcaatccattctcctgcctcagcctcccgagtagctgggattacaggtgcacgccaccacagccggctaatttttttgtatttttagtagagatggggtttcaccacgttgcccaggctggtctcgaactcctgacctcaggtgatctgcccgcctctgcctcccaaagtgctgggattacagatttgagccactgcatccagcctaatttttgtattttttagtagagacagggtttcgccatgttggccaggctggtcgcaaactcctgacctcatgatccgcccaccttggcctcccaaagtgctgggattacaggtgtgagccaccgtgcccatccagctccaga

SEQ ID NO: 913459 - DNA, 4001 bp, Homo sapiens
gaacatgttctaagagaagaaacttttaaaaatcaataaaatcctctgttgcttttggaaaagcataatgtaatccattttgaaaatacaggatactaacataaaacacctatgaagtaaaattcaggggaaaaactgttcaagtctaagaaaataaacaatagcttgaagtcagtctgttttttttttttttcttaacagagatatagtttactgtggaaatgaagtaaaacatgttgatattaggtgcagtttttcctcttggcaaattcaaggatccttttgtatgtgtccaaataagccatccacccacagaaaagagttgcttggattataaaacaacatagaagaccagtcttacataccacacttcctttttctaccaagggaagaaactaggctccattttttgtacctttctaaaaccagacaatgaaattctctaatagatcaaacaacctttaggggaaactcccacaggtggtctatcaggggcacagcacaacttgcaaagatcttggcagggaggaaacgattttacctttgctttttccaactgtgcctgggcctgccgctccgcttctctgcgcactgcctcccggtcctcctccagagatacatcggaatcggatggacggctagtgtaggagtctgccgaaccctggagaggaaaatgtacattttaaagtagattcagtctatgatgtttgcattggaaaagtctcatcgacacagcagttagcttcccggattgttctatactttcctgaaaagaggagaaaataattcattttgcagcaacctatctagaaaaccatgctctggtttgcagacattcaatagaatagttgtgtctactgagttgccattccttcccaagctttatattccaaaaaactatccttcctggaagccagaacaagttggttttataattaaacagcttgatggtgcagtgcagaactgaaggacaacgatgggtttcaaggatagcttcaagaacaatctacatgctaaagcaggtatttgaaactaggaggacattaagcttaacaaaaacatgaaagaaagtctgagttataaacttgaactctccaaaatgtcactaccatgacatgattcccactttaatctgaaaaagccttgtttacctttttatacacctgctattttctctgataaaactgtaagacactagcagctaacttcactccatcttccagcaacacattttaaaatacctttacctagatttaataaaaagccgtctacagaaaacacctgcctgggatagctcatctggcaattaatcacaacctaggaaaaggagctcaaaaaatgagaggaatctccctagcttccctctcctgcaatcatgatccgattaaccaaatcaaaccaccctctctacctgcactcactgcaacaacagaaaagcagagacaaaataacctctccccacaaacgaaagcccttgcgcttacacagatatcagaattcttcagccttcctcccttggctcttttcagaagcctgatccaggtggccttcatgagccagacagcgcctttatcgtccgcagctgcagccccgggcacaggttctcagtgcgcgctgagccccggagaaccccagctcctttcctatccatgctctgggcaagcccctgttctccgtccctttctgcctccggggctttcactccctgccccagaggactcccatccagggagattcttattttcccattccaggaggggctgaaaacacacactcgagtgctttatattgctttaaaaataaagaagacaagtgcattcaaaagccgagcatcaactcgttctaaacttaatgcatctcataaccctaaacattctcttccctgcgctcaaattgttaaaagaaattagttgtaaaagaatcgcagaaaaaaaaaaaaaaaaactagtgcaaaaacgtatgcagtgacatttgcaagtgcaaagttcaagccttatctttggagatctcgagggggaggggggaggcggagggaggaggacgcactcccacactgggcatgctccatatgtcgcctttttacgcagatgctcacatcacactgttagtctatgtcaaattgccattttacatccgaagtgtaaacagctggaaaggtctcttcggttctatagtaatcgggctcgtggtatgtgtgtctgtttctgtttcagatgaaaccttctctcaaaaacaaagcatgagatcgtttcctttaataatccctttccattacctgctccactaagtgtgtcctataccacaaggaggttcacaggtagtaaatatcatatgcaatattgcatagcaaaaatcaaataatgctcatcagtcataatatagcacagttctttattgcttgtgactttccaaacaagatgcaagagagtgacgtggccatttaattaggacacgaaagtaatcaccgctttataaagcgttgagtttaaaggagctcaaaatgacttcgaactgcttctccaactgagaaactaccatttgaaataaagccactggcataaacagcagtgtgaattgttataaccatacttacaaggaaatttcaaagcttggttaatttattagttggagttaaaattcacagaataattgagtcccaactctgcttgtagatgaggtgagtgaggctgaagaaggaaagacactaaagttattaatttcctgtactaatgaaattacattttaaaagtttacttattaagaaatatacactttgttttcttgacataaacaaaatgctctcattgtagtctaaactgcatttgtttgagtgtggtgggagaatattttgtacaaataaaaatgaaaaaaaaaagtgttcttaagaatacttaagaaccacagctggctgcagtggctcacgaccgtaaccctaggactctgggaggccaaagtgggaggattgcttgagcccatgagttcgagaccagcctgggcaacatagtgagaccctatctcaaaaagtcttcctccctcctcctcccttctacccttcctccctccccacctggcactctgcactaatataatcttcaagacccaaatactagaaaatacgtagaataggggtttcagaatgaaagttagtgatcagttgtacctcaattgtggtatcttgacgtaaattaatagatcacctattgttatgatgtgactgtaaaatgcatgggggataaaaatgcactgcaaactcttcgttcaagcaaatttacaagggagaaatgagtgtgtcaacacatacacacctggtaggggattcctgatcttcctagagggcttcttatagtagtagcagcacagtagaaaattaccaggaagcataattataccccataaggggcccctgtccccactgtcaccagtcttgccatgttagacccaatcaccccgctacaggttcaagtcacacctcaatgaaaagacaaagcttctatcagtaagaacccagcaatgacaggaagtacataaagagagggccgcataacacccacacataattttgtgcggtctcattcccgcggtcgcattcccggtctcattcattattttaaaataagatataaaaagtcctttgctaatattcagatggagcttttacattgcatagtcactttgagacctgtttccaggtttaaatagcagttaaaaacaaaaatctcttcaatgacttttggcaatggcttgactattttataatacaggatgtgactaccaattgatctttagagtagttcatagaagcatagaaagagctggattaccttcattccttgtatctctgatagtatatactttcacacaaaaacaattgtgtgtgtgtgtgtgtgtgtgtatgtgtgtgtgtgtgtgtgtgtgtgacagtctcactgtcacccaggcttgatagactgcagtgatgcaatcatggcttactgcagccttgacctcctgggcgaaagtga

SEQ ID NO: 913460 - DNA, 4001 bp, Homo sapiens
taaccattcaaaaatccaaaaatccatgtgtttataagccctattcaagcatacttattagttaaaatgagaggtagccaggccataggaaacaaaaagtctatttttaggaaagaagtaatttaaaagactaaacatccctgtgcagattccccatgatacttaaagataggactaaaattaattgtaggataaattattcatgtgataactattatttctgtagacacagatcttgctatgctgcccaggctggtctctagcttctggcctcaagcgatcctcccaccttggcctcccaaacttttgggattacaggtgtgagccaccatacctggcctcgtgactatttaatatcatatagattgtcattcttattaaataactgtgacataattgtgaccagttttgttgctgaaaatattcaaaatggccaatggaatgtatttggcaatttgcattttaggttatacatgttttcgtaattcacagaattccgctgcaggaaaaaatatagcagttatttcatgtttgataatattcttaaaaagcaagcaagtttacaggaaatgattccagatgtactcaaacaggtacagaataatttctaaattggacatgagtagcatttgataggtgggcgtgacatatctaatgcccagaaaccgttgataattagtgtatacattgccagccatgtcagaacctaaagaaatagaattgtcacgtacaatacttaatgagggccaactcagcaagtaaaattctgtatctttagaaaacttaaagtaaaatctaataaaagaatcatcaaaatcacataaaaagtatctcagtttccagttttatatgatacaacatagaagaaatgaccacaaagatatttcctagcaagcatttttttctctattatactaaatttagtataggttggaacaattagaaacaaaagaagtacttaaaataatttttagacaaactattaattttaaaatggtattttcatgtcctattagcacagatatttgtaactttatgacttttatttttacgggctctggtttagttttaggttcagggttttttttgtgcatgttttcatcctttcctaaaaaggcaccaataaataataataaagtcttttctttaaaagttctaaaccaaatccgaagacccaaacagtcagtcctcgtgtggcaaagctttatgtttaagtattttaaactttagactgtcatgtttgtattttattaaattcaaaatttctaaagttgatgaatagtaaaagaatcttaatttgcagcaacacagcaagtcagaccatcctgatttacacagataggtctcagacacacaagaagtcagtggctaggctgtcagagtgatactcaagacaagtgctggtctatagctggaaaaagcattttcattttccactaaatttgtctgcaccgggactctctccctaagctactaaatgaagctcagtaacatacagtttaaaaccagagttacagtttcacttgcttaaatcaccacagcattaaagtaataacactgtgaatggcaacatttctggcaagataagaaagtctaaaaagttaagtaactagtatgattttagctcaagctcggcaacagttctatgcattcctgttttctttaaaccgcaccgtgcatctggccggcttctctcccgtatgcttaccccaggaataatgtatttagtttgaggagctataaggcgtctgtcaagcatgctagaccaattccaagtgcgcccagcactccagcaggaattttcttcacaggagcaagaattcaggactagctaaaaggcagccaagtcttgctttgctgaacagcatagcaactgctttcctttttcttgctggcttggggtgtgtagtcttagttagtgtgactttctaaagttcgtcggatcacaacagctctctgttccagaaccacttaggcagagcagaggagctcatcaaagtcaattaacaaacgcaagtgggagggtcttattctcctctgaattacgtcagctggcttggaagacagacgcctgcaaacttgtcaaagtacagtaacacttcattagtatcagatgcgacaggtccctccaggcagccaggactccagccctgctcgagaatcctttcttcagaacagaacaacaggttgcataactggataagctgttagcattcaaagaaactactgtcttgaaagtctgcaataaaagtaaaaatatttttctactcccacccactgaagaaatattttctcttttgcacacaagaaagtgatatctttcttttttcgttgcctttcaagttctcagtgtgtatggaaaatctaatttttttcacagtcaaatgagtatcacttggagacatttaccttttgtaaattaaaaacttctttatattaaaagacagcattaaacattgaaataataaacacaatattctgagagcatgcttgcaacacacacatatatgtatatatataggtattactatccaggaaatagaactcctataaatcaaaaggctcacaaccaaaagacccacaactaaaagaacatggaaaacaagacgtgaatagataaatcataggagataaaattctagtggtcaatacacaggacttcctttctaatcaggaaatacaaactgaaatcacagtttaccattttgcatccatcatggtggaaatatttttaaaaaatctgaaaatctcagatcttggtgaaaatgtcaagaaggggatggcaagctatggcccacagtcaagctcagtcagccacctgttttgtataacctacaaactaagaatgtgttttacatttttaaattactggggaaaaaataaaaaacagaatggtattttgtggcacatgacaattacctgaaattcaaatcaatgttcttaaataaatgtttattggaacatacgggcttgttcatttacgtatgctccatggctgcttttgtgctctttacaagagcagtcattgcaacagagaccatgtaactcacaaagccttaaatatgtcctacgtggccctttacagaaaaggtttgtaagcctgtgatgcagagcaactagactttcacatactgttggtgggagaatatcttagttatttatttagagatggagtcttgctgtgttgcccgggctgtagtgcagtggcgcgatctcggctcactgcaacctctgcctctcaggttcaagccattctcctgcctcagcctcctgagtagctgggattataggccagtgccatcacagctggctaatttttgtatttttagtagttacggggtttcagcatattggccaggctagtctcgaactcctgacctcaagcgatctgcctgccttggcctcccaaagtgctgggattacatgcatgagccactgtgcccagcctgttggtgggagtataaactggtacagtcacattagatatttagcaggatataatgaaactgttgatgcacaagtactcaggcttggcatcccacccctcagtacatacccagggataccctcacatgagtacacagggaggtgcatgaatgaaatgtccctagctacaccgaggggctgtagtaaaaaacgggaaacaggctgggcatggtagctcacgcctataattccagcactttgggaagccgaggtgggaggatcatttgagcccaggagtttgaaaccagcctgggcaacaaaggaagaccccgtctctgcaaaaaaatttaaaaattagctaggcatggtggcatgtgcctgtggtcccagctacttgggaggctgagttgggaggatcatttgaacctgagaggtagaggctgcaatgagctatgatcataccactgcactgcagcctgggtggagccaagaccctctttcaaaaaaaaaaaaaaaaaaaaggaaagaaggaaagaaggcaggaaggcaggaagtcaggaaggaaggaaggaagg

SEQ ID NO: 913461 - DNA, 4001 bp, Homo sapiens
cagttatgtgagccctgactttgatgtccaggaatttaggaactctatttttatcataagaataaaaacttttctaaaatatccctcaaggaagatcaaaggcaaatgagggtctaaatgtcctttcctttgatggaggactcgaatactgatagtattcaagaccttcatcctagaataaccgaggtctccgggtacatttttcattctgtctaacctggcaagcatctagataaaaatcaggagtctagaacaaatgcaaactctattggttaaaattcagatcctctggcagaggccagatgggaatgtagctggttcattacatgtccctactcggcttgtgaagcaaacagcccagggtggaccaaaatctagctgttttaccactacaaaagaaatagatttctgattacacaagtccttggtgtccacattcttccccttctcaagtcaaagtgaattatgtgttttaagttagcacattaatttcccaatggtaaaagaaagttcaataaagctagactactatgccacttggaactgccatgattacaatatcaaaatatctagagcactcatgttccacctatcaaaacaacagcaagaaaacatttgccacctttattagcttgtcacactcctgcccccactactacagcaaatgatactctaacatgctctctagtgtgtgtatgtgtgtctacgtattaatatataagtatatatacacacacatatatatcttaccgcaaattaaaatctggcaaatgtaggcttgaaatcaacaagccaacacagttaagcaaacagacatttctccagaatgctgcctgaaatgtaaccaagacctcttcacatcactggccagccaacagccagcccgcagctaggagtctgaagtcatttccctgccgggagaaaagttgagcgactcctcatcgctgagacctggaggtgtctgtaacccaaactgtacctgctgaagccttacgtaaaaacgtaaaaaccaccttgtcattgcccagcgcctacaactgacatctccaatttcacaacaacctgcagcgaagctgactttttccagaaaccgcaaacactcaacggagagaaaggggatcctggagatccctgaaatggctaacatttcaggggagacggaaaaataaaaactttcttgtccccagctcactcgcttcttaagggaaaggcatgaggtgggacaggcaaaccttggcaagtgcccgaggggactggagagctgtcagccccaggtgcgcagcgtggtccgggcagctctggggggatccggcagggcacccccatattcgctcccctcctgcccacctgcaccccatcatcctcacacccacgcccaccccggctcggagcgtggccaggagagtcggcatcgtagaaagcgctgcgggaagcgggccccctcccgcccacccggactcacgatcttcagcaggtccagtccactcccctgattcatgtctctccatgtgcctctcccgggaaggggcgaggagggccagctggagcaacccgggagaagtctgggaggactggcaggtctcccccgcccttccccactggcttttcggaagcagagaaaaatggaagccgaggcagagccaggaaaaggcgcaaaggggcagggtccccggcgccaggagaggagcagagggtgggcaggcgacgaggggaggaggtgcgaggctagagatccctgcagtggaggcgccgggagaacccgaggtcggtgccctgcccggcggctcacaaaggaaggagaaggcgccgcgctctcgctacctgtgcggcggctccgagcgcccccgcgggagccacgttctctagcagttccatctggatctcctgcgccaccgccgccgccgctgtgggaggcgacttggacatgtccctttggaccattggcgaaaagtcggctcggagcgaagcagccagcccccggcggcgggtcccctcctcctcgcccccgcctccccgcgctctgatcggctctgggggccgcccagggctcaggcccggccgttctcggcgcagcgccccgcagcgccccgggactcggcgccctgctgccaggcgctcagtgcgcgggacggggccggggcatcgggcgaagcgagccgctcgggaggcgggacgcgggggcgcggctgcggtgcctgggagaggggagccctcagcggggcagccggggccgggagagcgggcgcagcgcggcggggatcggagccgcgggcgccgggaaaggtcctcgccaggaggggagggaactccgggagcgcgagccagggggaggcgcgtcggaaagcgagagtgacaagcagcctacaagccgaaaagttcctcgcgggaggcgcgcgccgcgtgggctccgactcagccgctgcgcgtcgccgtggcacacaggctgaaaagtttgcgaagccacagaagccaggcccggcgctcagggggccttgatcctgttcccatggccccagaccacccctcaggaacccttagagcagatctcttaactttggaggggaaggacgacggaggctgggttcctacactgaaagttttaaatttgtaaagcctgctggcagcccgggagagcaaatgtctgcaaagaacatcttctgggcagctgaaagcccttgctaatgtcagtaataaggatccagagaaagaaatggcattgataaagatcatcaggtgatcccacctgaatctgcagctggcctcgtcaactaggtgggaatccacccaacctgagaccgaatgttttgctttatgactgctgtcttcatctttgccaaattaaattagcacttctttccaaacataattgaagtttgttgttgttgttgcttgttgttgttttagacggagtctcactctgtcgcccaggctggagtgcaatggcgcgatctcagctcactgcaacctccgcctcctgggttcaagcgattctctagcctcagcctcacgaatagctgggattacagccacaggccaccaagcccagataatttttgtgtttttagtgcagacggggtttcaccatgttgcccgggctggtcttgaactcctgacctcaagtaatccaccggcctcggcctcccaaagtgctgggatcacaggggtgggacaccacgccaggccagggttgaggtttttctataggggtgaaaagtcttagtgtcacatttttgacaaaacaagcacttccttaagatccagaattcttgataacaggatagtgactatggtgagggtgtttcacttacaacattccgttcagatagtcccaaggagccacatttttacatgattgagtgcaacttatttcaacaaattttactacagtggaaacttctgtaatgagttttccaggcatttttttttttttttttttgagacagaatttcactcttgtcacccaggcaggaatacagtggcacgatcttggctcactgcaaccttcgcctcctgggttcaatccattctcctgcctcagcctcccgagtagctgggattacaggtgcacgccaccacagccggctaatttttttgtatttttagtagagatggggtttcaccacgttgcccaggctggtctcgaactcctgacctcaggtgatctgcccgcctctgcctcccaaagtgctgggattacagatttgagccactgcatccagcctaatttttgtattttttagtagagacagggtttcgccatgttggccaggctggtcgcaaactcctgacctcatgatccgcccaccttggcctcccaaagtgctgggattacaggtgtgagccaccgtgcccatccagctccagaaacctatttatatgttattttgtaacaacaaactgaaagtttggtatattgaaatacacatgcaaaaatttactataataggcttcaactgccttctatagtttactatgatatattaaattacatgagatacagt

SEQ ID NO: 913462 - DNA, 4001 bp, Homo sapiens
acatatcaatgtctttgactaaggcagtatcttggggcaaataaaattacgcgctgttcccacacacagtgtgtaagattccgactatctgcatcaaggcaaatattttctctgcacagctaactggacaagtacagcttcataaaattagtagctagaaatgaactctccagttgctttaccagatgccactcaaaacttgcagttaataataggagagaaaaacctggctgtgatggtcacaatcattttcaacatcctatcaccaccaccaccgccacgcacacatacacacaaaccaaagtaaaagcacattcttttcctagctatggaagcatacatatatcctggtcagaggcagtttcggattacaaaacagattttggtcttaaatcttaatgcgtgcaattgagcgttaagacagactactaacataaagttcaacatgcaacccaatcttgggtttggacacaagacataacccatcctgaaaggcttattcttatgagtgtaagctctgaaaagtgattttatgcattattagcttcaagacgatgtcggagctgccactgcatcggaaagcaactcattatttccctagcaggatgcaaaagtgtaacacagtagagaaggaacaaggtgtagatataggtcaactttcaaattccttacttgtttaacacagcctggccaaaaacacaagaacacaagttgccagatttcttttctctctctggctgcagaagactgaaggcctttccctaacgagactcaggcagccttattttcccctcactttgagggtgaaacttcaagagaagacgggtgcgaaaagagcttcccaatgttgagagactgccagttgtgatagggatcgcactgaccgaacttggggctccgtgtgtaccaggctgcctctctaggccaggtaatacaagaagccagggccgctcaggcgctggccgcagacaccaaatgagggggaggggacggtgagggggaaggaggcagggaggcgaaggcggacggggagaagaggaaagaccgaggcctgaaacaaaggaagcggagctttctccaagagggggtggattcggcgtccgagtgaggtggagaaaagccaaggctgcagggaaaggctggactcacagaacttggaggtggaggtgttgatgttgatggtggagctggcggtgggggcgggggccgccttggccacggcggcggccgcgtcgcagctcttcaacatcatgatcaccccattagcctccggcggtggctgcggccccatcgggagcccctccttggggcctttcctgtccacggagaccgcgggcaccgccagcagctgcccccccggaggctctcgggcaggggccgggatcgacgaggggggcggcggaggtggcaggggctgccggaagccgtccaccgcagcctcccagttgttgtggttctggtcgtccatcatcgcctcgtagctgcccccctcctcctcttccatgctttcctccatcctgctggcccccggcacccgcccgcctcacaggcacctgccgcctgtctcaaccccgggccagcgggcaccgctgcctccccgagttacatcgccggcggcaggaatgggcgcagcggagagggctgcggtgcgcagggtctctcgctctccgcggggccgactagcttgaagacgcggctgacggcggtgggcgctccggggctctagtctgggagaggcagccgtaaagcagcggcgctcctcacgacgttttacagcggcttccaacaggcagttggaaagggcagctgggggcgcggccaggagggcacgtggtgcgagggactggccgcgagaaagcggagccaaaaggggcgggagctgtgagtcactcccacgcaacagggcagaggttcgccccgcctcggctggcagggagctaacaggggaggcgcgacgggtcgggacgggcattcgccggccccgccccctgcccggcctcacgtgacaaaggtgtgtcttgcgcacgcgcgttcgcaatctggttaccatgacgacgaggccctcgccggttcctgaggacgcgcgcggagcagtcttggcagtagctgtggactggccagagtgattggaggtgttttcctcgcgtcctccaagtctacggggccttcgcacctctgagtgcctgagagccccggcttttgcttgggacggaggtacgggaccacaagaggccccggggtcgcaggttataaacggatgagaccgccctgggcggcccgtggtccgactgctcttgggtcggtccccagccgtcgcgacacacacgcacaaaatcgagaataaaaaccgaatcacacatagcaggatggcgcaaaaaagaaatgcgtttgagttactcatgtgtttttaaaattcctttacgtttgtatgcactaaggccagcaacccaacttttaaaaatgccggctcaggccgggcgcggtggcttactcctgtaatcccagcactttgggaggctgaggcgggcggatcacgaggtcaggaaatcgacactattctggctaacacgggaaaccccgtttctactaaaaatacaaaaaagttagccgggcgtggtggcacgtgcctgttgtcccagctagctgctcgggaggctgaggcagaattgcttgaacccgggaggcagaggttgcagtgagccgaaatcgcgccactgcactccagcctgggcaacagagcgagactccatctcaaaaaaaaaaaaaaaatgcgagctgggcgcagtggctcacgcctgtaattcaaccacttgaggagacagagatgggaggcccgcttgtgcccaggaattcgagaccagccagaccagcataacaagaccacgcctctaaaaacaaaattagcctggcatggtggcgtgtgcctgtggtcccagctactctggaggcttaggtggatcacttgagccctggaggtcaaggctgcagtgagccgagatcgcgcaactgcactccagcctgggtgacagagtgagactgtctccaaaaaaaaaaagagaattaagtggtatgctgaaggggaaaacataaaaccttagaattacatgtgtggcaaaaagagaggcagaaggaaggcaaattctgtttcaaacaactaatggtttatcatcaacagactctaggtagatggctgggtgagtgcgatgggataaagaagggtctttacatttaaaaaaaaagtccaatatacagggaagatagagtcaaaaaagtgtctctaacatactgtgtcataaagcaagtctttacatatctaaggatttatatcatagcgactatatggccacaaaatatatgaagcgaaaatgaacagaagtataagaagacaaagaaatctaccatcagagtaggtgatttttcactccctctctaattgcagtgagttgaatacagcctcccacaagatatgtccatatcctaattcctagaacttgcgagtatgaccttatttggaaaaacggcgtttgcagatgtaattaaagttcttgagatgagaagatcatcctggattatccaggtgggccatcaatccaatgataggtgtctttataaaagagaggtagaagagaagagaaggtaatgtaaccacagaagcagagattggagtgatggcattcccaagtcaaggaatgctgacagcacccaaagctggaagagacaaattttcctcttgagcctctggagggattgtgaccctgccaacatgtagatttcagacttctagatgccagaactgagaattcatgtcggtttttttaagccacctattgtgataatttgttaagcaactgattacaggaaactaatacatagaccgaggggaccaaaaaaatctttaaggtactggaagagttgagtaacacaattaccaagcttaatctaatatatatgtgtagaatattgccttaatgaccatagaatacacactcctatcaagaata

SEQ ID NO: 913463 - DNA, 4001 bp, Homo sapiens
aatcctctcacttcagcttcctgtgtagctgggactacaggcatgtgccaccaagcctggctaatttttttcttttcttttcttttttggagacagggtctcactatattccctaggctggtcttgaactcctgggctctagcaatcttcttgccttggcctcccaaagtgctgggattacagacatgaggcacatcgtacccggcccattctggtttttagaagatgccaacaaattctaaagttgaatctagaattcagtctctgaaggccaaatgaaacatgtataggccaggcagcctgtggcctctggggccctctcagcttatgatgtggtggcttaaaggtcaggtggaatgacagctgccaaggccctgaggccggggacgatgggatgagtgcccacaggagaggaggcacaggttagggaggagagggaagtagagttcagtcgggatgcttagagcatgacattcaccaaggtcatctgggtggtgacagaggcctcccaggagagaggcccctgctagagtgggaagccaggggtgtctggacttgccagggcagagtgtgcacgtttctccagtccttgcagagcaggctggccccagcccctcgccctgacagcacctggtctgccagctgtgagggcaggctgcctgggtggtcctccccacacggcactgactgggttggagaaggcccgagaggcttggatgggtgagcatggaggggcagaggatgtgggagtagggctggggaggaccctcactctggctgacccgtcagtggtctctccaaactgcctttccatcacatcccaacagggcctcctctctctcacccatgcacccccttccaggacaccctggtcctcagctcccactccccagcagggaagcaccagatgggggcatttgctagggaaatgtacccaaatggcctagccacccactggcctcaccactgccgaggcccggaagagggaaagcatgcaaattcctccagcttccaagctcagaaatcaggatggggatgcaggtccactctggggacctcaggataggggtcaggcccactcaccagaagcctctggacagagggagccaaagcacgttctccggatggccctgggctgagggcagatgcgtggctctgccttcagcctcagttgggaagatgccccccacacctcggagctccacctgagcagaggccccattttgagaggtagggggatagggccctcccagagggaccttgatctgccagggagacccagcgtgaagccatgcggcccctcacctgggagatgcagcggaggtaacgcacggccacctctcgggccaacagccagtcgccatcgtagatctcagggcagggcacccgggccagcaggcgggcgagctcgggggcaggaaggccgggtgccaggctgccgttgcccagtgcgctcacgggcacggcagtgcagaaggcacagaggaagcatttgccgtcgagtagcgtgacggccacccagacgacaggcgcgatgagggcgcgctgggccatggagcagaacatgtagcgcaacacagcggggtccttggcccggcggcccagcggccgcttccactcttcggccagcatggacacgttgttgttcatgaccaggccaagcagaaagagcaccaggggtggcgccagcaggatgcccgcgctgtaggctgcattgtagcccggcaggcaggggcagttgaagtcgaaggccgagtacatctgggcactggccagggccatgatgccacagatgccattcatgaaggactcctggttggactgcaggaactggaagatcatccggaacttgtccatcatgcccgctgtggggcccggcctcctcttcccaactcactgctgcctccaagagggcccctgctgcccaccctgcccactgggtgcccacctcatgactcgggctctcctggctgggaccaacagagctcagagcagaggctgaggtcactgtcgctttgaggaatctttagtcaggtgctggctgagaggatgcagattgaccaatcctgtgggttcagccagggctgtgcccctccctcctgggcttctctctctctgcagccgcctccacctccggcgctagcacctgctagagaccagctttctgtgggtgtgggagggagggagggaggggcgggagagaaggctcagacacagactgggaagacactgtctccagcagggctggagtttggagagtccagggctgctgcaggggcctgaggtcctggaccttgtcttctgggctcctaggaagctcatcgccctccttttgcccttcccactgggggtctcctccatgctgtatcagaatcctagagggctcctccatcagttccccgatgacggtgtggtgctgcggtggtggtggctgcagtgagggtgctgctggtggtcgtggggatactagccacagaggggatggcagtggtggtgcaggggatggtgctaatgtggacgtggcgtagaatgaaacatcctggatttgctggcagaggacttgaatttgataagttgcctgggcaggggctgtggcctgtgagtgtgctgcaggggtccttgtgtcagcctgcctgtgtctctgtgggtgtgcctgtgtgtttgtgggctgtggatggcaaaccctttcctggctccacctccgacctctacttccccaatcaaaaaataaaggggtctgcatgctgacagcaagggggtgaaaaaattaaatgggtggggtgatggggtttcatgcctggagtttgggcctccagagtgcctgcagaaacctggccagccctcctccacagacacatcaaagaggaggagctgagcatgctcgctctgatgcccagggctctccctgacctcccaagggcaggtcagatccagctccagccggggggctcctgtctggggaaaggggtggggtctggggctgagacagagcctggccaggacatccccatggggcccacagatctgtgcctccccatgtgtgtgcccacatgtgagctcactgtgcctttgggcctctgcatctgtgtatccgtgtgtgtgtgtgaccacgttagtgatctttgtgtctgagggtctctgtatcactgaccagaaccagcattgacccaggcttgccctgggtggagccccatggcaggcacttacatgcattgcctgtgtaatcttcttacaatcctatgggacaggtactgccatccccattttacagagatggggactgaggcttggagaggttaagttatcagctgagagttacccagcttgtaggtggaggagtgggactggaacccaggctagctctctcgtggggctgggagtggggggtggaggaggggtcaggaaatgttttttggcctttctcttctgggcaaatcaggctcctgttctgctggtctgggtggagatgctggagtgtcaccaataggatacagtggggaaggatgttgctcctcttgctgtcaggctgggcttggggcaaatggagcccccaggctggtagcctccggaagacccttgcagaggctccccagggaacactataggtggatggcaggatgagggaggtccagtgatggaggcgacctaccctgcacgtctcctgcagtgtttgcgtgcatggccaacagcaggtgtgagctgatgccagagctggggtgggcttggggtggtccaggaaaccaggaggagtggtttcagggggccacctggaattctgtcttgtatattgcacacagctccctgtttgtagataatgtgcctttctagtagtgcccatactgcgtgctctaaccacatatacacattctgcaaattctaagcgcagtgttattttaaaatacttgaggctgggcacagtggcttaaacctgtaatcccagcacttttgggaggccaaggtgggaggatcacttgaacccaggagtttgaggctgtggtgag

SEQ ID NO: 913464 - DNA, 4001 bp, Homo sapiens
ggttctttttgccaccacgagcttctcctggggtagggcttgggggtggcccatggtgctaatgcatgtggggtgctgaccggctttccctctgggagtccaggtggcgcatattagcagaggggccagggactccttggatccagggcgtgtccttagggtctcagccttgagggtgtaaaagctaaagtgagtgtccgggtggataagggacttggataggatcctgccgtgtgggctggggtgggtacagcaagatgccagaatccctggagttcgcaaggacattatctttttggagacctcagggtctgatcacacttcatgactgttctctgggcctcagattcctcatcagtgaaaagaggataaatcatcctgagccttgctctttcctagggatgttggagggaaagaaaagaataaaagatgcctgattgtgctctgcgtgaaactctccatctcttccaccctgtcttgtctttggggtggggacgattctcctgcctgcaaagatcagggaactgagacctgaagaggataaagtgccttgctgaggcccaagaaatacagaggtgccacagcaggacctctaaccacaacctaaggagacttgggaagtggataagggtgattctgcactaagtgaaccctctttttttctgtctcctactgaccttgccgtgtccatccacgggtgtcccgaagaacctcctcttccgcagccgtgacccctctcctatccagcagcctcccagcagctccgctccaccccgcctgccagcaacaggaagccctggtgagaccaaaggctcagcggtgccaccagctcatccggagattattctgccttggtctgggctgtagcgacgctggcaacctgccgggaagtggccatggcctcgggcaacagcgaagtttagcccaactcccttcccagcctccacccacacaagcctgagagacaggccagggtgtggccccatgtcctccccctctggagggtgaaaaacaaaactccccaggccagaggaagccagggagtggagggatggggtgagcgccaaacacagacctagccctgttcccttccatgcttcatggagggatcaccccttctagatcaccccttctgtccctgccaaggaaggctgccagatgggctcaggcagagccatgtggccatgcagactccaagaaaaggagaagctggaggaggaggaccaggaggaacaacaggaggaggaggaggaggaggaggaggaggaggagtctgattcttcccccacttcacagcctggagcttccagcctaacttcctgggaaaggcagtttgcatcactgctggggaagaatgggttaaagtcagccccctttgccccatccttttcccttcttggcttctaggctcctaattagctccctgtggaggccctgggttcataaactggctcaaagtggggtacaagatacctgcacagggtgggtggtgagcagaggatgggccaggccatcttctgagaccactgcccccaggccaaggatgggtcacatccagacccccagtgggacctcctccaacatcagtgacgacaggagactggcggctcggggaggggcaggactgctccctgttcaaccgggtggagggaacctcagctaggggcctctctccctctgggcagcgtgggacaggccccaccatgctccgctgacacctggcacaccccagggagggccccttccttacctggggccagctgtgggcacttgtggccatggcctcctcggggccggactctccaagtggcctccaggagggcggtgcagggcagcggcggcctccgccgttccctcccgcttttcttctgcacgggggcctggggctggtggcggcttcagactaatctaactccagaaaagagagaagaaaacagtgggatggagtctgcgcgccagtgagtggaaaaacagcctcccggcgccaccaggcagaggagggcgggccccgagggcggcgcgagaggagaggagccgagaggaagttgagatgcctgttctgcagctgctgcgcgtcccaccgacccgctgctcgccgtccctgggccgtgctggccctccgccctcggcccagacccggaccgggccatgctccacaccaatgggaccagtcgggagggccacgtggggatgtggaggcattggggagatctgacccagacctgccccccatgacagtttcaagagcaccccacgtacttgacccccgctgggcagaagctaccaaaggagaccccgcgagggtcaagggagggtgtcgtcaggcccgcgctgagccctgcaggatgctcagggccagggccccaccctctactggcccttctccctcagagttgtccattgactggacaaaccatccccaatgctgactctttgacctatagtcagctaactccccgggacctgcttcggatccctggagggctgaggattgaattcaggagcctagggattctccgggtcctgcaggcagagctccaactggtgggtgaaagttacaaggaggcaggtttctgaaggaagccctgtgtaataatcagagctgcccagcctgtatctaaaagtggtcaagatgcgggctgaagcgtcacgggtcaggaatgctgcacaggagagtctacggacaggctagatgacccttagcatggagggagaggacccccgacatctgtcagctctgcagtgctcgtggttccgtcatggtggagctgccgagtgacccgctggcctccctgagctgggcttgaccatatgtacgaaggaaagaaaaggtaccaagttctgcttgtttatttgtttgtttcagatcccagcatgtgctaaacacagtcccagatccttccctaaaagttatcttcctctatccttaccacaatcctgaaaatcaggtcttttttaaaaaataattttttcattttaaaaaaattataaatcttctctttattcttcttcttcttcttattattattattactttacagagacagagtcttgctatgttgcccaggctggtctccaactcccaggctcaagtgatcctccctccttggcctcccaagtgctgggattacaggcatgagccactccgcctggccaagcaggtcttctaatatccattttatagacagacacactgaggcttagagtggctgggtgactggccacaagtcctgcagtgctggtatttgaactcaggtgtgcctgacccaaagctttgctcttcatcacatttgtacctcctgatacctccgggccttctcttcccactggaagtgctgccacccaccaacatacaccttgttttttgctcatcctaatcctccctgacttcagggcccataccaactcctacctcctggaagagccctcccagcccaccttggcccacaaagatctgagcaactcctcccaaataattaagaggagggaaactggaccccagaagtgggaatagagggaaggatggataaaaaaggatggaatcatgccaagatcaaaatgaatccttagatgcttgggacttatgtctcagagctgagggcggtgctgagaaacctatctgtacctctgtttcctcctcaacaagatggaagctcgagtgtttgtgttgctgtctcatccctgcccaggggaggaggaaggaagtccttaggttcagaaatcaacaaatacattagccaccctgtgctgggtgcctactatgtgccatgtgcttttacacacagcaaccccatgatggcgggccgggggggcctcatcctcattgtatagatgaagaaacgaaggcacaggcagtgatgcagctggcccagggacagggtttgtgagtggtagagacaccatttgacccagttctgtctcactctggaatctgagctgctttctctttacactgctctcctccaccctcatcccacctgggctagagccttggagctcct

SEQ ID NO: 913465 - DNA, 4001 bp, Homo sapiens
gcctttccagatcaactctgcccctgcctgtagtgacctcgactgggtattggccacaggacaggagcccagtggagctgtgcccactggaccccagaggaaaaggccaaggacacacccagtgcctgtgacccaccctgcacagctgaattgcagggagatgtgatccctgagaacatggaacagaggctgagggtgcaccggatgcagatgttgtttctgaattggattgtacacaaaacatccaatggtgtgtgccaggtgtgtgcgtgcatggcctacccagtgtgagctgtaaatatgttctaggcagtggtggctttagcattttcttttctttttttgtcttttttgagtcttgctctgtcgcacaggctggagtgcagtggcacgatttcagctcactgcaacctctgcctcccaggttcaagcgattctccttcctcagcctcctgagtagctgggaccacaggtgcccaacaccacgcccagctaattttttatattttttagtagagatgggggttttgccatgttggccagagtggtctcgaactcctgacctcaggtgatccactcgcctcgacctcccaaagtgctgggattacgggtgagagccaccgcgcctggcccccccacccaatctctggctccttattttcccccaaggctagccatagaaactagaatccatcttccccaaggtgggtcatagaaaccagaactccttttctccaaagctgccaccataaaacctaaaaatatgattctaatttccccccgcctttctgtctgaaaactggccgtaaagaaatgatctgacctacctagtttcattgtagatcataagactcccttctagagagggtcctgccccgtgtctgggagaaaggaacactgtatagagaggccaagaagaacctagatggccttgctgagtttccccactccgtctataacatcagttcatcccttttttaatccaattctatttctgcgtggctatccaaaccttgttgaacctaagcataaaaatgaaccatttcctctgtatctttaggtctttattctgaaggttctgtggcacataaaacggtaatcaaataaatttgtatgccttttctcttattaatctgccttttgtcagttgattttcagcagagcttcagagggcaaagaggaagttttcccgcagcccctagagtggcctgggtaattgggaatcctgtgtcattcctatgtttacagcactggccacggaaaggtgacaaacgataggaacagaaatatgtttccagagtggaaactggcaagtggctctctgtgagccgataattcctagttggggaaaggagagggcgcacctggcagtacctgtagggtgggtggagaatcccctgataatgagaatggttggggtctgggggtgcacttgacagtgcctgtggggtggctggggagcccctggcaaagctcatgggtcactgagtggtgtgggaccgcacctgatgatgcctgggtccttcctccggtgccctgcgggccggcgccactcctcgaccatcaccacagactgccggttggcgaggaggccgcagagaaacagggcgagcgggggcgtcagcagcaggcccaggccgtagagtgcattgtagtgcaccaggcagggacagttgaagtcaaaggaggagtacagcttgacggtgaccgcagccagcagcaggcagatgccattcatcaccgactccgagcttgactggaagtgctggaagagcatgcggaatttatccatggctccagcctgggtgggtgggcggccgtcggttcggctcagtgaggctctggccaccttcctggtgtctgctgtgctggggacgagcctgggatctgcaagaggttctctctctgcttccaagggcctgaggggccaaggaggaagcagtgcccaggccccagcccaggctcccgggatccagtaggcacttaaggcagggacaggctctcaccacaaaggctcccctgcccagcccaatggtcccctggtgccactcccctcctgtctgggggagtgagtcaccctctgtgaccgggcagcccaaagcacctctaggcaaatgggccccgccctgtcactccattcctcccggcccatttctctttgctttacggtctggatgctcaggcttgacagccgttggagcttccttcgggggacaggcaaattctgggtgtggtgaggaaaagatgctgatggagccaaggtagtatattttctggtcttgatcaaaagcatgactctgaacttgtctcacaggcatagtaaaacaacagcaacaacaacaacaaaatatgacgactcagctcagcccagggagatttcatgttggctttcaggctaggaggagccagaaggggcacctattcctgaccgaaggcttcctggaagaggagacccttgagaggagtcttcaacgatgtttcagcatttgccatgaaaggggtagcggaaggggatggcctccctgggcgacgtgctaaacattgtgcattaaccactgggtgcccatgggagaggctgctcaagtgccacgcccacacctgcatggctttccccctgcccttcttccgtgtgaggggcatgcgtttgaaatcactgcttcttctcctaactctcccacatcactaggtctctccttgtgtctcagttccagtctctccgaaggatgacagcccagatgtttgagggacccctgaaacctgcaaaacgaattttgtaaaggtcacttggcccatattgtaagtcagatcatcccaaataagtcttgcaaatttcgtaaccatctgtgtggtctgtacttctgatgaagacagacagaaacctgggtcttacttattattattattattatgagatagagtcttgttctgtcacccaggctggagtgcagtggcacgatcttggttcactgcagcctctgcctcccgggttcaagtgattctcctgcctcagcttccaagtagctgggattacaggcacccaccaccacgcccagctaatttttgtatttttagtagagacaggggttttgccatgttggtcaggccggtctcgaactcctgacctcaggtgatttggcccccttggccttccaaagtgctgggattacaggcatgagccactgagcctggccacttagtatttttattttccatatttgtacgttactctaggtcctatgagacagatttccctgtgtgagggaaatgaggcactggagaagatggggagagccaccagtggccctgtgagtctgactctgagcggaggagagggcggggcaggggtgagaaacccttcaagccaggaggaccaccacaacttcaggtgggtacagtcccagaggggctgttggaggtcacataccctggcggggacagagccagggaggaagctgggatcctccatctgtgcctttcagccttagtcacccactgggctgctgaccagaaaaggggactgtcctggcccaaggccaggcttcgtgaccctgaaccagcagggctggtgtggagcaggcggggagctaactgggctgggagggtcatgagcacccctcaatcccattctagtctcagggagggatagagtgtcctaagggtccccagccactctaaccttgagagttcagaaaacaatagacaatgcttctggaagaacactttgaagaaaactgggtcaaagactccaggccaaccttttcacagctccagcctctgagaggtaagacagagctaccaggtcagcctgggtccctggagccctgcagggcaacaggtgctgagtgactgcagcggggctgacccttgccgggtatttacaggaaatacttcagtaaagaaacaggccagaaagaagcccaccacaaaagggatattatctgtcaaagagaggggatggcttacatttttttttaaatctctattttctgaattgtcgactt

SEQ ID NO: 913466 - DNA, 4001 bp, Homo sapiens
tggcaaggccggggctggggcccagctctttgttttacaaaggaggaaacactgggtgttggtgggcgggggtggggtgtcagggagagaggatacatccaccatggccttttctgatgagctccgtctagtgcccatcccgcaaaacatacctccctttagaattgaagggatctctggcagggccccttcgaccttctctaggtgttgccagcagcttgcagggctagtgcaggactaacggctctgaattgctcttacactgtgtgtgcccaactgccccccaacccctcaccatctctagtgcctggcacttcacaaccagggagcacttgccagggggaatcaaagcaatcagcaggtcccttctcaacgtaatggactcaggtctttcaagtcctgatggacttttaaccactctttgctgccagcgtatccatttgattgagaatattcaatatttccctcatccagacttgtctctctctgaggcacctttcccgctcccccgtataggaattcattgcattttcaaaaagcacaaaaatggagattcctgcctcgtttcaaccctgaatttaacaaggatcatttccatggaaaccaaaaaaaaaaaggaaatgaaataaggacgaatatctcatttatttccctgcagctctcatcccctgctcatccaagcctccctccttccagatgaataggaacaggttacagctgacccagtttcactcccagcttcagaagatgaatcacggtgggttggcggacaaggaatggggcaagctggggcagcgcggaaggcagtgctgttttcaggaggcctgacctctgtggccagagtccccgtcagcaccgcttactgcaggccaagatgcctcccaccctccagaatccgaccgcggagggagcttccagtccaggagcctgcgggaatcctggcgggggctgagggctgcagcccccctggcctgggcattgggtgcctcttagggatcttgcctgggtgccctaaggggtcacccggtgtccgtcctggagggccgcagagtcagcgcaacctgccctggtgctcggtcctaaggtcagctctgcttctcccgagtggggagggcgtcacggtttgcctgcagtgggagcgttccgtgtcattcagacgagcaggtgggaaggtcggcaggagtgcagagaagagacgcgggaagcgggatgcagagaggtgggctgaatcaaccaggcgcaggaggaagccacagtgcccaggggaggcagggggatgggggaggaggcgggaggccccgggttcttgccctgtgggccgcgtgggcgcccaggagcatggtgggcgccggcctcacttggacaccagcacacggacaaactcctcgtagttcacctgtccgtctccgtccgtgtccgcggcccggatcatctcgtccacctcctcgtcactcagcttctcccccagccgggtcatgacgtgtcgcagctcggcggcgctgacgaagccgttgccgtccttgtcgaacacgcggaaggcctcgcggatctcctcctcgttgtccgtgtccttcatcttcctggccatcatgcccaggaactcggggaagtccacggtgccgttgccgtcccggtcgatctcactcatcatgtcccgcagctcggcctccgtggggttctggcccagggaccgcatgaccgtgcccagctcgcgggtggtgatgcagccgtccccatccttgtcaaacagggagaaggcctccttgaattctgtgacctgctcctcagtcagctggtcggccatgccaggggtgggggcgtgggtggcagaagaggccactgtggggtctccctcccagtgccgcagcccggctgctgtcccagctctggggtggcaggtggagatccgggcggccggcgggctgtctcgccctggcttgagacgctggagcttaagaagcagcagagtcctcccccatcattggcagacgcccctgccctgcggttgcccgggcctgtcctgtttagacaggagtccagggcctgcgaatcgagctgacgccagcacctctgtgcctgcttgcacctggacccagcagagccacgggggccccgaatcacacctgcagtcagggcgtggtgggtgagctttggagcaatccacgctggactccttcctcctgaatttccctttctctcctccctccccgtctcccacctgccgcctgtctcccactcaataaactccagtgccctttcttcccttgagtggagggctttttgcaggatgaaaggcagatgaaagaaacgtccttgcctttggtttctaaagcctcatatagaacaggagggtttttggaggaggaaggttttcccttcaggtagaagcagcgagttttcttatcttcagaatggacatgaatagggaggggtttcctccaacccattcactcatccaccctttcacagatatttgagtgcctactaggtgcagtgtcactctggaagctgggaacacagtgggaccggcaagccacccccagtcctcgtgaggttaactagcaagacagctagtttgcaggtcaactgatcgaggaatgcaaacaaggtgactagggattattgataaatgctgatggacatacaaggtggtgatggacaggaccccgaggtcacctttcagcctggtcaaggacagacctcctgctgagaagcagctgtctaggccggagtggccatggcagggccaagggctggaagatgatcagtggggctgcaggcctgtgagggaggggacaaggaggagagacaaaggagaccttgaagggctcagccaggaagtcccactatcattctctggtccacattgccccaggagctccgggcagcatggagctggggctgtggagcggcctctcccagaggagacccgcttagggggatagtggggtgttcacagcacagactcggctcccactcccagggggcctggagacatgacccccagagaggcaggagcaggcgcttcacctgtgggaatccaagaaatccacactgggggagaaacatggagcccactctattttttgctgggtgtgtgggggtggggtagagaccggaaagggaaagaaagtgtccttttgaggacctggacttgccgaggagagactatggcaggagaagggctcggatattcattttttttctctctgattttccttcccttctctattcaagtagaggcaagtgtgtccttctggtctggagggggtctgtggtagggggaaaattgaagccacctgcaagacaccttccttcctacctgagggctcccacaaagcctgtgtcctgagggtttgggcaggaggaagcaggaaggttgaagaatccctccatccccatggaatcttttccttagaagagaagtttgtggaccccagagcagcagggctcagggatgtggtggccacaggcagccttggcaaagagccctggggcccaggggtggcgtggagggaacgaggtgatgggcatcttggaagccacgtgtgtgggtgacactttggtgaccagatcccaccctcccctcctttctcaccccagaatattcggccttgcctgagacctcacaccccaacagctctaggggagtggggagatgggctggccaggactccctggggtaggagaggggctgataataaagtttagatttagagagaaaaatgaggcagcatctccatttgcaggctgggagcatgccctgggcccaggttacagctctgtccacagggggctgcgcaagaaagagtgtgtgctttgctcctgggagccccgcccttcctcgaatattctggagatctcttttgtggtggggagacccagcaaaggctgcacacacagcttgctcaaggtcaccccatgaaaagttcagctggggatcaaggtcccttttttattttggggttttttgggggctaattctgggacatggggacctt

SEQ ID NO: 913467 - DNA, 4001 bp, Homo sapiens
gacccacagatagacacagacagacacacagatacacagacacagacacagacagacacacacacacatagacacacagacacacggatagatagacacacagacaaagacatacctagacacacacacacagacacagatatacagacacacagatacacacagatacatacacaggcacatacacgaacacacagacatacctagacacacagatacacacacagagccacacacagacacacatatacacatacacagacacagacacatatgcacagacataaacacatatacagacacagacacacacaacacacagacacacagacacacagataggcacacagacacacacaaacacatacacagacacacacagacacacacagataaacacacacagacacatagacacagagacacacacacacagataggcacacagacacacacaaacacatacacagacacacacacagacacagacacacacagataaacacacacagacacatagacacagagacacacacacacagatacacacacaaagccacacacagacacagacacacagataagacacacacacaaatggacacacacagacacatagacacagagacacactcagacacacacacagatacacacatacacatgcagatgcacacaaggacacacagacacacaaacatacagagacttacacacagatgcacacatacagagacacgcatacagacacacagacacacacacagatgcacacacagacgtacacgtatattatttgcagccgaagagaggcaggctgcgtgcagaggctggcagctgggctccgtctgtccatgcgaggcgcccgctcctgtttgtgcgggacacgtgcccaggtcctcaccagcagctcaggcagaacctggagccacagacaccgcccagcaccatcctcacacatcctctgcccacctgccctctgctccgcgtcaggggaggcaggagctgcccctggggcctgctccaggcagttctgccaccgcaggtgagaggggtgggctggaaggaaccctggaagcaggtgggggccctcggaggcagccgccccacaaacaccaagcacacatggaactcggcagtcctttatttagatcaatgcggggctgaggggccctcattccactgcagggcaaagggggaccaggcccaaggaggcctccttctgcccaaggtctggaggcagagaggggctcgcaggcggcccgagggcgccgcatccaggccccggagcgcaaagccttcctcccagggggaggcagtttcccatccaccgaccaggtttccccggagagtcccagcacaaaagcagcagcgggcggtggccctgaaggctcagagcgcagccagggggacacaggcggggagcctcactcctgggcgagcatcctcgcgaactcctcgtagttcacccgcccgtcctggtccacgtcggcctcgcggatcatggcgtccagctcctcctgcggcagcggctgccccagccccgccatggcccgcctgagctcgtccacggtgatgtggccgtcgccatcctggtcgaaggcgcggaaggcgacctgcaggtcctccaggccggccctggccttcttcgccgccgtcaggaactcctggaagctgatttcgccgtcgccgtcgctgtcaacctcggagatgagtttccttagctgggcctccgagaggttcttgcccgtggccttcagcgccgcgcccagctcctgggcattgatggtgccgtttccatccgtgtcaaccgcggagaaagcctttttgtactgggcctcctcctcaggagtcagctcaccggccatgcctgcgtctcctgcacctcgcggagcctccgagctgctgcccaccggccctcaacctgctgctctcagagctcgtggtccagagtgcaggcagccgcagggatccgggcagcgtctgtcccagacagttctgccttggcatgggaaccccctccttttctgcaatcggaacaaagggaggagggaggctccccaccctccaaatgccctggggtgagagcctcctcccagggagggccagatcagctgcagacaggaaatgcaggaatgggagttgggagagctgtcaggtgccaggtgggaactgccatggggtcggggtatcggatggctagcctgccaaccccgcctggccttgatagcaaccacctccctccaggaacattctgcccaagggatagtttcccctgcagctgattctcggagatcctgaccaagccaaggggttcaagacagcttctgcaacttcacaaagactgagactggagggggaggtggcttgaagagggctccctcaagggcacagcaggccccagtgtttggtgtttccgtacccctctctccagtgctactgcctagctcttgccctgaggctggggctggtggaagggaagtgggtggtagtgttgattctgccagggcacaactgtgggtatcatgagattcccaggccagggtctagagacagaggatggggctcactgcctataacttcaaggaagcaagggaccagggctgccttcagagccatagctggtgctgagatggtgtttatcaagtgaacatgtgacgtgcagtttcagaggagagggaaagactttttgtctccccagaatactcccttctagctcagggattcctacaattcaattccatcgccaagtccaaggttccctgtgcagacaccctgggagctcagtggcaggcgttccattcacagggcgtcaaacagttacagctggagttttgctgcagcgagacacgggggacctcagtgcccagcataccccaaaggtgcaggcagaggtgcaggaggatgcagaacaggtggctgccatcaaacttggccctccttgtggttttactaagcatcagccctaagcacagagacccatctgggagcctactggggtcctcaatctgatctgttctctggaaggaaacccccagggccacttgccttgaccaacttttagagcaacagctaagctttcgggggaccatccccaagtccttccactgatgtgatctacagttgtgaggggacatttgccttggagtccccaaaatgcctttcccaagcaagtcccctctgatctccatagattcccattcttctccccagcccctgcccgtacacagggaacaaactcctttattcccctgggaaagtttatacattccacctccctcctgttcagcccatcaaatagaccaagtgccctctccttccctaaagtgcagccagacaaacacctcccagccccttggtgctgcacacattctccaagggaagccggaggctggggtgcccaaccacgcactccatgacccacagctcagtcccccaggaccacacaaggggcaaaccaggcagagcagtgagaggagggaagatgccccagccagccctagtgtggcagctgctccctgagctgcatgtgaggggccagagggaggtgcaaagggctcggaagcaccacagcagagggagaggctgaggtctgcagagagggagctccgtggaccaggtacaaaagggaaggtcatggtcagcagggagagggaaggaagggggtcaccccaccggagttcagggggacccagcatagacagagagatgcagagagcagtgtcccagttgtctaactcattttataaagatagcttgaagattttctagctcacctcagtggtggaataatacagaggcctcaataaatattgagcaaccaatttctcaatgaaattgacaaccggtttggggtggagaacgtggttctggccaggagatgagaacagagaagcatcctgcctggtgaggggcccagggagggcgggactctgaatagctggattcagcccagctccttgttttatttccttaaagaatacctgaagatttaaatctat

SEQ ID NO: 913468 - DNA, 4001 bp, Homo sapiens
caatgggcactcggcgggcgaggtttcacggtgcagccagcgtccgtgtgtgtgcaggcggagacggacgaggcgccacggggctcagatacaggagcgatcggtggaagcagagtcggagcagcggagggccgagaggccggggaatgacgtggttgtggggcgagggcagccagcgccggggcttgaggtggagcttggcccgcgggggtgggggtgccgctgaggaggaggggtcgggggtctccccggagcggacgcccagagcaagcccagcctctctacagacgggcgagggggaggcggagaagggggcgcagtcccgcaccagggcccgcagcgccatagggtagggccacgccccggagggcccgcgccaggagtctccgcccgaacccccgctcgggcaggacccccgccaggaggagctgcgcttgaggggtccccttcgagccaaacttcaaatccaactcctcggacggccaatttacgtcatcgcgggtttccatggcaacgcagacaggcccgagacgcgtcttcaggaagaaaaagccattgggggcccactggagcctcgcttctggttccgggcccagcgccccgggcggaatgcggggttggaaaggggggactagcctgtgtgtggggtccaacccccccaccccacacaccagaccttccctttgcattgctgcgtcatgggggcctcctcccacggatgacacgcggctcgtggaactggggggccgcctctgcttctcctcccggcccctccctgcacctgcgctgtcgcggcatcttctgcgggtcccctgcgccccacccgccgcgctctggcagggaggcagtgcccggctcctgtctctggggcggggaaggcgtgggatgctgatggcagatgggtgggggcgcgggtgagtgaggccgtgcagatggacagatggatggcgggggcgggggtgcaggctctcagtcgaaagtccacggaagctcggctggaggtcacgtcacagactcgcttccgcatgcgccccccccaaccatggaatgctgcgtcacgctggggggtgcgcgcaggtgggcttgtgcgggccgggcaccagcgcgtgtgactgcggatctgagggtcccgcccagcccccgcgggcgccaccgcagcctcccgcccctggcgctgcagggggctgtggctgccccgcttattaaaaggcagctgcactgcggggtcggcgcagcccctcggaggggagtgggcgcgcagctgctcccgcttccagcccagccacctgtggccccgcacccgagcctgctgcaggtggttccggagccgcgcccctcccggcctcctggccacctcttgcctgtcacgcagacgcccccatcaagcccaccgcccacccccaacccccgtgcgggcagcggctcctcggtgctctggtccgacgccccttctgtcgccctccccaccccgcctccggcggacagagctgggcgggagctgggactggtaccccctccccacctcggagacacccttaactccaggctgcgatcctcgtgccggggccccgccgtcacgggaagcctggagaccaccgccctcgggtccgcggggtcggactggcctggggcagccagaggaggcccgagggaggagggcggccgtgcagcgcgccctgcacactcgcacccgcacacgcgcctcgcacacacgcactcacaccctcatccgcacgcgcgccacgcacaagcgcactcgcgagcacacgcacctcgcacacacacccgcacacgcgcctcgcacccccgcaccccttcgggccccccgcccacattctgcaagaaatgtggaaatagctcacaggcggctccactggcagctgctgcaggacgcggtcggggaggacgacgatgcggatgtggatgcggaggatgcggttccagacgcttcgcggccgggcggggcgggggctgcagctgcgagaccgaggctgtggtcgccatggaaacgcggctagaggcggggcctcgactctggtcccgcaccctctacccccacccaccgccccggctagggagccgcgcatgcgcccctcagaccctgctcgggcctcaccacacacctcatacacacacctgatgcacacacacctgacacatccccagaaaccacacctcgaacaccagacacatccaaacacacacctcacacacatcccagacacacacctcacacaaacaccccccacacacacacctcacaaacaccccaaacacctgacacacacacaccccagaatcacacatctcgaacaccagacacatccaaacacaccccagacacacacaccccagacacacacccaacacacacccgacacacacaccacacacacctcacacacaccccagacacacacacacctgacacacccgacacacccccagaatcacacacctcaaacaccacattcaaacacacacctcacacacacccgacacacacctgacacacacgtgacacacacacctgacacacccccagaaacatacacctgacacacacctcacacacacccaacaacacatatacctgatacacaccccaggcacacatttgacacacacaccccacacacctgacacacataccccagaaacacctcaaacaacagatacatccaaacacacacctcacacacacctgacacacacaccctagtaatacacacatcaaataccagacatccaaacacacatctcacacacacctcagacacacacacagctgacacacacctgacagcccccagaaacacacatttcaaacaccagacacatccagacacacacctcacacacaccccagacacacacacacctgagacacaccccacacacctaacccgcaccccacacacctgacccacaccccagaaacacacatctgacacacaccccagacacacacacctgacactctccccagaaacacctcaaacaccaaatacatctaaacacacaattcacacacaccccagatatacctcacacacacaccccagacatacctcacacacacacacctgacaccccagaaacacacctcacacaccagacacacccacacatctcacatacacgacacgcacctgacacccaccccagaaacacacatctcacacaccagacacccaaacacacctcacacacacccctgacacacaccccacacctgacacacacacctgacccacaccccagaaacacacaccttaaacagcagaaacacccaaacacacccccccacacacctgacacacctgatgcccatctgacacataccccagaaacacaccagacacacccaaacacactcacctcaaacacatccctgacacacacacaccacacacctgacatacacacacctgacccacaccccagacacacacctgacacacaccccagaaatacacacctcacacaccagacacacccaaacacacacctcacacacgccacacacccctcagacagacgcctcacacaccagccatacacacatcacatacacctctcacacacacccccaacacacacctcacacacacctcacacacgctcttgacccatacagttcacacaccagacacacccaaacacacacacctcacacacccaagacacacccacacacgccccaacacacacctgacaccagtcacccaggaaacacgcttcacacacaccacacacccagacacacaccgcaaacaccacacaacgacacatacacccaaacaccccagacacacatacctcacatcagacaccacatacccaacacacctcacatataccctagacacaccagaaacacacacctaccaaacacacacacaccagacacaccccctgcagacctgacacacccacacctgacacacacctcacacaccaaaacaccctagacacacatcccaaacactggacacaca

SEQ ID NO: 913469 - DNA, 4001 bp, Homo sapiens
ggcaggaagccagtgtggggggctcgggtgggaacaagccacggacaggaaagcattcacacagggtgggtccccatgctctcccatctcctcattggcggccacagtgcgggtcctggatgacaagcaaaggccatgctttcttgtctctcagtaacttgagcatctcagaatcacaaccccaaacccgaataaacctcagtggcaattttcaaaagttttgacccaaactaaccccttacctggctgcactaagaggcaaccccaaacccctatttattaaaaagctacatctttttctgttttcattccaacaaagatagcaaataggtgccctccctgaaaggcaacaaccacagcagggagaccccactctagtcctcagcgtgcgccttcccgggaatcagaagcaggactgggaaagccaccctcacaacttctctccgggggaccccctgcagatctgcgtgggggtgaggggaaatgactgaacagcagcagacgccgagcctggaggtgaagacaagctgggtaatgtggtgctggaaaaaagaaaccaagcacaaaaacaagcacacggaaaaaaaggaggaaggaaagaaagggcacccaacaacgcactgatttatcccatgaaatagctcccctttctcttcccagcctaatcaacacctccatgaacccctgcaaaatgggcatttctgactgcacacctgtgcgtgaatccacactgacagatactgatgcagagcaaatactgattgtgtgagggaaggaaataacttgaacttcagactcattcggcaggtcctgattctctttcactatcagcctccccacctattctgagccgctccgaaacaaaacaaacaagacccaactcctgggcagaaagggaacagcagctgagctgagcagcacatgcttggagcgttcctgccatcgacttcggattatttctgctttcttgagacacagccatcagcatgggactcgatgcagcccggagagagcaccgcccgcgcagcgacgcgcacagaccctcccttggagacgcgctccccggcgcgtgcggccgagcccgcgtgaaatgcacagaccctccggtgaggctctgcccacgtgtgaccctgagcactgcgaagcccttcccttccatcctcgcgtggccacccaaagtcttgcctacacctcgtacgtgcagatgccaattccatagaaatacatgatgtaaggacagaaatgggaacgactggaggctgatcttctcgtgaccacgtctcgccaacgcggtgcgcccatgcacacggcgagtaaacgcacacagccggtaaacagccatccccaccatgctcagcccacagtcacgcgtggggagaaggcagcggagagggcggcggtggcaggagaagtgggaagtcgcgcgcccgcgtgggctgctccctgacagcccggcgctgccccctccccctcccgggaacggcgcccacccgggggtcgcaggcccacgcgtcgggcgcgctcgggggggctccgcagcgccgagaacgggacaatgaggacgcggtgacaggctgggtttctgccgcggtagtggcggcggcggcagctggagctgcccgtgcagcccctgccgcggccacctccaccctcgcctccccggtccccacttacgttccgagggtctctttgaactcgaagatcttcttgatgtcttcagcttgctttttccaggaggagctgctctcgccgttctcccgggccatggccgacgagcgcggcgcggaggagcggccgggggcgcgctggggagggggcgccgggggcgcggcgcgggcgcagaggcggcggggatgccgggcggctcgggctgcggcgcagcttcctcctctgcagtttcctctttcgctctcgccgccgccgccgcggccgcggtccctccctggctcttatttctgctgttctcgggcacagacttcctgccgccgccgcgcgccggctcctttgccgccgcctgccagcctcactttctgctactttcttgcctccctcccgctccctccctgccgcccgccgcgctcccccccacctcgcgcctcctccccctcctccccctcctccccctcccgcgggctccccgccctctccgtgcgccccggccgctccccgcctccagcgcgccgccttcggggatgtcccgctcccctcccaagagcgccgggccacggccgtcgtgccccctggagccccggcgagggcgggtacgggcccccggcaggtgcggggcgcacgcgggagagccccagcccctccgggagctggaaacggagcccagtctgggggcgccggggctttcccgtctccggcgggagggggcgcctctgcgtggctcggaagcgccgggcgggcgggggtgcgcggcggccggatgcggggcgccgagggcggggcgccttcccgcgctgtggcctgtggcccgggggacccgaggggcaaggcgtggggtggggggggtgggggccggttgttatggcgacgggcggcggcggcggctgggatggaggcggaggcgggcgggagctcattcgcattgcaccaaatcggtttcacgtcagtttcgggacagacccgcgaggagcaagccggggagcctctgggcgggtacgcgcaggacgcgccagcagctgcctcgtggtccctttgcgagcaaaactcccgggggtgtttggcagccgcgcgggcgccctggtgctgggctggagcggccggcgggcctggccggcctggttgccctggctcacgcttggccccttctggcatctccctgtctcctcccagagactcagtggaaagaagtgatcgtctgccccgcagtcccctcgaaggaggagcccacccgcggctggcttagtagggtgtccgggttgcggggcaggcacctgctttcctatggactgccaaaactaacccagagaattccctccggactcccatctcccagctgtactttggcctgcccgccccactcctggtgtccacctgtcagagggcagcccacgtgctccagttccctggtccccaacctgcaggggcgacctcttgatcggaaaattttagatttcttggtatcaacacttcgcctccctcagggcctctcctcgtagttgggtaaacagctctgtctcttgactggggacacctgtcccattttcccaggactgttccaatttcactgtaaaaggaaaaaaaaaatctgctccctgaataggaaacttcatccagcaccttgtgcctagttctgactctggctgaagtggaggcagcccagctgctctccctcagcccctactctgaccctaaagaggtcagacgacaccctggcatccccattcctgggacctccatgctagtttccatctttcaaagacggttagcttaaggttttccaaactgagaagagcaaagaggggatttacttgccggttagatgtagaataaatccacaaacccaatttccaacacggatgggtgagaagaattactaaggaacctctcttatacttgaggcacattaccaaagttcaaggcaaacagcatccccttcaataagaaacatttgaaaaactatcatgtattttacttgtgccaaaggttagataatacaaacagtgggaaccagggcataagtcaactaagatcccaactgtcgctttctcatgcctacagtcagcatcttcttgtcctttctttctccttcccttcctcccactgtgtttccttctcctcttttcctatttggttctctgctatgttgcccttgctgcctggcctcaggaacagccgccagagctcatgaaaacaattctcattctcagctattatccccacagctgaagaagtgctgattctctactacccggccataaaaaagaatgaaatcatgtcttttgcagcaacgcagttggaactgaaggccattatcttaggtgaaataactcaga

SEQ ID NO: 913470 - DNA, 4001 bp, Homo sapiens
ctaagtcaccactggggcacagggaccaggaaaggcctgcagtagccaccactgccccaaagggagaggctccaaatgccccaaattaagagctccccattctgtaccacccactacccccatatcctccacctccctgaagaccgaactcccttgagcctttgggggccactgcagctacttgcatctcttccttcattcttttgtacctgggcgcttccagtcccccatgcaactccttttctggcttcagcctgacacaaagtccaaccagtctgaaattccaactcctctccaagtgctaaaacgcacaacccccaattcctggggcttcctcaaaagaaaccatggcccctggaggcaccctcaggaagaggtcaagacagggaacactcaccccgggcagacaacttcttggtattgatgatttttgctgcgtactcctgcgtggaggttttcttcacacacctgcggaccacagagaaagcacccctggagggagaaggggaaaagaactgggacacggagcagggcagagtgacacagacacacttcaagtctggggacgatgatgctcccaccaccagacctctagtcacactcacgtacatgcacacacaccggcgctgtgaccaccaccatccaacatgaggcaaaaggacgcggccaccgcaggacactgaacagatgtgggtggcgtgccgcgctcccaccccctcatccagtccctgggcaaggcaacagcctccacctcaggctgcacatcaggagcgggtgggcgatgctgaaaacacacacctgctgcatctcagacagccctgcggtcccggccaagagaaccagggcagaagggagcagagagaccctgcccttctctcagcaggaacagttgaaggtcggggaaggaaagattaaaaagagggtatcatcccctgaaagagaaatctccctcaaccatggggcaaagtgaggctcaaacccccccacagccggtttcatctcactgcatcccggctcaactgacagcaagggaagagaggacacagtcagacatcaagaactccccttcccatgctattttccttgacgtccccgtcaaacgggagctcgcactctgagctctggaaacgtctgggggggcgggcggggcgggggctgcagtggccgggctcggcgccgcgggtgggggtggggggccggggctgctgcagcggccagctcagtgcggaggggagggggatgctgaggctgcggcgcggctcccgggaccactgcaggggtggggggaggggacgggggtgccgcagcactgcccagccgcggggctgggagcctggagcggcacccgcggggggcggggccgggcgccaaacagcccccccacgcccgggctccgcagcagagctagggctgcagggctggggagggtcctgagtgcgaggcgcgtgggacctgggttcagggtgcggagtgagcaaccgggcagcgttgggaggtggtcgggaggggggcgcctgaagggtgcggaggggcggggctggagggcacccgggagcggtccggggtctgcggtgtccgcggcggcgcgtggggagcagcggccccgccagttgctgcagggcgcggagggggatgcggggcagtgcgcggggggcgcggggaccgaaggcggcgggcgggaaaggcgggggtggggcggccgagggggagccgcagcggccggtgcagggccggggggcggggcgagaagccgcatagctcccgggcggcagggcaggcaggggaccgcggcgggcgggccgtacttgccaagctcctcgaagagctggtagtcgtcggtgaaacgggtgcaggtggcggtggtggccatgctggcgggcgggcggacgcggcggtgcagcccgcgccgacgtcggtgcacagtcaccgccgcccggccgagggagcaagaggaggagacggggctgagcccggcagcaccgcgagactttaccggggagagcgagggagggagggacacccccgcgccgcccgccccgccccgcccccaggccccgccagtccccccccccgcccggcccccggcccgcccccggggaggggcctcccgccgccggccccgccccgccccggagccgccctcgctgggccaggcgcgcggggcagccgaggggagggggtccccgctccgggccacctgtctgggcagacggagctggaaggttcgcgacttatgggcttgtcccggggcggaccccgcgcgggctcgggaacgtgcatgcgagggtgcatgtgttaggagtgtaggagtctggaccactgacctctctggacgggtcctacacgcgggtcccgagcccccaaccgggctcctagcacgtggggagagagccaaggtcaaggagcctgtgccaggctgcacgcccgggaggcgcccccagcctgcgcagagccagctgccagccgccttccctctgggagctgacagtctagacttgcgcaagcaccagggccattattagaaagaaacccttcaggcgcgggttgatcagggagaccaggccaggggcaaggatacaggtaggactctgccttcctgcaccataactgcagagatgaaagagtattctctatccggccagaaatgaaaggggtgaagtaggaagacttgaaaaggctttgtgcagtgggggctagaagagaaagtggaagaaaggggaaatccccattttcttgcaaggcaccctcgtacttttattttctggcacctaccacattttgtagtgatgcattgactggtataaggggcagtagagctatctcatagctgtctaagcgtgaacttgcatcaaactgcctggattggatttctaggcaactcactgatcagctctgtgacctggggtaagtcactgaatcttttttttgagacggagtcttgcgctgttgcccgggctggagtgcagtggtgcgatcttggctcactgcagcctccacctcctgggttcaagcgattctcctgcctcagcctcccgagtagctgggattatgggcgcgcgccaccacgctcggctaatttttttgtatttttagtacagacggggcttcattatgttgtagtaatgaagtatgtatgtagtacatacatgaagtaatgaagtatgtatgtagtacagaggtggcttcatgagccacctcgcccggctgggaacaataatattacctacctcataggcctgtcagcattaaatggtctaaggcacttagaatagtacttggtgcctaattagaactacatttgctgggccgggcgtggtggctcatacctgtaatcccagcactttgggaggctgaggcgggtggatcatgaggtcaggagttcgagaccagcctggccaacatggtgaaatcctgtctctactaaaaatacaaaaactagcttcccgctgaattgtaggctccaataaagcggggcctctgcaccttttgttcaccattgtacactcagcccctgaccctcagtaaatatttgtgggatggcagagggagataccatcccttctcctgtccccaccatcacaagttggtgggacagaggcacataactgtcttgatgggggacaaacaggctgggcaggttcctgacctgcctgggcagctgtcccctgaggctgaggccagccccaactgggcagggtggagctcagccagaggctgccactcagtcttgattacagcaggacgcccactgggagtcgggtctccctcgccagcaggctcgctctgccagaggagggggctgagaggtgtcccagcctcccaagctgcctccctgaggggtgggtggggcagagctctccaggagtgctcccctcctgtcctgacccaacagccctgagagctgctttgggaaccagactgcccagtaggggtgattagggaatgggagggcatgaagccctaaaggaaaagcattagcagttctcttgggagaagggtag

SEQ ID NO: 913471 - DNA, 4001 bp, Homo sapiens
gggggctcgggaggtgcgcgagacaaggttaccctgcgggtccgccactgcccccggcctccagcactgcactgcccacgagtttgcggggtgtgagcgccgaaggagaaccccggaccgcccagtctcagcctaaaaacttggatccaagagtcctacggttgtggatgtgccagtcctccgcgaccctttcctgctggccttctgctttttataaacgaaaataaaagtttgatttaggcttaaagaaatgtcattctggtcgttcctccctgaagcgggacttactcaacctcatatactcgcccggaattttcaatctcgcctgtcgaaatcgctagctgcgcatccgcggaagaagtcctggatgagaggtagggtgaagggatcaagcagatagcagcaggcatcagcacactccggccgttccggacggtcaggcccgccgctacagggagaagtgcggcggatggagccagggctgcgggttgcgcgcgggctgggaacccggtggtgccaccttaagagtcgggtccgcgcagcggctgcggaggcgcccggcacctgcagggggcgctgctgccccgtggtttctcccgcgccgccgcgtgcagcgggcctggcagctccggggccccggtccccggagggggtggggacgctgggggaggaagggagcgaagtgcagccgttaggtaacgaacccgaaccctcccggattcagaagcggcctcagtgaggcgtttgctggagggagctttccatcattcggccgcgagaggaaacgtggggaggcgccctcccctgcccccaccgcctgccttcctgcctccctccacctccgctccccgaccccgaccgtgcttcccagaccctttgttctcgaggttgggaacggctgggtgggggttccccggggaagaggtcccccgcgccgctcggaggggaagggactgtcgcctgccccgcaccccagccctccccagtgccgtccccctttcccccggccccttccatcgcgtccacgcgcttccgttctcactcggactcccccaactcccgagctccggctccccagcctgcacggtctgcaagcccgcctcccttcccacttccccgccacctctgaggtccccgggaagaggggaggagagggagacgtgtgggggaggagaaaccacagagccttctcggcgcggagcattcccagggacccttccaggccccgacccctgggacccgctgcagaggcagggctttcccggcgccgccgcaggtcgctagggccgcccccgccgcgtcgccctggggcccacgggtgcacggcccgggcagcaaggcaaggtgcggcctctcagcgccaggacccgagacccccagctggagagaaggggacaccgtggtccgcgccctggggaggctaattgcacacgaacgcccccctcttccccgccccccaccgtaccctctgcagcgccacccgcgtcgcctctccgccgtgcgccaccctgagggctcccgcgattgcatcttcttgagcacagttaccaatgcgttcagcttcgtttcttactcggatggagacatcgcggagggaagcgaggggacagggatgcggtagtaggggaaaggtggggcgggaaaccgagcagagaggtgggagacttggctgaggcaatggcaccaggcagggccgcccggagtcccgagtccaggtccgcgaggcaggccccggtgcagccgcgccccggccgaaccctacatgtcctctgtactgtggacacgagtccgcggagcgccagtcacacccccgcacccctgcaagctcccgccgtagagggggctcggcaccatcctggtcacaaagtacgtgcccccaccccccacccccaggtgaagaggacgcagcccggcgccgtcagctccaggctgcctggagccccctccggcctctcggcgcgaccctggtcctcaatggctcgtcgcgagctgcgctagctgctctctcggcagcgggttccccaggacacacccagtccccaccccccgagagctggcggccagctcaggatgccaggcggccaggcgggcgccctgccaaattccgcgttcctctccaggagacggggagttgcgtcccaggctcgggaaagcccgcagttcgggcttgggactcgcttacaaagccccccaaggcgccagggacgcctctgcaggttgaattcctgctccgtatcacttcaattttaattaatcttttaaaacaccgctgtcacgtcgcttgcagaaaattaatcaaacttgaatccttgttgcatagcaagaatttcgatccgagtcttttaaaaaggacttgactttgcaaagtcacgtcttttacagttccctcattccccctttagcaagggaaatactgcaaaagtcaagacatgtttgtttggttctttctatcttcaaaatgaaactttgcttatttctgatctttattttcctgtctttgaacaaaaaaaaataacgagataaattgcctacctcgattaattcaaagtataattactttgaatgatctttgtttaagagcccagataaactaagataatcttaattttaatgtgacacgacccctatttttccttgtgaataatgagaataaagcagtcattaattaataccaagatatctccatagaagatggtatctgttctcgctgagacactgaaacatcagttgtattagtaattgatactgtataattgaacatgaagatagccgtctatttttaacctccaagctcagagtttatttggtgattattgagctcctaataattaatttttttccttcttactgcataaataattcttacgactcccagttcccatgcaatgcagaggcttctcattaaaacctacccctcaaaatataagattgtgaagctatattgtgcagcaactccttctatttcattatttgtaacatatttcctctatttcatatcttcctggtgcatttcctttgctgtgattttcctactaaatctatgagaatataactataacatcttttaccatagctttgtctttctgtgatctcttggttcagtttaatacacaatacttaagacttcaatttttcaagttactaaaatttgaggatgagttccactgaagaatcaaaaatacttgtatagtgaagttgccatggattatattcccaacctaacacacagtccactttaactcacacttttctgttgttaaaaatagactttgctcaaacacattccctttttccaacttgagttgaagagagttctcacaatttcctgggttaaatgtacatgctaacacaacctttgacattaaaaaacaaattcccctcccgcgttggagagaagtcttccaaacagtcatggaaatttagactgtagctttaaggtatctaattatttcttagcctcagttattttggggcatcagaatgatcttcactttttaagtggaaatggttatgatatttttctcatacatacaaaaaactctctacttatttttccaataaagtgtctcccaagtatgacatgttgtataccacacaaatattcttagtacctccgctaccaaatccatgcattttccctgtcagtgctctatctaaaattctggaaagtatagagggtttccacttttatttcccccttagtacaattaaaactttaggtcaatatataacggagtgattctctgcacttggattttatattttcccactataatttggactggaatgggattaaaacagcatctagagttctaatcttggttgatgttttggtgtattcaccgtaatgagtcctattctctggggtcatgaagctcccaaatgtcaatcaagcaaacagattcagaaatgccattgttcgactcccacgtcactcgccttcctctcattttatttaacaataccggagttctctgatcagtcattcggaatatgaggca

SEQ ID NO: 913472 - DNA, 4001 bp, Homo sapiens
aatcatttttttaatcatagaaaaatgtcaggtacatggcaggcaccaaatccatttttctttataaatctaacttaaatgtattttcaaatccttcagccccttcaataaactgctgtccaaacagcagaaccaaggagacccaagagggtggttgagaaccctgagatctggggctgaatcagttcttccacatattagccatgggacctcagaaaaagtgctcgacctctctaagcctcagtttcctcatctgtaaaatgggaaaacaacagtacctatgtcacaggtggttgggaggatgaatgaaacaatgcatgtaaaatgctaggtggcacaatctaaatagtcaagaaatattcccattatcaccactgcccacgagactaagataatatgcaactgtcaacctttgccgatatttaaaaaccacatccatattttaaaaagattttgtagagactgaaaaaaagttcctgtagtgattatttctaaacatgttgaacaggagcccacatgttggggcaactggtacacagctgggtaagaagtcactgcccagctattgtctgaactttttactttcatgaagggggaaatggactgcagctgcttcccctgaaaagtgacatcatacaatttgtgactcacttcttgcccaaataaaaatcttcctaaagggcacacagagaagacctgaaaacctccccctcttgcctctagcagctgggagggggaaagggaggctctgctgggcactcaagcgctccgctgcgtcacccaaggctcatggcactgctagaccagggcctttactttgctattgcagaaactttagcttcttcagagacgttaagtaacctgtccaaagccacacagtttacaggtggcagaaggtggactgtgaatctaggcaatggcggtaccaagggtgaaggtcaggccggcgagacccaaaaggaggaaatagcctgtaagttgagacaacagggagggccacgtcaactagcccaggagcccagaagttcaagaataaagatctggaaatgatacacccacaatcacccacaagtaattttactgctccataaaccgcaaagctgtcacctggagcctaacactccacacgtctaaatgtctcctgcctggtttccacctcctcaaggtccctctaagagccctgcagcaaggacgctcagctccagtgtactcagacttgacagagccactgccgcgaaacgcgtaccataatcaactctgtccatccccgccaacagtctgcggggatcaccgtggttcccatttaacagagagagggttgaggtcccaccgccggcaggcaaggggtggggaccggaacgcaggcaaaggagccctcgctgttagccgctgtgccagatcacgagccctcctctcctaaatctcgaatagtacgaggtgtcccctagccccccggctaggagggaagggaggacaagctgagcaaggcaagcgatggagagagcggaacgggccctcttcccaaagtttcagcgcaggccgtcggggccactcagtcccactcaaccaggctcccctagaccacgctgggggcgcaggggggaactaggaagccggcaggaaggagggaggcaaggcgcgcacggccggcgggctggagaggcgccggccgaggtgggggctgcagttaccgttcccacggcggtagggcggctgggactggcacagtctctctccgtcgctccgcagcaagggtctggggcccctttagcgaaagcgaaactaaaagtctcggcgctgcggagggaggagccgccctgggtagggccgggcggggcttgcaccgcccctggctcggggtagtgcgctccgcaggggtggaagagcccaaagcgacccgtgtccccgcacgcatagtccctggagggcgctctctgcaaagctggccgcgcgctctgccaagttggcccctcgctctacaaagttgagcccgcgcgcgggagaacgcgcacagcaaagtttgcagtttcccgggacagccgagccgccgcgggttgttccgggaaaaaaacaaatctgccaaactggccgcgctccaagtgacccaaagagcgcagatttcgcggcggcgctcagtgatggggcgctcgtgtggtcacctccacttccccgcccccagtgtacacctcgacctgggccttcacatcaactcggagacccctttcccatagccagaggctctcccctagcgaaacctggatcccagctggaactgctggcgtccccctgggggactccacgcctacattagcatgcgtaccccacaaggctgatccgcttcgggcccgctgtggcatccactgtggtctcctagacgttgctttgcggggggcgccctcctgcgcgcgtgggcgtaggacgctccctcagctttgaaggaagtacccacccagcagcccagcttgctggtggagatgctgctcctggatctttcgggaaatatttgttgtgcgcccccgtgtgtcagggactgggtatgcggccgggagtcagtcaaacacgggagagactgagcacttccacggattctagttcaccccaaccccacagcatacgcacacacacacacacacacacacacacacacggacacacggattccagttcaccctgaccccacaaaacacacacacacacacacggattccagttatccagttcaccctgaccaaacacacacacacacggattcccgttcaccctgaccccacaaaagacatacacaggcattccagttcaccctgaccccacaaaagacatacacaggcattccagttcaccctgaccccacaacacacacacacacgcattccagtttaccctgaccccacaacacacacacacacggattcaagttcaccccgacccaacacacccacacacaaacacacagattctagttcatgaaacccaccacacacacggattcatacacacacacgcacctagttcaccctgaccccacaacacacacacacacacacacacacacacacacacacacacgtctttcttcaccctggctcagggaagcaactaaactcaatcacactgaggtgtaaaatatctgagaagaaattgtagttttattcatatcagagacacagtatttacttttaggaaccaccaaatccttgcgtgaatggagtacatgcttagtggtcggataccaggcaagaacgccatcttctctttctgtttgcttgctttcccgtgggcctgagacttcagtatttgtcgctcaaatctctccaggtgaggatgcttccttggtttgaaaaaaaaagactgacccctggcaagtgtaagggaataattataattgattaacttacgggaaaatcctgaatccctgaatatttttaaccagcagtgacacaatttctaatgtggctgccctagtctttttttaatacccatgttcccaaaatgttggaggtaaagtaagccatttagacgctaagataatttgctttgtaaagaaattcaaggccaggcgcggtggcttacgtctgtaatctcagcactttggaaggccgaggcgggcgtatcacgaggtcagaaaatcaagaccatcctggctaacacggtgaaaccctgtccctactgaaaatacaaaaaaattagccaggcatggtggcgggcgcctgcagtcccagctactcgggaggctgaggcaggagaatggcgggaacccaggaggaggagcttgcagtgagccgagatcgcgccactgcactccagcctgggcgacagagcgagactctgtctcaaaaacaaaataaaataaaataaaataaattcgattgtgagtcatctgagaaacaaagaatactattagtaaagcaattaaattactctttgatttatctaatttgtaaatctaggatcttgcaggttattcctgaaatatagtgaatcagtgttagaactaaaagagg

SEQ ID NO: 913473 - DNA, 4001 bp, Homo sapiens
ggagcccacatgttggggcaactggtacacagctgggtaagaagtcactgcccagctattgtctgaactttttactttcatgaagggggaaatggactgcagctgcttcccctgaaaagtgacatcatacaatttgtgactcacttcttgcccaaataaaaatcttcctaaagggcacacagagaagacctgaaaacctccccctcttgcctctagcagctgggagggggaaagggaggctctgctgggcactcaagcgctccgctgcgtcacccaaggctcatggcactgctagaccagggcctttactttgctattgcagaaactttagcttcttcagagacgttaagtaacctgtccaaagccacacagtttacaggtggcagaaggtggactgtgaatctaggcaatggcggtaccaagggtgaaggtcaggccggcgagacccaaaaggaggaaatagcctgtaagttgagacaacagggagggccacgtcaactagcccaggagcccagaagttcaagaataaagatctggaaatgatacacccacaatcacccacaagtaattttactgctccataaaccgcaaagctgtcacctggagcctaacactccacacgtctaaatgtctcctgcctggtttccacctcctcaaggtccctctaagagccctgcagcaaggacgctcagctccagtgtactcagacttgacagagccactgccgcgaaacgcgtaccataatcaactctgtccatccccgccaacagtctgcggggatcaccgtggttcccatttaacagagagagggttgaggtcccaccgccggcaggcaaggggtggggaccggaacgcaggcaaaggagccctcgctgttagccgctgtgccagatcacgagccctcctctcctaaatctcgaatagtacgaggtgtcccctagccccccggctaggagggaagggaggacaagctgagcaaggcaagcgatggagagagcggaacgggccctcttcccaaagtttcagcgcaggccgtcggggccactcagtcccactcaaccaggctcccctagaccacgctgggggcgcaggggggaactaggaagccggcaggaaggagggaggcaaggcgcgcacggccggcgggctggagaggcgccggccgaggtgggggctgcagttaccgttcccacggcggtagggcggctgggactggcacagtctctctccgtcgctccgcagcaagggtctggggcccctttagcgaaagcgaaactaaaagtctcggcgctgcggagggaggagccgccctgggtagggccgggcggggcttgcaccgcccctggctcggggtagtgcgctccgcaggggtggaagagcccaaagcgacccgtgtccccgcacgcatagtccctggagggcgctctctgcaaagctggccgcgcgctctgccaagttggcccctcgctctacaaagttgagcccgcgcgcgggagaacgcgcacagcaaagtttgcagtttcccgggacagccgagccgccgcgggttgttccgggaaaaaaacaaatctgccaaactggccgcgctccaagtgacccaaagagcgcagatttcgcggcggcgctcagtgatggggcgctcgtgtggtcacctccacttccccgcccccagtgtacacctcgacctgggccttcacatcaactcggagacccctttcccatagccagaggctctcccctagcgaaacctggatcccagctggaactgctggcgtccccctgggggactccacgcctacattagcatgcgtaccccacaaggctgatccgcttcgggcccgctgtggcatccactgtggtctcctagacgttgctttgcggggggcgccctcctgcgcgcgtgggcgtaggacgctccctcagctttgaaggaagtacccacccagcagcccagcttgctggtggagatgctgctcctggatctttcgggaaatatttgttgtgcgcccccgtgtgtcagggactgggtatgcggccgggagtcagtcaaacacgggagagactgagcacttccacggattctagttcaccccaaccccacagcatacgcacacacacacacacacacacacacacacacggacacacggattccagttcaccctgaccccacaaaacacacacacacacacacggattccagttatccagttcaccctgaccaaacacacacacacacggattcccgttcaccctgaccccacaaaagacatacacaggcattccagttcaccctgaccccacaaaagacatacacaggcattccagttcaccctgaccccacaacacacacacacacgcattccagtttaccctgaccccacaacacacacacacacggattcaagttcaccccgacccaacacacccacacacaaacacacagattctagttcatgaaacccaccacacacacggattcatacacacacacgcacctagttcaccctgaccccacaacacacacacacacacacacacacacacacacacacacacgtctttcttcaccctggctcagggaagcaactaaactcaatcacactgaggtgtaaaatatctgagaagaaattgtagttttattcatatcagagacacagtatttacttttaggaaccaccaaatccttgcgtgaatggagtacatgcttagtggtcggataccaggcaagaacgccatcttctctttctgtttgcttgctttcccgtgggcctgagacttcagtatttgtcgctcaaatctctccaggtgaggatgcttccttggtttgaaaaaaaaagactgacccctggcaagtgtaagggaataattataattgattaacttacgggaaaatcctgaatccctgaatatttttaaccagcagtgacacaatttctaatgtggctgccctagtctttttttaatacccatgttcccaaaatgttggaggtaaagtaagccatttagacgctaagataatttgctttgtaaagaaattcaaggccaggcgcggtggcttacgtctgtaatctcagcactttggaaggccgaggcgggcgtatcacgaggtcagaaaatcaagaccatcctggctaacacggtgaaaccctgtccctactgaaaatacaaaaaaattagccaggcatggtggcgggcgcctgcagtcccagctactcgggaggctgaggcaggagaatggcgggaacccaggaggaggagcttgcagtgagccgagatcgcgccactgcactccagcctgggcgacagagcgagactctgtctcaaaaacaaaataaaataaaataaaataaattcgattgtgagtcatctgagaaacaaagaatactattagtaaagcaattaaattactctttgatttatctaatttgtaaatctaggatcttgcaggttattcctgaaatatagtgaatcagtgttagaactaaaagaggcttttacaactaatctctgttcattttataaagaatctgaggctcagcgaagttgcccccgtcacagatttgctagtggcagaagtagaatcaaattgcctttattttattttaatttttattatactttaagttttagggtacatgagcacaacgtgcaggttagttacaaatgtatacatgtgccatgttggtgtgctgcacccattaactcgttatttaacattagatatatctcctaatgctatccctctcccctccccccacccgcaacaggccccggtgtgtgatgttccccttcctgtgtccatgtgttctcattgttcaattcccacctatgagtgagaacatgcggtgtttggttttttgcccttgcgatagtttgctgacaatgatggtttccagcttcatccatgtccctacaaaggacacgaactcatcattttttatggctgcatagtattccatggtgtatatgtgccacattttcttaatccagtctatcat

SEQ ID NO: 913474 - DNA, 4001 bp, Homo sapiens
atgctttgtgatctcagtcccagcagcgaataaaagagttactgtctgcttggaaatcagctgctggagtcgagcagatcatcagctaaacaactgctattggacagaagaaagggcctcaagggctcccaggagattgtgctaattaattagccaatggcacaaagaaggcaacagtccatagctcagtccagcaggttctcccaggggtgggagctggggagggaaaaagaaggaaaataaaatgctttcaaaggtccagattagaaacttcttcagctggcaatcatccccaaagacatgattttctaaaagtggctgttgttgtttctccaggttcctaggacctcactgcagaagatgctgaagcatgtgagaactgctgtaccccgccaaacggaggggcaggaggaaaaggccactgagattctttcaagtccagatcaacgggtatgagtctttcttccgaagctgatgaacgacacaaacggtggaggaaccacttcagatattttttaagtcaccatgaagaagtatgaatatttttataggcttatgctttacaaattgaattaacaatcattatcccactgattctgcaaagtacagatgagaggcaaagaaagacaaggcaaataaaactggccagggtagtttttcctccagagtttgtcgcttcccattctatccatcctcctctttttcctctctttgctaactgctgatgcaactacctttactttggccccgtttatattcggaagacttttactaagattactttgcgaagaaacataggattcttgttttggaacctgccattaagtgcaaagtccaagataaaccagagcagtgaattgaaagttctaaatccgcttaaaagcttctgtgttccacaattcactgcagatttaaaaaaagaaacctggctactaaatcactatgcttagagccagacaagcaagatcacaacacactacaatatcttggtagaatgacttattaagtgcacttaagtgtacactaaaatgcaaaggaaagttaacacagcaggttgaacccagtgcttcctaaccatcccatctctttcttcatgttgagcttcttcgccagtatgggcaagtaccactatcttcatttccagatgtgttcagataagcataaatctctgctaggaacacaaataatgccagcatcaactatcaggaaggaaccagagtgtcctaacttcttaggtagagagccatttcctgcaacttctaatttcacagtgtgaggtcaactcagtcattttcactacaacagtcaagagtcaaaaaattataaccaagctctcatgattatttagataaaaagacatccttgaagagcctacagcaacttgtatcagaaaacgttataggataaaaatattctgcctactttacaaagaagtgaaaaaccttagaaagagtacaatggatttttacaatccactccgggtgcaagtgtaattttccccatcactggagtggataaatacaggttttatcctcttatggatcccctgggctactcaaaatgtgaattatgcctttctatatttggaaaggaatataagcatgcaagaagcccactgcgattaattttctaaagcatcaccatgaataggattcccagtagctctatctgcctgcagacattcatcagcatgaaagtaaacacaccaccaggctcacatttccccagagctgtttcattcggaactagagctctggttttcgtagccactttgtctaaatatttttgggatgattcattcatggtctcaacatctcaacagagggcatccccacagtcctaacatattaaggcacagagcaagacagagaagaaaagaaagagtgcaggtagtagtacctagtgtctccatctgaaaacagtcccctctgcatcagaactaggctgtgctctgcgacgacaggaagtgagtttccttcttctctgtaataataaaaactcaacatgctcggagctcagcaggggatagaagactggcacaggctgcctggccctgaaggcctgtgactgaatcagcagtgaactgcacgctggagttttccacaggaccattcaaactcgggctgggaaggtcacactggcctctcccttctctgctgaccggcagaaatgccccggctccccattgtagcatcccccaaccctgggatggctcctgtggaaaaaagcaactgtctgtgagcgtggggtccaaaggaaaaaagaaaacaaaatttccataaacatgcagccaggagcacaatctttaagagtgaaaaattgggaacgacaggggaatagctaagcaagagacagagtatcaacagaacaaaccatcatacagttcaagttgatgagcatcacacatggtcaacccaccgaagtcccaaatctacaccaggctgcaaaacggcactcacatgacggcaaaacatgtcaaactatatgtaagttaatcaacaaaaacaggaagtgagtgtgtggtgaattaaagagttcaagttcattaggttatgtttttcctttaaaggtactcaagtgaataaaaataataggagaccacggaagcataccaaagcccttcatttttaaatgaggcatacaaacatttttcaatgatcttgcataaagtgaacgatccaggagttgctgtatttccccatctcaaccctccaaatgcaacaaggaaaatgcaaacacataaaaaccaaacacttataaagtgaacggctcagcaacgcttttctccatttcttggttcaggaccacagtctagaaagggtatgaagctgatacaatgaggttatgacacctgctaccctgcacaagcctcttgatcacctgccatcctcaggtctgtgaacaggagagaaaattcgctctatacatttttttctctgaaagtcagttgcaaaaatataaacatggggaagcaaactcagtttaaaagaggctaaggagaagaatagatccccctccccaaaacataccaacctccacatttccctctttcccctaaaaaaaaaaaacaaaaaaacaaaaccagtagggtccctgacaataaaaattgacaaatgactttaaaacaaatcatccagggggtagaaaaggctgaattgtctttaaatagcctaatagactgaatggaggatacaatacgtctgtattacggctgcagggtccagcattagaacagctaacatacttcagtccttaatcactccacccatcttttccccttaaaactgaccattggcgggcagggtggctcacgcccataatcccagcactttgggaggctgaggcaggcagattacctgatgtcaggagtttgagaccagtctagccaacatggtgaaaccctgtctctactaaaaatacaaaaaaattagccaggagtggtggcacgcgcctataatcccagctactcgggaggctgaggcacgagaattgcttgaacctgggaggtggaggttgcagggaggtgagatcacaccactgcactccagcctgggcaacagagtgagactctgtctcaaaacaaaacaaacaaaattctcatcatcacagatccttgagagaaagaaaaccagcagctcaggggttaaacatgcaatgccacgctcacatttcctgtctgtgatcacatgttcatgtgagaagcaactggttatgttttcatagtacttttctattactaggcttaatttttctctgctaatagtgttctaggtttctattactgtgaaaagctgatgatttaccttaccttttcactttaatttatcccctctagaagagcaataactgaaaagaactggaggtatcccacacatgcagaagctacagctttgcagtttctagacctctgcccacgttttggtgtcctgtgcttgctgctcctgaaacgtacacttggccctcttcactggaaagcccactgctcgccctgctgggacagc

SEQ ID NO: 913475 - DNA, 4001 bp, Homo sapiens
atacagtatatttcttctaactctaatgtctacattaatattccaaatatttgcaaacacacatgaccacacattttacatttacaaacttttcaaacaaatacattttatatgttaattatttaacttgatattatacaatattatataacagatttccctttaagtcaataatttccttcacacacaaagaataaatagttcaagaaagcaagtgtcagaaaacaaggcaaagtgagaggtacaagattcagacaggcagccaaataacaagaatatctgtttaggaactctggccaatgactctgaaaatataattgagcctatgttgaatctggaagaacaaatttgatttctgctaatagcagaagttccatagtatctaagctaacaaaattctaaggtgtgcttccttatagttcccctacccctaatttgaaataatggcataaacagggtctccctttccttgcaaatcctgtttaggatctgaagcctttcactttcagaaggggtggctgggatgtgaatgtttatatagcctccaagatgtcatcacatatatgcaagtgattatatcggttcttctgagttcctttagcctttgttagtggggttatatattaacataggcttcagataaagcatagaaatcctataaaatcatataaacgatgaaaacatgaaatataaaatattcgtaggaaattatagaaaataaattataaaaaaatataaaatgatggctaatccacgacaatcctgctctatgtgtatgaataagaagtaaattttcccacctttcaaaataaaaagaaacatattatttgaaaaaatgtttagatgtttaatagctacacatacctgctcatgagagaaatttatacccagcagtaaagcatagcaatactaaaggaagtggcaatggaattagatccattttactgggtctgtgtgtgtgtgtatgtgtgtgtccctaaacaccacataaaggattattctagtctatatctgttttattccttcttggtagcaagcaggaacataggtgtatatttctttttggatttaaaaatctgatttattaactattttaactaaaaatacttttatatacaggaatgttattgaaaaagatatcctcactcattcttcagaaaatgcgatggtctaaaattttaatgcaagttgacatatgttctaaagtaaggaaagtaaaggaagaccactatttattaaagaagatttttttaaaaggacataccataaaggaaaggactggtacagtttaaaacttcttttcatcaaaatgcatcataaagaaaatgaaaagtcaagccattagggaaagatagttttaacacatataactcacaaagggctggtatccataatatatagagaattgctttaaaaaaaataaagacaggccgggcacggtggctcacacctgtaatcccagcactttgggaggccgaggcgggaggatcatgaggtcaggagatcaataccatcctgactaacatggtgaaaccctgtctctatcaaaaatacaaataaattagctgggcgtggtggcaggcacctgtagtcccagctactcgggaggctgaggcaggagaatggttcgaacctgggaggcagagcttgcagtgagcccagatcgcgccactgcactccagcctgggcgacagagcaagactccgcctcaaagataaatatataaatacattttatttatttatttatttatttattataaataaataaagacagacgaaacaatagaaaaatagagaaaagtatcctttcggctggagcagccatcttccagtaattcgccaaaatgatgaacgcaaaggaaaagaagaaaggcacctgatgtatgttctctaggccttttagaaaacatggagttgttcctttggccatgtatatgcgaatctataagaaaggtgatattgtagacatcaagagaatggatattgtttaaaaaggaatgcccacaggtgttaccacggcaaaactggaagagtctacaatgttacccaacatgctgttggcattgttgtaaacaaagaagggcaagattcttgccaagagaattaatgtgtgtattgagcacataagtgctctaagagctgagatagcttcccgaaacacgtgaaggaaaatgatcagaaaaagaagccagagagaaaggtacctgggttcaactgaagtgccagcctgcttcacccagagaagcaccctttgtgagacccaatgggaaggagcctgagctgctggaacctactccctataaagtcatggcataattggtgttaaaaaaaaaaaaaaaaaaaagacctctggactgtaaaaatgtttctcttcattgagaagaagtgtggtgtcctctctctcaaataaatatttaaagcaaattttaattgtgtcctaatgcattatataatgtctttactagtcaaatttaatgtatttcttgcttagatgtgaggtggcttattgtgcaacaaattactcaattggttagaaaacagtcagatattatttatgaaatatttgtactggtttgaagatagtccctctaaatcatcatggaagaaataaaataatttccaaaaagaaaaaaaaaagaaaaacagacaaaagtaatgaaaggtcatttcacagaaaagaaaataccaatgaccaatgaacctatggaaagaagctcaatgtggataaataagtaaactgtgatacatccatataatagaatattatgcaggggtaaaaagaagtaagcaatcaagctataaaaagacatggagaaaacttgacaggcatgtttttcatggaagaaagccaatctgaaatggctccatactgtatgattccaactatatgactatgatggctaattttatgtgtcaactgggctgagacacagtttctagatatttggtcaaacattattctagatgtttctctgaaggtttttttgtttgttttttgtttttttctttgagacggagtctccttctgtcgcccaggctggagtgcagtggcgcgatctctgttcactgcaacctcctcctcctgagttcaagcgattctcctgcctcagcctcccaagtagctgggattacaggcatccaccagcacagctcaccatcttggccaggctggtctcaaactcttgacctctagtgatccacccgcctcgacctcccaaagtgctgggattacagatgtgagccactgcacctggcctctgaaggtattttttaggtacagtttaagccagttgactttgagtaaagcagataaccctccataataagggtggaccttatccaatcagttgaaggccttaatagacaaaagactgacctcccctgtggaagagggaattctgccagcagatttccttcagacttaaactgcaactctttcccaagtctccagcttgccatcctaccctgcacattgtggacttgccagcctccacaatcatgtgatccaattccttaaaataaatttctctctctctctctctgtctacatcctattgtttctgtttctctggagaaccttgatgtacacaatgacattctttaaaaggcaaaactgtgaaggcagtaaaaagatcagtggttggcaaggttccagggggagggagggatgaatagacagagcacacaggatgtttaggggagtgtaaccattctgtgtgatactataatggtagatacatgtcactgtacatttgtcaaaacctatagaatgtacaacaccaagagtaaaccctaacgttaaatatggactatggttgatagtgatgtatcaatgttggctcattgattgtaacaaatatcacacaatgcagatgttgatgctgagggagctgtgtgtgtgctgtggtgagggcatttgtgggaactctgtacttcccatccaattttcttgtgagcctaaaattgctctaaaaataaagtctcttaatttaaaaaaaa

SEQ ID NO: 913476 - DNA, 4001 bp, Homo sapiens
aaaaaataaataaataaaaataaaaataaataaaaaaataaatgtttggggaaaaaaaaaactacaaaactgtccaaactactatgtaaaacagcttgttagttgatctatggatttttaaaggagcttcacagagaaagttaatgaattcacaatttgcaaacactttacaatatcagaatatcagaacagcctaattcatgttgttttgttttgtttttttgagacggagtatctctctgtcgcccaggctggagtgcagtggcgcgatctcagctaactgcaacctccacctcccgggttcaagggattctcctgcctcagcctcctgagtagctaggattatgggcgcgtgccaccaggcccggctaattttagtatttttagtagagacggggtttcaccatgttggccaggctggttacgaactcctgacctcgtgatccacctcctccgcttcccaaagtgctaggataacaggcgtgagccaccacccccggccctaattcacgtagttttaacaagtcccccacaaacaattacagtacatgtatttagaagcctgacctggctgtgatactgcagtggctgtaaactgagtagcccatggcggattcttctgtcctccaaattgagccatgatgcaaaaggaaaaaaaaccttcccttgtttgtcttctatagcatcgatctatcaagaaaaggatccacattttaaagtccaaccaagctacagatatcacaaaaggatattacaatagaaagaaatgtttaatgtgtcgaggacgtcttcgcagatttcagcagaaataacaactgttaagtagaaaaagggcaaatgaacatccaaaatgcagcaaaaacattttacatcaagtagatcaccaaaaatgccctattttacaagataacattagagggagactcagaaaaagcactcctttctgggactacaagttgtcacatttaaacgaagaccatctgctgtatccacccaattgttaacaaaaagttcacaactttatattcacaggaaatacagcctgcgtgtttcttctggcaatgggttggggagtgaggccagggtaatgttaaaaccaataacggatactgggacaagacccccatcacaggtatttaaagatatcatttaaataacgaacatctctactttccaaagtagaaaaggaacctagggggcttcttttccaaccccgacctcgaaggaaaaggccgttgagataatggatgtcccttaaagaaccactgggaaaacccctccccccaagataaaccagaaaaggcgaagattctccgcccgtgcaccccctcctcggccgccacgaccctcaagggccagagctcggccgtccatcttcctccagtcccagctccgtgccggccgccggcgacggaaggcggaacccaccgccccacgacactcgatggctcccgagagccctgggctcgtttaccacgcacggagaaagcctctattccccaagacccacgccgccgggagccgccacgatgtcccgggccggggggccaggagggtaaaaccgcagcggctcgggagcaatggggcggcggactgcagcgtcgccatgccgaggctgaggggcgctgggggcacctgaggagccgagcggtgggggtggggctggccgcgccgggcctgctccgacccgcacaaaagggaccgcgtccctcccgtcccagtcccacaagagccccaccgtcgccgcccggggccgccgggctacccaaaagatcgctcccggcccttccacagattcgacaagatgttaagagacccggcttggccgcccactgctccaactacggggaccagaccttcacctgagtcgggtcccggctaacatcgaagccatttcaaacccgtcagctttaggcgcatgcgccaacttccccctcttcctccacgccgcccccctcctccacatctcccggaggaacggcgcttactggctgacgttctgcgtgcgcgctcccctgaccgctcaatacgcctggccctttcgctacgaaaggggaaatagagcgcgcctaagggttgccttggcctcgcttaacaatgagcggggctatatgtcttgcgcttgctctgaaggaagggctttcctttgggtgggaaggaaagaaatggcggtcacgtgatccgatccagcccgccgccattttatgtttaaccttttttttttaacctcgttccattatttgagagaaaggatatgccccgtaacattctttttttaaattattattatactttaagttatagggtacatgtgcacaacgtgcaggtttgttacatatgtatacatgtgccatgttggtgtgctgcacccgttaagtcgtcatttacatgacgtatctctcctaatgctatccctcccccctccccccaccccacgacaggccccggtgtgtgatgttccccaccctgtgtccaagtgttctcattgttcacttcccacctatgagagaacatgcggtgtttggttttctgtccttgcgatactttactcagaatgatggtttcgccgggcgcggtggctcacgcctgtaatcccagcactttgggaggccgaggcgggcggatcacgaggtcaggagatcgagaccatactggctaacatggtgaaaccccatctctactaaaaatacaaaaaaattagccgggtgtggtggcaggcgcctgtagtcccagctactcaggaggctgaggcgggagaatggcgtgaacccgggaagtggagcttgcagtgagccgagatcgcgccactgcactccagccctggcaatagagtgagactccgactcaaaaaaaaaaaaaaaaatggtttctagcttcatccatgtcctccctacaaaggacaagaactcaaccttttttatggctgcatggtattccatggtgtatatgtgccacattttcttaatccagtctatcactgatggacatttgggttagttccaagactttgctattgtggatagtgccactataaacatacgtgtgcatgtgtctttatagcagcatgatttataatcctttgggtatatgcccagtaatgggatggctgggtcaaatggtatttctagttctagatccttgaggaatcgccacactgtcttccacaatagttgaactagttataccctgtaacattcttaactcgtcttaaaaattgacataaaatttacttaacatacaattcactatttaaaatatcttaaagcacaattcaggctgggcacggtggctcacgcctgtaatcccagccctttgggaggccgaggcaggtggatcacctgaggtcaggagttcaagaccagtctggccaacaaagtgaaaccccacctctactaaaaatacaaaaattagccaggcgtggtggcgcatgcctataatcccgctactcagggggctgaggcaggagaattgcttgaacccaggaggcggaggttgcagtgagctgagataacgccattgcactccagcctgggcaacaaaagcaacattccatctcaaaaaaaaagtacaattcagtggcttttagtatagtcataaggttgtgcaaccatccctaccactacttcaagaacctttatatcaccagaaaaagaaacccatacctgttaagcaacagccccctaatccctgctcttcccagtctcagtcaaccactaacatttctgtgtcttagacatttcctataaataggatcatacaatatgtggccttttatgtgttggttttctttgttttagcacattgatttcagggttcatccatgttgtggcatgtatcagaactcattccattttatggctaacattgcgctttctttctttctctttctttctttcttctctttttttttctttcctttctttcttctttctctttttgaggcggagtctcgctctgtcccccaggctggagtgcagtggcgcaatctcggctcactgcaa

SEQ ID NO: 913477 - DNA, 4001 bp, Homo sapiens
cttcatattacacagtgcttgtttagttcatcactgggtacttaataaatatttttgaataactctctgtccccacccatagcgaggccttcattgtggcacacttaaataatattcttagcttcctaatagtctattcccatcttcccaatcagagctcagaaagatcctcctaaaactaccttttatttttaaagacagggtctcactatgttgcccaggctggcattaaactgaacaactgtcttctcaccttagcctcctgagtaactggaactacaagcatgtgccaccatactaggctacctaaacccacttttactgctccctgatcaggaacttgcaacggttttctgctattcccagatatcagccctttgctttgactagattcctttcccaatatgcactgcacatatctgcctcctccttctgtctggaacgctttcctcctactacttccttctatttgcctcttcaaaattctatccatccttcaagaagccatcagactctcttgcttctttttaaaataacagaacattacaaacgctgcaggaaagagagaaacgctaatggaaaaggtatacttcggacgcaaggcatgtctaaaatgtggtagagacttttaaaactaaaggcaggggcttgtttgaaatttacatgcaattgttatatcaacatagcacacaaattatttatcattcaaaatgtatatactgcaccaactacttattaaataagtggaataatgattcttctaatgacattgtgctcttttaaaaccttaaccatcccacaaaatggacaatgaattcttcattaccttagtttatttagggcaaattcgtcttggaattgaaggtgtcacgggattcagaactttaaacatcaccaggcaacatggaactaaaacagccagcacagagtaacgtgcttcctacttgaaggacaactggttaaacactgaaatatcccccaaaagtcaagttaaggcaggctttttcaagtgataattagtatgctttacatttcaataccttagattccagcttgattttctcttcattcagctcctccgttgctttcttaattttttcacgacatctggttatttccgaccttactgtaataaaaattaaatctttaaacacatcaatctttctaaagtccccattttggtggcgtttgataagccacctttcagttgtctttccctcagcatggcatgcaagctcccctaacggctctgaccactgccttcgggatttccttctgctccaagcacccagcatcagaagacaaaaggccccatgcaaaggacagaaataccccgaccttctcgcatcaaacggcgactctcctccgcctgatgctcggtgaagatgatgtgctgaaacagggactccaagctcatctcagggcctggctcctgcgatccttttctcgcccttaaatattttataaccaactctgaggatcctggaaagcagaataaagaagatggattcttctagaaccattcccagatagacctgtctccaaccctctgtcgccagcccagcaagaagatggagcccgacgccagacggtgtctgaggggtctgagggtctagggacgctggccgctgctgccccttcctgccctcagcctttgtttcccgttacagtttacaaaccgggcttttctccctcacgccctaagagggcagtttcaaggtctgcctttttccctggcggaacccctgactcaggcctccgtccctccctgggtttgtttttcgctttggtggcaaataaaaaggctgccaagaccttggcttttgagggcgtctgggcagcagccatttctgtagtcagcctttcaatcccagtcctctctcattttagggataacgtcctcaaggtgctctgtctttcagcaaaatggtacgtgccaacaaaacccacggccaaaaccttccctaaggctggagccagtgcttcaggtcgggccttgcctgtgagaacttaaactacggcggctcattgggaccatcctgtggggggcaggtttgccctgggcatgtgaaccccaaaggtcttaggcccagttggagtagggttgcccggtatccaaggcgcaaacactgaatattataaagtacaaagtaactgtgattctaaatataaacttttacaaagtcttatactttgacgatggcaaagactgctataaatgtgcaatgtctgacattccgccttaatcattcctttgtaatcagggcatatcttttttgtctgctttaaaattaatcattgccttttgtaatcaagctgcagtaatattaacacttcaatatctgcgcaatatgtgtcagagaccaaagtggttgctaattaaagcttaaacatgaaaggcacctttgggacttctgcgtgggattttttaaatcaaaaattaaaatatttttagttttagtaggttgaaatattgacattataataaacatttgactttatttctgaatgtaaaattggcattggttgaactttaaaaagtaatttgttgttagaatgtatttaaaattaagtaaaataaacatttgactttatgaatgtaaaattgacattggttgaactttaaaaagtaatttgtcagaatgtacttaaaattaagtaaaataaggtaaatgttaattctgtcacatcacaataggcttaattaatatttcattaatgctgcagtctaatcagttatacattttaacctattccaaatttccgccttaatttccatcaagccattgatgcataaaacttaattctttgagtttattttaaaagaataaatactgaaaagtatacaaagcagaaaagaactgcccataatcatgtcatttagaagtacatattaacattttaccaattcccttcaaggtaaccctcctcactcttcatttttcctttataaatttgaaattattgtgaatcagtaataataataatttgttattatttgccaggcactattttgaacaccctatatccttttgagataatttttgctatcaccttcatagcgtagttgaggaaactgaggcacggaacaattaagtatattgccatagttgcgtacctcatatagggtggtgagaactgaaaccaagaaatctggaatcagaagccatgaatttaattttggagtctactattttatcctcttattacatcccagacattttaccatttcattaaaaactcttcataaatatatatttataacttcataatcctccaccataaagaggcatgtgtaaaatttagatataccaaaataagttttactcttatctgttcaagggtgaaaacaaagctgaaattgtggtttgaacagttttctttgagcacttgtttggaggcttataaactgtaccacagcggccatcaaaggaaagggcttccagaagataaattacattactaattaataacactcccttcagaattatttcccatggacttgcacaaggaacgtcatcacaaggaggctggttttcaaaaacatgctgctatttaacgttccaattttattagttacactcaaattcacatgtattatttaacatgctctttctgtgctgaaacctggcagagtaaaatttgggcagtctttggggagtgcagttgcctcacttacacaggagtatggaagaaagagctgctggaaattcaagaaagggggtatggggagaaatggcttcttcatcttctgcagtcttcttcttcacataccagaatattttggtgcttttaaatccaaagttacaatcttctaagaggtatcataactatacacgttagcaggaattttaaattttattttgttttttgaagcgaatatgattcatatgagctcacaactcaaagtttaagtgtcccataataataaaagtgacatattaagataattaaaaatactgctattgtatatctaggtttatttatacattttctgtagt

SEQ ID NO: 913478 - DNA, 4001 bp, Homo sapiens
caaacacaatccatgcatttccagggagaatcttcagtaatcatacgtttgcctattatgctgtaaaaagttttaattcttaatactgcaagattcgtgatctaatatcttcactgcattaaaaataacatgaaaagaccagaaataaaagagaaaaatgaacctagccaatcattactgttttttatttgtgtaatgttggataaagaattgaagttacacagggaacagtgtacattacacacagagatagttcagtttcactatcaatctctcttgaacctgaatccttcccacgagatgaacactcggtaaatattaaggtgtacttgatagttgggaaagccacacccacaactagcatacctaaatagataatagcagattaatttcttctgaatgactaccagcacacctcttgaaaccctgatttactgaacaccttagaagacaacacccggcctatcgttttggaagaaaaaaaagctgggcatcaaaggaacatgacacacatgcagagaaaacggccaagtacctgggactgtactgcgtatttttactatattctctcttctgatttccacaggtaacaagattatcaagtgaaagaagtaggattctaatccagatgttctgactcgaaatccaggactttttcctctaaacaaaatcaagatgggaatattaggtgaagttgttaaactgttaacagctaagcaatactcacacctgcactgtttcccaagattgctacttagggacacgtagaagggtttttgttttgtttttgccatttttcattactgatggagacataaatctgaaaccccttccttaccaaccaaggtttatgaaatgccttgacgtccttgaaagacaacataaagaacagtatccaccactccaaagaatcacttctaaggaacttagaatcacagtaatggaagtgtttggaagagggtaacaagtcttcacaacagtaaatataaaacacccacatacagtcaacttgagacgaaaaacgaaataggcgattgagtctaggaaagattctcgagcaggtagggcttggctgcagttcacacgcagcccaggcaatgggctcgaattcagacgctctcgaggcacagcccccacgacccccgctgacccctctttgccacctccaaggtcccggaaccgaaggaggaaggcagggagaggaaagggcttgaaacccgttccccagccctccccttcctccgcgccctcaaaggagccaggcggggagcccgctcgacctcgacctccacctcgcactcgccctcgcccccgccacggaacgtgcaggaaggagcggaaggctggcagccccaccgcaccgccaccgcgactcaccggtgtgccccgagtacccctcagacacttaccccacttatccaagcctcaggccacgccctaacaaggctgctggagctctggctcaggggccaacttttccatagcggggtccaaccagccaagagtgggaggaaaagaccgcggtgagaaacacagccgacgcctcactcagcggccgtttccccaaacccctgcggagctgacacatcaacaaagatggcggcgacactgaagccggcccggttacagctgagggggcgggggctccctggaggaaccaatcagcgcagcgcgggcggggtgacgcagcacaccttgaggtcctgggtaacctgtctgcagtgggctgggctggcggagctcacctcccacctcccggcccaggaggccccaccttgcggcccgagaggccccgccccgcactccgcctggctgggcacccacgcctccgcgacctggagagccgggtctcctgccctttggtcgggttcttcctttcaagctcctccggacccacgcagcctgtttctttctgcaggacgctcttgttggctattactcctcctcaccctttggcctgcatgagtcagggacataaagcaataaaagagaatttgaaattgtggcttcccggctctcatgcggaaaccttgcaccttacgtgggcggagtcggctggagcaggctacgatgggggagacctctgggggttccataacagcgcgttcgtgtcttcagcgtggcgctgctgccattgtttaataataaactgtcggtgccttcgtctctggcttcaagctgagcgcattgatggtaggaagtgtcctctcccggctgagtaacctggcacgcagcatggcaacaaaaagtgtattgggtacagttgcctcgcccggcccagagaaggaaggtcagcagttcagtctctggaggtttcgcaaacctcctcagtccggggaaacgatgttctttggtttaggtcttacacatatctcatgaatgaaaatagctgatgcagacgattctgcaatgtaagaatttgtaaagcaaaacttactactgttctgttaagcgtcttcgatactgttggcaaaacacacacacggaggtgtaatggcacctcactcctccttaaatgaaggtactacactgaagcacattttgcagttaaagtgtcttgtcatagaaaataaatgatttgactttaaaacaataaatcgaccaagccttcctagggagacattaatccaaggggaaaaaactgaagaaaccttaagctgttttcggtactcgtcagtaataacataggtattactatttctgaatatttctgaatttataattagtataaagtatataaatatatctttgtgaaccaagtttttcaccataagagaaaagaaatacaaatataaaccaaagacattatattaaaattctgcaatcctatatttgaatttacaaatatcagaattaactcatggtacatttttttcgtgaaaaaaaaggtgtgtccactgaaaactcttagaacagtgaccaacccattgcacactcctattccccagattgtgatctctaaagagcattgcccaaaaaaagttaccttggcttctcttggaggttaagtgctgattcccagtaggggcaagaaatatgcaagatagcctaggacatattgcttgtagcagaaagcaaggaagaaaagcaaagataacatgaactgtacccaaaagactcagaaggcagttcaaagatgccccaacttctcaaacaggacaaatttagcattcaaaaataataacagcaactggttgagacgcactatgtaaaaaaatcagtgagtgcatttattttttttaatgtcattgaccctcttggaaagatgccaacaagtcattacaatctgagaactgataaagaatcaagcattcatcctacctttcctgttgcaaactgaatgtcaatcaaatagtcaatgtggggaagctcttctctgtagaactccatgtaataattgcagaaagaaagatagatgatcaccattttgcaaaccctgatgaaataatggatctaggtaatggtcatctgtgaatctagaaccattagatgaaaaactgataggaagcttcgtattgtaatggatggatggggctggcaccacttgaacctactagatcaatcttaatatcctccaaagtgaaacaactacatactatgtattttctgaaatgctacaatagagaagcacaacaccacctgtgaagtattcctgccgggggatgcaatcaacaaaattgaatggaaaaaaaaaaaaaccctgcagttactgtaataaataaattgcaagagaagtacaggatttaaagagaaacccctttttaaaatatatcactgagtgcaaatacaggatgttttgatactgatttgaacatatcaacgatttaagataacatctgaatggctgggtgtggtggctcacacctgtaatcccagccctttgggaggccaaggtgggctgcttgagctcaggagtttgagaccagcctggacaacacagtgggatcccatctctaaaaagaaaattaaaaaataacatttgaggtatctggaaatgttta

SEQ ID NO: 913479 - DNA, 4001 bp, Homo sapiens
tctggggattttcaaaaggctattcaataaatgggatttatatcacataacaccctgacactgtctgacgcagttctcctatcaactattcgattttccttcacaaaacaaatttaaaaatcacatcaagggatctaaataaagactgtaaatagctttccatcagttgggtctggtcagaaaagaggtttggtccttagaactttctggatttgggagtgtactatactccccattttacagataaagggaatgaggaagggtaagatgaagtaacttggtcaaggtcctacagctaagaagtggttgtcgggggagtgtgtgtgcatgtgtgtgtgcagtgcttcagggcaccccccaccccgaccccaccactgagagcaaggaatcaggagaaaacaactttgactgctttctgtaccagaaactcacctcgagcctcccacaccaaagccatgggcagcttgtgggtgaccttcttctcttggctctgagtttcactgatgctcattttaattcactttcatagtgttgttttgttctcgtttttgtttttgcttgagacaaagtctccctctcacccaagctggagtgcagtgctgcaatcacagctcattgcagcctctccctcctgggctcaagcgatcctcctgccttgacctcccaaagtgctgggattacaggtgtgagccaccgtgccccacctatagggttttaaacagtaaaaggagcctagtgaagtacgacttaccgcaggcaccccttacaggccccggggggacccttttctgccgatcccagggtacagctgtgacaccgtcttttctgcctggattatcccagtagataaacaaaaattagagatcgtcattccatttctctctgtatatatttttccaagcccttttcatgaatgatcagttatttcctgcactgattttttttttttttttttttttttgagacggagtctcactctgtcacccaggctggagtgcagtggcatgatctcggctcgctgcaagctctgcctcccgggttcaagcgattcttctgccttagcctcccgagtagctgggactacaggagagtaccatcatgcccggctaatttttgtatttttagtagagacaggctttcaccatattggccaggctggtctcgaactccggaccttgcgatctgcctgccttggcctcccaaagtgctgggattacaggcgtgagccaccgcgcctggccctcctgcactgatataaaaagaatttttttaaattctctatttctccccactcccacccccaggctcactccttataaagcagcctctagcctcatctgcccctcctacaccacaccaactcgagggcccggaattgggtctggggcagtcgctgacttgcttgcttctctgccctgctcttggggttagcctcaggggcagggttgagagtcaggcttggccaggcagcaggaggtccagacagcgaagcagaatccttcggagataccaggagagggcgcatctgcctttttcctgtttcagattaggttttgttgttgttgttttgttttttttctctccctctctccctccctccctctctccctccctctctccctctctccgtccctccctctctctctctctccccctccctccttccctccctcccatccctgcagcgctacccgggtactctggatgcacatagggcggctctcgctcctaccttgtcatcctgctgtctaatccgggggcagcttccctcctccacaccagcagaggctattcttcagcaacaagaatagccgagcctattcgtccgcaacaagagcccaagaagcatcctgcaggctttctgctttttgagtgtattttaaagcaaaaacgagtggaaagctatgtatgctcagttaactatgtctagatgttaaccttttttcaaaaaacacagatggaggcctccctccgaggatgcctggcattctcctctttctgtgggcggcagcgaccccctgcggctccagcctccactacgggatctgcgggaagacacggggaagacgaactccgcacactgcatttgattaatgatttattttgattaacgccgtcacagtgacgccttagagcagtccctgttcacccgggtcccagcctcgaccccgcacggacagcgagggtgggtagctgggggcggacgcaggaaagaggaggggcggggccttggtcgggtggggtatggaatgggcagggtgggggggatgggcggggtatgggatgggcggggcccgggaaattccccggcgcgggcagggagcggctggctgtcagctgagccgcgctgggcggggtcgccaggccgcgcatcagccctaggcaccccagtcccggctgccccctccgccaccgccgccgcccgccggcaggttccctggtcagcgtcccatcccggtcgggagttctctccaggcggcacgatgccgaggaaacagtgaccctgagcgaagccaagccgggcggcaggtgagccagggcagggggctgcagcggtgggcgagggggcggcggctccttcccggcgggcgcttccgcggcctgaaaacggtacccgccgccctgccccgcggcccggagcctgtcggggtgagggtggcgaggggtggggcggccctcccgcgagacggctgccctgggaggatccccaagcctcggcgggtcctgacctggtgggagagggtgggtagtgaacacagggtgggcccaagaagggtccagggccggcctcttggccgcaggtaacccctctacaagtcacccagagacttggaggtgacgtcctcccgcaggctgggaaggattccgcagccagttcctcgccataaggaggtggttacagacacgcctgtgggagacatgggaccactacccgagctgaatgaggtgcccagggtcggtgggaatccacatagactgctgtgtctaggagagtgtgtacactctatatagagagaatatttgatgaggccgagaaccccaaaggaattgtttttgccatcgaaatgcataagctacaggaagtaaacatcgctcaaagaaaatgaaacccaggttccgacctggcctccaccagcaggaaaactgttgtatggaaatgtacaccaaggaactgtttgtaaggatgaaatggaaaatgaaagcatagaaaagtaaggcaatgtgaggacctcagaagcctttggatctggttagcaaggtgcaggctgtgtgaacagaagaacccaccttgctcttttgacccagggagagaagagttagtggtgccaggctgcctcccaggacaggcccagttttggggcgggggctggagaagtcccagggcagaccccaaggccagggattgccctggagtggacaaggcaagtttaaatgtgacctgtagacagaggacgatcattgatttaagtcctggcataattcatctgtttttccactgggccaattttaggcgttctttatatattacgtacaacacaataaaagtaacagcttctttttttataaactaacctttaggttgcatattatgctaggaatataactaacctaacctccacccccccacccccccacccacccccggaaaaccaaactttattctcgagggcaactggacactgtattatgtcctgccgaacccccgcccttacttaggtagaggcgcataagtattctggccatgaaatacaccttctgttttatagagatttggcatatttgatatatgttctttggaatttatgaaatagaaaacccaaaggaaaaagaaaaaaattaaacttttttttaaaaaaatatttcatttagaaagaaaaaattaaaagtttttgttatttccactttgacatgtgtatgaggagcattagaatctgtgttatgaagtgatacccagatggctttgcagtgacagaaaacacttctaatttttcaaataagtt

SEQ ID NO: 913480 - DNA, 4001 bp, Homo sapiens
tattggacaaactgtatttcatgataaaaatttctttaaaaagcctgctcaaacacttgggctctttttcctttggagaacaaagttctggttttgaatagttttatagatggtttctcagtatctttcctaattaaaaacatgaaaccctaagtttctctgtatcgagaagggcactctctcagtctcactggctttatttagaaactacacttctctggaaatacatacatatatataaaaacttaatctagctgaaccactcaagccaacacaaagcaagacgtgttttttaaacttagatattctggcttcaatatggaaaacatgtgttgccatgcacttacaaacaccactttgtagaactgttttctttctcagagaaatgcgagctaaaagtgaatctgcagacccacgtcagcctcattccaaatatcctcagtgctacttcccagactgggaaaacgaactacaaccgatcaccccaacagtggattaatttactatcttgatagataggttagattccattttgatgtttttctcagttgttttatatcactctccaaattccaactgaagctaaccaaagaatttagagttctacctggcactctctattcaaatttcagaagaattcagtagtcaatgagaattgactgaattcttaggcagatgcattccatcttgaccacaggccaagttctgaagttcatggaacttcagaagattccagtggtctataatcaaagaggacctcctggcctggttcacctctccactcctcaaagcattgctacccaggattttaccagcagcagaaccccaagccctagtaaacctttgctatttcaaagaacctggcagctgatatgagacagtgaagcaatcccgggctacattccacaccattcacatcttggcatttgagcaaatgaggaagaggagagagtggacagctggtcaacttctaacctgcaccaggtgctttgcatgagttacgttcctcactcaaccagccctgtctctcactttacacaggtgaggctatggaagttcttgagaaggtgtcaagaaatgcgctcagaatcacggttaggaagggcagagccaaaatgccagccacagactgatttcaaagattgtttttctcaccgtcccaatctactcccactgaggccagtttaaaaacccaagtcaaagggactgttggagggcgctttgagcttctgtctgcaatgctcttctgtgtacaaggcacagaaaccttccctgtcttttaaaccgccttaaccaggggtagtcaggatgtctgtagagacgtcagacggagcaagaaagatccaagaaggcaaggggtaggcgccccaggggcattctcacttgacaccgacaggctgcccggggagttaccggcctggctctaggtaacggcgacctcgggaggtggcgcagagagagagagaggtggcggcggcgccgccgggctcacctgaggaagaagaaataggagtagtcctggaccacggtgtgggagtggcacgagaagtagcccaggccggtgaggttgagcctggagccggcgggcacctccagcatgctgccccacgcctggtcgcacagcatctcgacctcggccgagtagaagaggcccccctggccggcgtggtactgccagggcaggtggttgtagaggccgggcgcctcggggtgcagcgccagcaccctggcgtacacgatggtctcggccagctcggcgcggcagccctcgctcaggggcctccactcggagggcagctggcaggcgcgcgcgggcgctgggggacccgccaggcagagcgcggcgagcagcagctggcgcagcatgccgggccctcccggggcgcacggggcggcggcggggagcccggggagcccgccggcccgggaagggcagccctgggcgctcggctgctcgggccgctcccgggagctgagcgcaccgctgtctccgccacggggctcggcatgcccggccctggcgcgccacgctttaaaagggtcccggggactggacgcgccgggcgcccgcctcccgccctgccccctgcggctggggcgtgggcgggggaggggcggggagtcgggcgggtcccggcgccggctggggcggggaccagggactcggagaacgcggggacgccgggacccagccctgaattggggacagtggcccagcaatctcctggcgccccacgatggacgtggtccgagcttgccaggcgtaaagcctgtttgcaaacgcaaggcattcattaaagaatgactcttaatttgcacgattactgcctaagtttttacattttctctacatttcagagtaaaaatacatagaaaccaaatctgactttatattcccagagattaggaaattcagtgtgggctgagatctcgtgctctctcagatttgctagttatttaatgaagatcttagaaaagctttgataaaagattccaaaaagcaatcatttggccctgattttcttggtttccataatccctgattccattttctaaacactgtacacctgagaaatacattcagaagtaaatcccaaacagcttttcacatcagtgagtgaatttgaggatactgactccacagttccatctttatctctaaaggcaacaggttttttgttttgttttttgtttttttcttgagacaaggtctatatctgtcacccaggctggagtacagtggctccatcagggctcactgcagcctcgacctcccctgggctcaggtgatcctcccaggtcagtctcccaagtagctgggaatacaagcacactgccaccccggataattttttgtttttagtagagacaggctatgttgctcaggctggtctcaaactcctgggctcaatcgatcctcccacctcagcctcccaaagtgctgaactttcaggcgtgagcccccacatccaccctgaatatttaaattatgcaatttcataatgctattagtctcccagggctgccataataaaatactctagtctggtggcttaaataacagaccttactttctcagagttttggaggcaggaagtccaagattaaagtgctagggttggttactggtgaggcctctcttcctggcttacagacggccaccttctcactgtgtcctcacgtggccttctctctgtgtgtgatggagaaagagtgagccctggtctcttcctcttctaacaaggtcactagtcctatggggttatcaccccacccttatgtcctcatttaattacctgcctgaagaccctatttccaaatacagtcacattagggagttagcacttcaacatatgaatttggaggtgggaggggagacataattcagtctatatgagctatttagcaggtgttctgcaggtttgctagagaaagagagcagggatcccaaatggtttatattcctggcaggcagactcacagcacacactgccaagttataataagaattgctaaaccttagtcattgttgaccatgggccaatcactgttgtaaggactgtacatatgtcatcttaataaattctccaaacaatattctgaagtagatataactattatcctcattttacagataacaggcacagagaagttaattgacaccaaagatcacaaagctacaagttgaccaagctaggattcagctcccagcaatcagactccagatccatgtacttaactacaacactagaatagggccaaatataggaaatgctctaaagacacaggtcggccctttaaccaggatatacacagagcaaattaagagaaaaccttagcagagtcaccaatgatggctcaaggagtgtgcaactgacctaacattaattttgtatgacccagaatccctgctctattttagtcctatactgtaactcatcagataagatagtaagaaagtttttcttactaactgcatcttcaagtgtcttgaaggcctg

SEQ ID NO: 913481 - DNA, 4001 bp, Homo sapiens
ctaccaaaagggcacttcaagaactttaccatctcacatgaaagttgctccaattccattctccaaaattggatttgagcatgaaaagtttctttttacaatcaactgctatttaggctactgatcacacttaacttgcaacttgctttctacacaaattaagaatgccatctagttctcatgtatgagccagcactgggggtgtacacacgcgtgcgcacacatatacacagcctcctccaccgaaggcatttcctggcacaaggggcatcctaaacttgctccatttccaaggtgtgaccctctatccccaaattcatccctttttcttcatttcaaagttcagcctaatccgctattttgcagcagctatggccatttatcccccttgatttcttgacatcatcttctctgcttctggctggggaacttttgatttgaatacagttgtctgtgtggggatccttcatgttaatgatgtggtgagctggcagggatgataggtgagagtacacagtgtactttttctagttacgtttcgcctcatcactgctataggggcctttctaaacgcctgccacaccaggagagagacctacagacccaagcttacccgtttctgggcagcctccaggggacaggtagaaacagaacagatggcctgttctccagtatctagactcagaagcaagatacttctaaccactccacgaatgaagcaaacacacgtacctctggctcagccagggagtcacagtcactacccttcccctggtttcggccccagccctgtccaggcgtggatgctgcactctcctcgctgtaaaccgtccaccctcccaacccaaagcaaagagcttccaacagaggtgggagcattagcgccgtacccgcccttccctctcgatcccggccagaaaactccacttcccggattcccggccactctctcccgccccctccccgggcgatccagctagcgcagtccagatgccagcttagtgcccagtccagctgcgaacccccacactccgagccaggacccagtaagagatcccagcttcctccctcttccaggactggggttccccagattctggacgcacccctcaaacatgctagggctgaaaaaagtcctaccccgccccccagccacgccgccagcctccagcccagccccggaggggcctcctctccagaggctaaaagggaccatgaatggttgccacagtagccttcccccgcaccgcgcaagggtcctcagacccccgaggaggacagacccgcgtggccccgaagggatacctccctctcctcccggaagccagcaggtccccgcagggagtgtgctctcagagggtccccgggaatctggggaagacttggggggtggctggattcgggtgcagcccctcccggggcgggcggaggtcggcgctgcggcgcgtccccggggggcactcacgatggtcacgctggctttgcgcaggtcgcggttctcctcctgcagtgccttgcacttcagtttgtaggtctccagctctatcttcagcaccttgttctcttgctgcagcgaggccaggcggttggtgagctcctccaggcggaacggcgagatgacaatgccccccgacttcccaccgccgccgcctcccccgccgccaccgccgccgcccgaggtcgacgagcaggacgactgcatggcggccgagctgctgctgttgccccccgccccgtccgtgtcgctctcgctggcgctgtccgccatggccgcggcgggctggggaaaggaggaggagcagcagggaggcggcggcgacgaaggccgggctgcgaatgagtgggcgccgggcgagcacaggggagcgccgagctgagcgcctggcaccagggcgcagactcggagcggcggcgagagaaagagagggcgcttcccgctgccaagggacctcctctgccagagaacagagaccccgcccgggcttgggcagtattgcactggggctcgctccagccgggctgggcgcgctccctaggccgcccagcaaagctggctgaaagctccgggacccgcccgccgccgtctggtgaccacgggcgggctgggaacgcgcaggcactgcgggtgcgggaaagccaaggactgcccccgcaccaccagctcgccagccacacgtgttccaagggagggcctccgagccccctgatctaagcccacggccgcccagcctcttccgggctcgcgcccgccccgagaaaaaggaaacctgatgccccaccagcctcgcaggtgccggggacacgtggaaaggtcagccgggctccggcacccatcctctaccgtgttgtggccccatcttccgccgactgtgtgtgcgcgtgtctccctctatctgtttcacacatacacgcagttttatattctcaaaagcaaggtgtttttgactaggaaggcttggataaacctaagagaacaaagttcctctacaagaggccgaggaggatgaaacaacagcagccacaggttaaccttgttaagtaagaatttgcaggagagacacacatctcctttaataacctcataaaccacactgcgctcaattgtttaaacaaggtgcaactgtttttttctttttctctttgcattttgcaaacatttccagcacatgtctcgtagtaggattaagacagtaacatttacctaatgaagaaaaaaaaaaaggaaggcgaaacacttttagtagaagattgaaacacctctttaagtgccaattttccaaagtaactgcggacataacattatgctatacaaatagtaatgattgagtgggagtgcaacatcacccgtctttgctatcctcttgctcactcctagaaaactttagcatgtaaaaataaaacagtaattactgtaatgcggtctaattcatggttctagctttgcagtttaagaaattaaaaatcaaaaacttttattcccccttcctcttcccaaagaaaggcttgcaggaaattggcccagcaggtgagatgattctaaacactttgccctgttgacacaaaacagctttcacttatgtataaaaattggaaagtgaaactgaccagactagttttattacccacgcttagttaacattacaacaaacacatggtaatagaaaatagaaaaaaaagtgtaatttttttttctgttgggttgaactttctgaaagatttctaaagtgttaggaagaaagaagaatgattcttattcccactccctcattatctttaaacctaaatttgatctcatgattaaacggtgattcaatggctcttggaaactggcacctcagaataaactcgaaaacaccaagtgttccaaatgacatcatctttcaccaagatggctgcttttagcaaacagcttaaatgccaacagcaactaaaccccagtttctcccaggtattttttagcttagtgctggagggcttctgaactctgtcactgtttgtatagcaggagggaggaaatgcttggctttgctcttgagaaacatataggcaatctaaatcattctgttacaagtgatccagtttaatttgcactgaaacttagttctctcacttttttgggatctagtacatgagacaatgagttaaattggaaacggattctggaaagctcacttgagggttgaaatggaagagtaaagctagcagggagaagcaccacagggggaaacagatttaacaacattctttcccctttattcagcactgtgatcgaatcttaagagtaggtctggctgccatacctcacaagtttctattgctccctattccatattatcttaaagcttccacttttagagcttattgcaacaggaacattccttccaggcagagcagggggcaaattaactctctcttagcgtcaccacaaaactaaccgccttggaaaggcggactcacactgcttcaagtcagcagaggggtggagtttgaagcgcctggtt

SEQ ID NO: 913482 - DNA, 4001 bp, Homo sapiens
gcataatttttaaatcataatcaaatatgactttgcaaaaataacttgtcactaaaaatccatttgaaggaagaacacaatgctctcttggaaattactgatgataatagtaaataaacacattatagaacttgaaccaaagcccctgcaaaatattcccttttacatttttcgtttttttgagacagagtttcgctcttgtcgcccaggctggagtacaatggcacaatcttgctcactgcaaactttgcctcccaggttcaagcgattctcctgcctcagcctcccaagtagctgggattacaggtgcccactgccacgtccggctaatttttgtatttttaatagtgacagggtttcaccacgttggccaagctggtctcgaacttctgacctcaggtgatcctcccacctcagcctcccaaagtgctgggattacacgcctgagccactgtgcgccctgctcccttttacatttttctcatgccgattgtgacacgatgctttcagtaaaaattaatgatacaagcaaaatgatgcagaaaccaagattaaatttacaaaattgaaaagcctcaaaagaattctgaataaattacattgccaaagaaactccatcaaaaccttcaggtccaagcaaacatcaaaaattccatcaaaaccatcaggaccaggaaacaggacgtaagaagagtggccaatgagccaataagtaaaaccaaaaggttatatatacatagaaagcaaggaaaagaaaatatcaccaaggaccgagtgatgaactacgtcaaatgctgagtcaagtaaaatgaagactaagctgacactggatttggcaacatggaggtaggtcatttgtaacctgaagaacggcaacaatttcagtagaatgatcgaggtaaatatctgacttaccgttcaaaagagaggaagtaggaacaatgaattgaatataagcactgtagagaaattttactataaaagggagtaaagaaatacagtattactagaagaaaacatggtcaagaggaaagttcgatggaaaaaagaacaagtgtatatgctgttatggattgcattgtgtcctctctccccaaaaaagtgtgagggagggagggagggagggagggagggaggaagggaagaggggaaggaaggaagggagggagggagggaggcaggcaggcaggcaggcaggcaacgctcacttggtgcaaaaaaaaagaacctgacaaatgctccgatgaagttcacataaatacaaaaatagtcacacgcaatgaatactcgtattagcaagcaaatatttaaggactttacatatttaattcatttatccctcctaacaatgctaggaagtggatgtcagcattacttcgcccaagtgcatccgtccctttccgccaccacgacaaatgttttctggtttcatccttcaaggattaacttacattcatttcaaatcctttaatgataaagtgtacaaaatagaggagagcggcaggggttggcaggggacgtagggaaaggatgatttgccttcgatcctacatcctgcataaaaagcagcacaaccgccacggaggcagccaggcagcgggaaaactaagtgcaaagccaggactctcccgaaaccctcaggtcctgctaagggagccgctcccgaggctccccgccctgtgtacctgctgagactgtgggaagtcgggtgactgggcggtttggccttgctggctctaaggtgaaaaactatttgcctgaggaagatgacaattccgagcctgccagacttccttcgagacggaagcctgaaaactcctcagactccagcacctcccttttacaaactgacgtttgtgctgaaagaaaaggcccggcctctgcgcccccgggcggcagcaaagaccgccgggcacccgccgccggcgccggatggggccgttgaagccacgtcccaggcgcccgacgccacgacgccttggcgccgccggcgtcgctgacgctgcgagcgtgagctgcgcgccgagagcggaagaggagacgcagtttggcggctgtggggatttgccggaaggttaataatgtccatgggcacatcggcctcctcctttcttattctctcccaagtgtaattccaggacgccccctgagcgcagattcatccaggcatttggcctagaggcccgcggaggagaaataaagtacaggcctggtaggacctttgagaacctgggcttcagctacaaaaccagagccccagtccttcatctgctgtctcctcaagctcttttcagtgtattgtggagttcattaccactctaagctcgcacggaagtgtacaccagcttcgtgatcttaaaagcaaaacaaaatcaaatggactaggaattaacttgaagcagagttgtgacacttaagtggtttcttgccatcagtttccacgcactgctttaagatgcaattttacaaggtagagttttttagataatttgacctcaagaaatatattaattttgtctttaagttgaacgaagtaaaatgtttttaatattttaaaatattaattgatacaatttaactgttaataatgcctgtgtgtaaatgaaaggaataggaaagatggaactaaaactaaaaaccaggaggtttaaaggagaccttagatttgacttagtagatttcaactattttctaaaactctgaaaattcattatatctaattatttctaattttccagtaaaatctgaatgcctcacaagagattcctgaaaatttatcagctcccaagagctggtgtaggctagctccatcacaccactaggagttaccattggggttgcctggaaagggaaaacaacacatcttctggtgtaccagaaatgttctgtcttctgctctttctgggtgtgttcaaaaattcatgaaggcaggctgggcgtggtggctcgcacctgtaatcccagcactttgggagcctgaggcagtgcatcactcgaggtcaggagttcgagactagcctggccaacatggtgaaaccccatctctactaaaaatacaaaaattagccgggcgtgatggcgggtgcctgtaatcccagctacttaggaggctgaggcaggagaatcacttgaacccaggaggtggaggttgcagtgagccgagattgtgccattgcgctccagcctgggcaacagagcgagactccatctaaaaaagaaaaaaaaaaaaaaacatgaaggcatatgcttatttatgcacttttcagtatgtgtgttttatgtcagtaacaaagaaaatgtacatataaatgatcagatttattaagctttccaccaacaattttttattttttaaagttggcaataaaattaagaaagtagtttagaaagaattgaattgctaaattccaaatctcccaaaaccgttgtaaatgaaagggataggaaagatagaactaaaagtcaggagagattaaagaagaccttagatttgacaaagccaatttcagttattttctagaaccctgaaaatagattacatctagtcatttctaattttgttggtaaaatcttaacggtcaagttgtcaagttagcatacattagcaaaactctcagcatgagtctagccaaaagttcaccattcatatctgtggccttaatagcacagctaagaaccacagaaaagttatcagtgctgacaatgtaaagcaaagaagtttaaaaagttaataaatttaagcatgtaatatcaaattttgcagtggtttgagtctgtgacatgaatcgattattctttgaaaacaaacaatacttatgaatagagaggaactttttcatctgatgaaggacatctgtgaactatctccagctaacatcattttcaatagtgaaaaattgatttttccttaagattggaaggaggcaaggatatttgctctcactatgtctattcagtattatactggaggtcttaacaagtgcaataaggcaagaaaaaga

SEQ ID NO: 913483 - DNA, 4001 bp, Homo sapiens
gggtgtggtagctcatgcctgtaatcccagcattttgggaggctgaggcaggtggatcacctgaggtcacgagttcgagaccagcctggccaacatggtgaaactccgtctctactaaaaatataaaaaattagccaggcatggtgtcaggctcctgtaatctcagctacttggcaggctgaggcaggagaatcacttgaatccaggaggcggaggttgcagtgagctgagatcacaccattgcactctggcctgggcaataaaagagaaactccatctcaaaaaatgaaaagaaagaaagaaaaaaactataaagcatccttcagaatagcatcaaatagatttgctataacctcagcaaaaatagttttaatacagtgattgagaaagaaggttacagttaaattactataagaacatggacaatgagtataaacttctattacatcaaaatctccaataatgatatctcctgtttcactattaccagaacaagccagctgaatacatgacattatatacatcatctttgcaaagaacctagcatataagatgttttattaatgaatgttaagctagatacataagaagacaggtgtgtattgatgtatatataaacccactaaaatgagaatcacttatgtgaaagcaatgtgatgttttagttactgttctgctcaggttcattttactatttaactttttctgtcatatatgaaaacctctgttttggattaggagataaatactgggaaatagaaaacaataaagcttttaacaaagcaagtttcaaatgcagccatatagacaagcaaagaagatatcttcagatgtgattttggagcgagaaagacctgaatttgaaatctaactcaatattactcactgtaatgcggcatggctaattttttaaacctttggtttcattctcagaatggaggtgctaatagctagcttatggtcttgtgtaaatgactagcccgtatacacagatataaaataactagcagattttataataatggcagatataaaatgactagcagattttaagttgtgctgcttcttttgttctttgtcttaaagcagctgacagacaatcctatatttctttagatatttgtttttatattcaattcggtgtaccttacttcgtttatatacatgatctaacaactttaataatttttattgccctcggagaaactatttttattatttatctttccaggaagaagttgaggtagttcacaataaaaattatacacaaaaagagaaggtaaaaataaaggactcaaatctcagatgcttatgtggtcattcaaaatcagtatatatttaagtcatagtttggtattcaagataataatgagttgacatatacagaaggtaaagggcaaaagtaaaaacaaatccaaaggccgggcgcggtggctcatgcctgtaatcccagcactttgggaggccgaggcaggcagatcacgaggtcaggagatcaagaccatcctggccaacacagtgaaactccatctctactaaaaatacaaaaattagccgggcatggtggcgcatgcctgtaatcccagctactcaggaggcggaggcaggagaatcccttgaaccagggagttggaggttgcagtgagccaagatcgcaccatagcactctagcctggcgacagagcaagactccatctcaaaaaaaaaaaaaaaaaaacccaaaaacagaggcatgaatttttaaataacatatacaaatgaagtaaataataatataaaagacaaatttctcacaacatatactactgtctccattttggttatttcctcacctgtggatattcttggattttatcacttgtcctttgtccacctgaatctgaaaccagtgattttcttgtttctttctccaatggtatattttttgaatcttcacctttaacttttgtttgactattacccacttgcattgttgtctcagttttcccctcacttttaagtaacttctcttgatttaggaaatagttaagttgatgcttagctttttcagcttcctgtttttaaaaaagtaccagtttattaagcattttctgatattttcctgccaatactaccacattcaggaatctacatatatttacgcctacatgatttctcaactcatttttactgagttgaagggagcaaaggtaagctattgctataattgatactttaacaattccacagttaaaatcagaagttgtgaagaaacctcttccacctttgagggctatttttatacccaggagtttttcctggctgttatttttaaggctctaattattatacaagcaaaataaaaattcatataaggtatacattataaaaattgatagactataagaaggataattagcacctataatatcaaagaatgaaataaaatgtggaaaacaatttatttcttctggaataaaagtctccttaaaaatgtcactttttataatttttatttagtcatacaattaacttacttatataaaagactatataaataaaaagaaaattcataaataatctcacctcataaagaaaaattactattaacattttgagatatatcctttttaaatttttctaaatataactaatatatatataatatatattatatattagctatatatattatatatatattagctatattagaaaggttagagggaaattacacaaagatatttttttatatataaatatgttatatatttatatataaaaaaccctgcatatatatagctaatacatattataatatatataatatataattatacatagctaatatatatattagctatatatatatatatctgcggggtttttttgcaacctctagtctcctgggcttaagttatccccccacctcagcctcccaagtagctgagactacaggcccacaccaccacacccagtcagtttttgtatttttaatagagacagggtttcactatgttgcccaggctgttcgcaaattcttgggctcaaagtgatccaccggccttggccccctaaagtgctgggattacaggcatgaaccatgatgcccagccaaattttttaaatgtttatctaaattgggtcctactatacacacttacatcttatgctcttttcattaaataatgtcatagatatgtttctataacaataaacatacatttaaatcagaataggtaatagaagtacatttaataatatactataattgtcttagcaaactccttaacaatggacatttagatcatttcaaaatttttgctattaaaacatatgacattgtacatacttgtacaaaatctctgtacacttttttcttctttaggataaacttttaaaagcttttattgagtgaaaaggctacatctttccaattttgctatgtcttttctgtctcccagaaagacataacaaatatcttttatacttctattaacaaaaacagatgaatatatcaattcatacttttttgataatagaagtacgtgaaaggttgctcatttcagcatacaaccacaaatactacatatttctgtcctttacatttttaccaagatggtaggcaaaacaattttataatacacaaatacacttttgtctattcatttatgaaatgcttatagctttttttcatttcttgttgtattatttaactaaaattttaaaaagagtagtaagagtcaacatcttggttcaactgagtttaattggaatgcctgcagtattttacctttaagtatattgcttatcagcttgaaatacattgtctttttttcttttccttttcttttgttcacactgcaaccatgacagatgaatagattgcctttattagcttaagaaagtttacttttctttatatctcgctatttttgataagaatgaatattaaattttattaatatacccctaatgcataaaatgaatatagtttaaacctagccaaatagtagaatatg

SEQ ID NO: 913484 - DNA, 4001 bp, Homo sapiens
ctcaaccccaagagtcagaatcctttttattgaaagtcagctgttttgcttctttctcaattttctacatttaacaaatggctttctttatccaaggtgaaactgagttaagctagagatcattttggatctggtctctcttttggttatcgaagaggcagaaatgtctcattaatctgccttgccacatgcagagtaaaaccgttacttaatagcaacaatacacagactttgctttgtgttggaaaagtatttttttccaatatctattaagtctactttctgcctttgatatcagcaggaaggggcagccaactccctccactttagggcttttgaacagcccaaatcctgaggggtaagtgataagaagttatcacttagtgcttactatataccaagagcagtttctaagcacatgtacggtactaacttaagtttcacaatcgccagaatcataaggcacactcattattcctcattttacagatgaggaaatcaagaaacagaaatttcacttgtccacgtctcacggcaagttagcggaaaggctgaggaatttatgtacaaaagcgacttaaactggctgcatgcaacggcaactctcgaacaaagagggctgttctgcccaacaaaaattcagtgtatatatcttttaaaatacaagatcaaattcatgacccacctggaagccagaacgcccctttccaccttccctggcccaactaccatctccctactcattcaggttgcaggttcttttgatacatcccagagaaggagccaagaagttaattaaccttgagcaaatgagcaaactcgccttttctggcccggaagatagtgagtaaagaacctgactagaccttctagagagccgagattcagaacaactggcgcgacacacagaaggagaaggcaggccgggcctcggagttaccttgtagcgaagcgcttggtgaatatcggcggccagctgtcctcgccaccactgcccctccagctccatgggacccggcggcgcgcccagcccgacgcggcaactcgagtctgtaagacacaccccaggcgcggtcactgccggctcccccgcgaccctctgcgccccctccccggggggtgtgacctcaggccacccggtgtggctgctcatcttcacttgactcttcctcaacccagcccgacccgagtcgtttcccccaacgccacacgcgaagccgggtctgcccccgcaggaagagccgaaggactctgagactcactgctcgactatgtgtcgggcaaaaggggatccactcgggccctgagttgccaaagcgcggagccaggtgcgagctcgggaagagctgggggaggcccggctggggctccctgcgtccggggctggagttctcccgccctccctgaggagcggggagaggtgacacgctcatagccccgctgaggggaaacgctcccatggcaaagcccgggggtgagcgtctgcctggccgcgggtctccgcatggacgtcgggagcctgctcctccccgggagccccgagaaacgcacgttccgcgcggcctcagaaaggggaacaaaaggccgggccagccaggctctgcgcctcaccccgggagggtccgctgccccacgcctaccccaggcctgccgggccgcccggccccacgctggctcccttacccggaaccgcggccctcacagccccagccccgccgtcgtgcggcggacgccggccccgctcatgctgcggacagtgggccgctaagcgccggcctcagctagagcccagcgcctggacgctcgcgccgcccattgttaaaggaccggcaggcggctccgcatacaaagccagcgcgggggcacttgaggccccgccgctgccaatctcgtctcgcgatacagcggggtcgccccgagccgtccaattggcggccgggccgggcccaggtgcagcgccaggcggcggcgcggcggctcccgcctgggtacggtcagcatcccgcacggcgcggcgtggcctgggctggcctggcgcttcggttgccggggcgctcagccgccacctactgcgaagccggcctgatcgccggctgaggtcggcagagagcgccggagaaattgtaaggtggatcactgcagtgaccaatccagttaggccactcacctgctgagaaccttcgatggctcctcgatgcccgcggagcaaagttccgacgcctcagtttggcgtttaaaagtcttcacggcatggattcggtttaccttacttcacgttgcaccaaccgcttccatcccaggggctgctccgtggatcatcaggccctccaaatgtgctttagctgtttctgcagcccctgaagcgttttttttttcctgtgaaattatgctctttttttaagttccacctcaaactccacctttcttctagaaacctaattaatctcttccccctccttattttcgttgctgtagggattcccaagagctttgaatgaagacatttaagattacttctagtaaccttgcttgtcaaacccatggtggatgtaattaaccatctgtgctcgtaaatcaggaaactgcaaaactgtgagaacactccgacgtcaattgaggtgatatgggggctgaaatgtgattagaggaaacctaatcaattgtattttaacctctttggtggattatcacaaaagaggtggatggtaaccctaggacagtgagactgtccacttttctgagactggagatcaatctcttaatagtaaaacgtaaatatttttaaaacttcaccccttttactttgaatcctttgtccaaaaagatacatgatgataaagaactactacaaagtgataaatacattttatgtgattctgggtggcatcttcatttgaagatcatcagcagacatgtatatgagccgtaccctatccatagacgatgcttatacccaggagagcaggcccgcaggaaccaaaggcaagaaaagggaaactcagaagctgaagttggcagatcccggcctaacccgacatagtccagggagaaggctgccctggcctgtctctcagttgcagggtcctctagagtgaaggtagacacatcaggctaaaagcttcatgccatttttaatggcatttaaatagtgtctacatccttgggttccatttcatgactattaaacaactttataataatttggcttctaaataactgtccagggcctatttaagaacactttcagaaaaatggggcacagactataatcattagtataagaagtagactgtatttatcgcttctactttgaaaatattgttcactgggatatatttgttcagaaatcattattgttttctggacttgccttgtgatgagaagacttcaatgtccatttccttttatggattaatgttcattttacacatatattttgccatagtgtgtcttagatagtaaatccttaaaatgcaaagttcaaacttactatgatttatttaattcctttagagcaaggtggacacagttaaggtatttacttaactcctaaagtctctgctctcatagagtttttattccactagaaatagagatacaatgaacaacaacaaaaaaacatatcacatggtgacaagtgatgtgaagaaaaataaacagaaaaaaaggctagaaagtgaccatgggtgggctgggtgtggtggctcatgcctgtaatcccatcactttgggaggctgaggccagcagattacctaaggtcgagagttcgagaacagcctggccaacatggtgaaaccccgtatctactaaaaatacaaaaattagccaggtgtggtggtgggcgcctataatcccagctactcggtaggctgaggcagaagaattgcttgagcccgggaggcggtggttgcagtgagccgagatcgcgccactatactccagcctgggtgacagagccagactgtgtctcggaaaaaaaaaaaaaaaaaagaaatgggtg

SEQ ID NO: 913485 - DNA, 4001 bp, Homo sapiens
atttccttacaatagtctataataactgtatgcagcctggctctaagaaatgtaaatcttcttttttttcttttttgatccatcattcaaaacaaagcctccgctagatactgcacaacataaaaaggaaatttactgcacatcataaagaagacattatttccaaatgttttcgcctgtcaacatagtataggactgggtaatggctttctgtaataaactcattcatttattcctccctttaaagtacaatacttactgtttattatatgctagacttttctttcaggtgctagaggctgtgaaagtgatcaagaccgatctggccttcatccttctagatgcctttaaatgcataaatttaagaagaaagtatggctgtagttcaaagacatctaagcgtatgtttaaaataatggaaatctaaaataacaacactagacacgtcatatggaaccataatttactaagcgcgtactagaaaccagacgttgtgttactccctttatacatggcactcatttaataaagatgctctcctaaaaagattaaactaccatttagaagaaattacacgaagacaaacgagaaaaatctttcctttagcaaagtttaaatgtggcctttccacagtggagagaatcttccatcctaaagtggacaggaacgaattatgaagttgtgttcattcattcacacaaaaatttcttcatattagttcaaccagattaactatgagaagatgtttgggttaaaaaaatcaccttgtcataaaaagatacttccaatttcaaatcttttcagttgaaaattctataaactatattttaagcatgatgcataaatatccctctgtcgttatcactgagcaacagtgctaataaatatgttgccaaaccaataaaataaataaaacattactgcgtgcagtaattagtcttagctttttttctttttgcaaactccagaccaaccaaaagtcacctgaataaatcagaaattcataggactgcaattcgggcccatgcaaaaactgagacttaacccaaaggtgtctgacaatcttttaaagagcattctcgggagaagctatttgactaatcctggaaccgccactcaaaaaaatcattttttaaaaaaaacggtagaatgggaacgggggaagtggagtccatttgtaaggttccggggaactgactcaacatggttctccaactcgaggttggagacaccgggattccaaaatgggaatccactcacttcgcttttataggacaaacgcgtgcacaacttggcttcgggctgcattcaggtagtgccgggaaccccgagctcccgggccgcccccacccagctctggccgctccattaaggacgagggccggctcctgtcacctcgcgacccacgcgcacacacccgccctaggcccgccgtgctcgatgccgcgggcctgcaaagtttccgcggccgctcacttgggggtaaccagcgaggggtacgcccagaggctgcggggccccgggcgcctaggctgcgcgggcgaagccccggttatgcacgggtcgccgagaccggctgggcaagcaagagcagccgggccgccccgacgttggctgtgcgactgttgccgcgggggcgggtagggggctcggcgggccgcactcaccgtctatgttctcccggtcgctgatgtgctgcaggttgcagcccgtgtcctcgcggctcaggtccgtgtctggccggtaggactccagccgggagtgggcattcctccggagcttgggactggacgacacgcagcacgaggtagtgttccccatcttcggcggccccccgactcctgctgctatcctgttctcccagtccccgggagcggggcgcgggtggacgcggggcgcgggcggcgggggcgtgtggggaggcccgcccgctcgccgccacgggagggggcggaacggcggccggccgccgggtcagcagcggcggcggcggcggggcctcgccatgggcggcggcggcggcggcggcgacgagcgggcgacggccccggctccccctcggccggcctatccgcggcggaggagcgctcgggtccgcgcgactgcggccgccgcgcctacctcaccccgccgcggccatggcgggcggcgccgcgcaggccgcctcccccccgcgcttccccagttggtgtccgcttccccggcggctgcggcgacggcggccgcctcggcaagaggttccggttcaagccgggggcacgcgtgtccgcgccggacggcgggactagccgacgagcgggcgggcagcgggcgtgggcgcagcccccggactcctcgcggcgcggtgcggcgcggccagggaggatgctggcggccctccctcgccagcggcgcccgccctcgccgcagcccccgccccgccccgtcaccgccccttccctctgccctggaagcagatcggcggccgcggggaggttcggggcggcgcagccccgcgcggttgtgggatcgctcccgggggccgctcctctctcgggcactggggtcgcgggagacgtcgtcgggagctcggtttctggaggcccttccccacccggcctctgcctcctccactcccccgggctggacggaacggggcccagcgcgggatgcgaggtgcgtccccggggcccgcagcgggcgggagcgcagccagggcccggtcggggacgcaggcccagggcgctgaggctgcacctgcctctccgaaaccgggctggctctttttgtctttttatttttctaatttatttttttagaggtatgatttcgctctgtcgcccaggctggagggcagtggcgcaatctcggctcactgcagcctcgaactcctaggctgaagcgattctcccgcctcagcctccaaagtagccggtactacaggcgcgcgccaccacgcctggctaaggtgtgtgtgtgtgtgtgtgtgtgtgtgtctccaaagtagcgaggactacgggtgtgtgtgtgtgtgtgtgtctccaaagtagcgaggactacaggctcccgccactacgccaggctaaggtagggtgtgtatgtgtgttaactttttgtagagatgggatctccctttgtaacacgggcgcccgccactaagccaggctaaggtggtgaatgtgtgtgtgtgtgtgtgttaactttttgtagagatgggatctcgcttcgtaacccgggctggtatcgaactcctgtcttcaaggaatcctcccgtctggactcctcccatgggattacgggcatgagccacggcacctggctattttttttttctaagcatttaaataagctggggcttgatttgggagttttctattgtattttgagctttgccgaggacttgatagtgaccttgctttaagctgtgaaataaatcttggggtcccagagctattttaatattgaattcgctgtggagttgttttgagttccttggaggttaacatgagatagaaaactaagttaacacaactcatcgactgcccttgctttgctttgctttgcttttagaatgccatcgggttttgtcatgttgggaacaagttaacttaggccagttgactaagatcaaggtatgtgaacatgcctggctgggagagaagtagagtaaatgttggttcgcattccctcccgacgcccacaatgccagccatccctgacttttcttgcctttattgggaagaatataaggtggcagaaacaaacttcccaccctttttccaaatatttactgaaggagtcttgaggagagtcttgtggggtgggggggtgggggtgggagctgggaatgtttttgaactagttcttgaaaaaaaaactagtacaatagtacaactgtcttaattttatatatgaggaaactgaggcccagagatgaaatcatgccttgatttatgcagacctcagtacctgttcgtgacaaatccagttactaaaaggtaagagaaggaataagggacttg

SEQ ID NO: 913486 - DNA, 4001 bp, Homo sapiens
agtgagaccctatcactgaaccaaacaaaacaaacctagtgtcactaaaaaagacttttaaaaagtgtaaaattcaggccacttcctaagcaaacattgctgaggaaaccaaagtgttagtttgattttctttttcttttttagagacaacgtctcactgtgttgctcaggctggagtgtggtggcatgagcacggctcactgcagcgtcagcctcctgggatcaagtgatcctctggccttggcctcccgaagtgctgggattacaggtttgagccacactgcacccagccctagtctgattttcttttcttttctttctttcttttttttgagagggagtttcactcttgttgcccaggctggagtgcaatggaatgatgaccttggctcactgcaacctcctcctcccaggttcaagcaattctcctgcctcagcgtcccaagtaggtgggattacaggcatgcacgaccatgcccagctaatttttttgtattttttgtagagatggggtttcgctgtgttagccaggctggtcttgaactcctgacctcaggtgatctgcccaactcggcctcccaaagtgctgggattacaggcgtgagccaccgcgcccggcccctagtctgattttcagtgggtgtgttcctccactgccagtccccacaacctactgcctgttaaaacacaaagcatttattagacacaaaaggtttttctaggaagggaaataatttttagcactgggaaatgacagggtcaaggctcacctggtagcaaaaagctctggggcgatgacttctagtcccagttcagctcttgatgttgtgaccggaggggacaggttcactgcacgatttcctggctgtgaacctagaagagcaaggaccttgcttttccaaggaaccccaagtgttgcacataaagtgatggtgaaataacagccttgctgtttgtgacagttcctgcaccccttccgatggctctgccattcggattattcaccacttgtttattctcaatttctttctctatttttcttttttttttcatttatttattcttttctttctttctttcttttcttttcttttttttttttttttgagatggagtcttgctctgtcacccaggctggagtgcagtggcgcgatctctgctcactgcaagctccacctcctgggtttacgccattctcttgcctcagcctcccgagtagctgggactacaggcacccaccaccacgcccagctaattttttgtatttttagtagagacggggtttcaccgtgttagccaggatggtctcgatctcctgacgttgtgatccgcccgcctcagcctcccaaagtgctgggattacaggtgtgatttttttcatttatttctttatctagagacaaggtctcactctgtcacccaggctggagtgcagtggtgcaatcctagctcactgcagcctcaaactcctgggctcaagtgatcctcccacctcagcctccccaagtagctgggactacaggtgtgcaccaccgtgcctggctaatttttaaactttttgtagacacagggtctcactatgttgttcttgaactgctgggctccagtgattctcccacctcagcctcccaaagtgctgggattacatgcatgagccactgtgcctggccctattctcaatttccacaccttctctagatcatgccctgttccctgacctctcaagtctcctggctgcagtctctgctagtgcaccgcccaagcaagcttttcacaaacatgactcctaactcctcagtccccctcctccccaagcgttctcaggcctggctcctgtcacacagagctcacctccatgcctctgcccctgctgtccccggacaagccccccagccaggcggctctcaacctggtggcctcagtatgatcttcctggtacgaggctcacatctctcctgactcccacccacccatcccttccagggtcatcctgcgtacactgtaataatgccccttgtgtgtcatcactaggtcatggccctcctcagggcctggatctcccctaacttcccttgggttcctggtgctctgtgtacagtgcaccatctcctccccgctctacccgccatggtaattagaggttagacttgtcattcttcaatgatttggcctgtaaatttgggttgatgaaagatgagttgaatggaaaaaggatacagcttcaggaaacctagaataccctgatttttatcctcaccctcaagtatcctatttcacacatgtctaaagatcaacttacttcccaaggcttttctttgctaaatagattccttcttttctttcttttctttttctttttttttcttttttgagatggcgtctcgctccgtcacccaggctggagtgcagtggtgcgttctcagctcacggcaacctccgcctcctgggttcaagagattatcctgcctcagcttcccgaatagccgagatcacaggcgtgtgctaacatgcccggctaatttttgtatttttagtagagacggggtttcaccatgttggccaggctgatctcgaattcttgacctcagatgatccacccgcctcagcctcccaaagtgctgggattacaggcgtgagccactgtgtctggccagatttcctcttaatcaataaacatttcacaatgacaaacactatgaactaaaaatatcattgtagcttagtatttgtccttatagcatcacattttatatttgggaggtggtatggtttggatctgtgtccccgcctagatttcatgtcaaactgtaatccccagtgttggcggtggggaccggtggaagtgattggatcatggggcagaatgttttacccccagccccttggtgctagttctcgcaagatcgggttgttttaaagtgcatggcaactcccctttctcgctcttgctcctccggccatgtaacctgtgggctcccccttccccttccgccatgattgtaagtttcctgaggcctctccagaagccgagcagatgatagaatcatgctttctgtataacctgtggaaccataagccaattaaacctcttttctttataaattactcagtctcaagtatgtatttataacagttcaagaatgaacaatacgggagtgtatccatatgattcattattgtatatggaagcagtaacatcccactaatggggcatcatagagaagggatacatcccctataagtgacatttctggataaatgaaaatgaccaccagtcctttggaaatttcgcttttttttttttttttttttttgagacagagcctcgcactgtcagccgggctggagtgcagtggcgcgatctcggctcactgcagtctccacctcccaggttcaagcgattctcctgcctcagcctcccaagtcgctgggattacaggcacccgccaccacgcctggctaacattttgtattttttttcagtagagacggggtttcactatgctggccaggctagtgttgaacgcctgacctcatgatccacctgcctcaccctcccaaattgctgggattacaggcgtgagccactgcatccggctgaaaatttcaccatatttgttagaagtcttagttttttaaacaacaaaattaagtatgacaatacttacataattgagaatcaatgaatgtctttctgaaatagatagatgcctgcctccttgtacagtgaaaaaacaacataacttttttcatggcatctccagaacaccactgaaagcatcgtgattgaatatcgtaataatctagtactaattttgcttcttggaattcttgtctctcagtagtagattgccagatgatactttgtcctgttgttttacctgctaacacctcctaatgtcctgctgctcctcggcaccacacctagaaaccagatcaccaaacttaggagttagaaacatgctcgtgcatggtgggagaaaatgtaaaatggtgcagcc

SEQ ID NO: 913487 - DNA, 4001 bp, Homo sapiens
agtgagccgagatgaggccattgcactccagcccaggccacagtgcaagactctgtctcaaaaaacacaaaagaaaccccaaaacctggtggagacagacacataaacaaatcattaactaccagttgacaaatactaactggagagtgtacgaatcagttaagacaagagggatgaaatgtctagacaagcctcagaagtgctactttcgtaaggtcttcaagggcaagttgtttactaggtagagaattctcaacaaagaacactgaaaaaccacagaggaagatgtcatcttcagagaactgcaacagtcttatatagagagggcaggcataatggtagaagatgacactagaatggagacaaataccgctaatcatgaaggactttgaattttatcgatatagactatggagagtcactgaaggacttgtaaatatggattcaaagtcccttcctccaaaatagtcaaaggagttgagtcaaagcaacaaaaaatgcaggtctgaatgtggaaaggtagaatttttacagaattcttaatagagactttcggcttgctttcaggatggcttctagtgctttcttaactatggcttatgctgaagtacgacagtatgaattatggctaaagggttcaacaaagtgtgcatttttaacctgaagattatttgaagccaatgttgtttagaacacaaacgaaaacaaaaaataacagtaacaagctttcataaattaagagaaacagtaataaagtccaagaggaagaagactgatttcaggcaaacactcaggaatatttacatttttatcacatatggatgacggataagacatgttttgaacccatcttttgcaggagagcatcttaagttccttttggttaaagagcagctgccatctctaaagtctctagtctaaaagatgatgctttaaaaaaaacaactggccaaatgaataggttccgtcatattttaatgctcaggagaaaaggaatgcttttcatatggctattttaaaaagcttaaagctcaatttctctcttacaggagtgagctaccaacactctaatctgagaccagagtccctgcgtcagtcatttccactccgctaaggccttgtctgggagcagccagcctcattggtcggggagcccacacagatgaatatgcaattactgaaatggaaacaagcttcgccaccaaggaccaccacaaaggagtcccttcattcctccttttactttatcaagaaagtaggtgcattatttaaaaatgtatgaaaatacatgtctaaagacaagagagaagatctgaacctacggcaacggtgtgccccaccaaagtttcacctcaggatgtgttttagggtgtgtctttcatttagcccagtaattgaaagaaaaaaaaaatcgaactcattcggggagccccggtactttccctatccaccctcacacgcaaccaggctccgaaatcagagtgcctcagcctcgccctgatttctcctgaaaggcggcggcgcccgcggcccgaggccccgcgctgtcacagccgcagggagggcgccctccggcctcccgggtccgcgcccgccccgcgtccggcggctcgcgaggggctagagaggctcaccctggaggccgggtacgggagggcgacaccgcctcagcccgggagttcgggcctccgccccgccccggactgcgtgcctggtcttgggctgcccccggcgcccgccgcgaccccggccccggctctggccctgagcccggatctcaccgtgcggaggtcgcgctgcctcctcggccgcggcccagctgcaggccgccctgcgacctgcgggcccgaggacggaaggtgagacgaagggccgcccgtcacatccccgccagccccgccgcccgagccgcagcaaccagcatcgcgtccgcggcctgagggagcgccggactccaaagccgccgcgccccctccctcggccggcgcccgcccggactccgccctccagggccggcgcaccgcgcacgcgcagtcccgccccgccgcgggcccgtgcgcaggcgcgagcctcacggggctacggggaccgcccccaccgcctgatccggcctcagcccacctctggccccgccccgccctcacgccaggctttcccaagctccgcctccgcttcgggccccgccccctccactgaccttgcctggccgcctcctgactcaggtttttgctgggcccacgcagtgacgccagtcttgcggctgacctcacctctagccgtcccctggactacatttgctgcttgagtgcggtcaaacctgacagctcctcctcctggatgtgaaaagtgaggagtggtctgagcattgggcatgactgaaccacgcacctgcctaccgcatcaaaacacaggatcttgctaaagctgaggggaaggggcaccccaagtgctgatctggttttccctttttttttttttttttgaaacagagtctcgccctgtcacccaggttggagttcggtggcgctatcacagctcacttgcagcctcctgggcttaagcgatcctctcgcctcaggcgtgtatcaccaagcctccgaaataattacaactaagaccacactagtcaaagtaaactatcacaagttgacccaaatacccggctaatttttattttttctttttagagttgggggaagtggtcttacaggctagtctcaaactcctgggctcaagcaatcctcccaccttggcctcccaaagtgttgggattacaggcgtgagccacagctcctggccaatgtggtttctttgccagaaaccaggtctttcttccctttggggcttccatcccccagaggccatctcttcccctcttgtttttcctcgacgcggccagtcctgctgctgagagtcctcagcctggaaggcttccgggcctggccggctgtttaaagctctggagttgcccttacctggttgtagacttgcagttctctgaaatcctcgtcggccccaacagctcggttgtaataacatttcaggagaactgcttgaaaaatatccagttctttcctgtctccagatcaatgatactcaaatggaaaaagcagacggaatgcctgatttgtataaccacacttcatttaataatacactttcatatttagaaaataatgtcttttaaatatcaatccctaagatatttaatgtattggacaataatgtgtgcttaaaatattgacaaagactaggtctaaatgctgtgcaatctctctttggattaagtgagattagaaaagcaaacaccaggccggaggcgatggctcaagcctgtaaccccagcactttgggaggccaaggtgggaggatcacaaggtcaggagttcaagaccaggctggccaatatggtgaaatcccgtctctactaaaaataccaacaaattagccgggcgtggtggcgcattcctgtaatcccagctacttaggaggctgacgcaggagaattgcttgaacctgggaggtggaggttgcggtgagatgagatcatgccactgcactccagcctgggcggcagagtgagactccatctcaaaaataaaataaaataaaataaaatgcccaggccagttgtggtggctcacgactgtaacctcaacactttgagaggctgaggcgggaggatcacttgagcctaggagttcaagatcagcctgggcaacatagagacctagtctattaaaaaaaaaagaaattaaccaggcttagtggcatatgcctgtagttccagctattcagaaggctgaggcagtaagattacttaagcccaggaggttgagactacagtgagctgtgatcatgtcactgcactccagcctgagtgacagagcaagaccctgtctccaaaaaaaaaaaaaaaaaaaaagaaggctaggaaaaaactttcccataatgctaatacatgtacatacttagcagaatcacaatagcattttagtgta

SEQ ID NO: 913488 - DNA, 4001 bp, Homo sapiens
ctaagaatgctgtgcatttttccctcctcagtaagaatcactcatgtggatgatccacaccatagtcccttaaaatacactaagtagaagggatttgtgatcatatgttttggaaaatggctacatattatattttttaccaccttttgcaaaatcacagtactatatttatacacaaaagcacaattgagtccaccatttaaaaaatgtttatgatctattcattctcatactaatttgaccagggaccctctcttttcttacaactgctgacatccaaggaacacagttgtttgaaaatgttgcttaacttttctgacaaattaattcaggaaaaaaacacatcctttatcttatgcgtactgtatatgttgtaataaatcaaattttattctttgcttttgctgcaaagaatcttagaatcaattttttccctcactttaggaactacacaacaccatgtttttcttccattatttctttaaaccaattgtactatttgtattgtaaatgcactccaaaatgacctgaaatccctgtggaatgagataagaaagtgaaaaggaaaaactaataacttccacagagtgcctactgtaaactagacactactctaggcacttttatccctgattctcaaacactgagataaagatattattaattatgttttaaagatagtaaagtgaagcagagacggtttaaataaattatctaagcttgcaaagctaatctgcgccaggtcaggttttgattccaggtttgaatgactacggagcctcattacaaaataagatctgaccaatttaaagactatcctctactttgaaaaagaaaagactaaatagtaccttcagcactaaacagtaccttcttctgtttttaatggtacttgtggaatttttaaattttaacttattacatgagcaaaagaccaatcacttggcactaattttaaatattatttggaaaaactaagaaatttaacacagttaacatttaatcatttccaaatgacagctagaaaatcataccataacttgaagtccaaaaagcagatataaatagagtatttatatttaagataaaactaatgaaaaaatatttgggccaaaaagaacaaattagacatattattccaattagtaccacataaaacttgaagtgctttttggtgcctctaaaaacaaaccagacaaaaacaggttttttgagggttctgggaaagggagaattataattcaaaatcagaggacagcaaatgaaatctaagtcagaacagtacttacctgctcaagtcactttttccatggtgatgatagtggtcagggtggctgaggtggtaatgctcctgtccactccacctctggggtggccttttccaaaaaccttcctgaggctgccgaacatttctgtctggtcggtcaaagcggttcatattgtcacactccactagacagattcaaaagcaaaagactataaacatgtacatactccataaaagttgactcttatagcttgataattaaatgctgtaaatcaaataaaaataatagtttaaaaatatcagccatttatgttaatcacaatatcaagatttctaaaagcataaccagttcttctggtgaaaactgaacttaatattattcaaaatgaagtaaattataatacttttacattacagtcatgtaaacaattaactgccacactgttttaaaacaggcaaattaaccttgaaatcaacattatacattttaaacactcataatcagttttaggtggttttcatcactgtcacaagttggctctgatttcagaatgaaaatgacaggaaacagcagatttttaagagaactcattcctataaaggactgctacaattaattttcactgatctcaagaagcacaaattaacttttcatcacaaacaaatcacacttttaaaattaagctcacattttcggaaagtaagacgcttcaatctgcctgcagtaagagcttgttcaaaaagtctaaaatgccactgaaaacaaagccagtagtttgcagcaacaaacagtacactcccttaaacccaaataccacaaaaacacgaaaagaatctctttgaaacaccccaagcttcttcacttacccaaatactttttcctcacatatctgagcactcactaagagagttactttgcacaagggagacattgtgttaccggctgcctactcagacatagttgtacccaaggcactgctgaacaggccttccttcctgctcaaaacccagccctccctgtgggaagcaagcccagtttgccctgtgactccatcttcactcagtgcttacatagctactgacttaggacggttactaaaaatactgctaaacactaacccaagccacaaaacaggaaaggtttctctagtctgagaactactacatgagaaagttcaagtcctgcatgttcagaattccttgtaataaaaagctataaaaatcaacataatccccattaaaaaaaaaaacctcgcttatttaaattactgtttcactgaaccaaaaacctgaatttgaaacatgacgagtgtttcattacagtataccagataaaaacaaactttggcattccaaaaaaggatattgtagttttaaaagtatagatgttcagttctcatatatactgaattcattttaatgtatttcctctaaatgtataacaatttaaaacatttttaaaaggacactgaaattttgtttatattcattatagtcaccttgaggaagaagaaatatacatttaataatgtgaaaaaagaatttttgttcatgttttaaaagaagccttacatttgaacttatttcaatttgttgtcatcttacaggaataaaccaagtttttttttttttttaagttcagttatagaaaacttcacaaataaaggcatggtgaccattatgtccaaaaatgtcagaagtagaaaataagatagcaaaagaaaatttaaagtaatcatctcgagaaggtttttctttttgtttgagacaggttctcaatctgtcacccaggatagagtatagtggtgcaatcatagctcactgtaaccccaaaccccttagctcaagtgatccttccacctcaacctccacagcagctaggactacaggcacaagccgccatggagagtcttttttttttttttttttttttaagagatggggacttgctatgctggccaggctggtctcaaaatcctggcctcaagggattcttccacctcagcttcccaaagtgctgggcttacaggcatgaatcaccatgcccaggcttcaagatttaaaattgcttttagcttagtgcctttagcaacatcatatataaattcatatttgtattatattcatagattcagttaagacccagttaagtatttctacatggtattaaaatgtttctttagtttaagtaactctatataacgaagggataatctacatttaactgttctgaattcatatttttcctcaattcaggaaagagaaattccactcactcccaaagcaagaaatattgtccaaaaaaccacttgataggttatttgaatgatatccacacagtagtccacacagaggaagaagcaagcaaatcgggcgaataggccaggagatgggttaaatattgtgagcaattacaatgtagaaactgatgtggtgcttttgtatttgctaaaagttatgggctccacatatagactccaaattgaggaatctttattgaaacttgaactcaaacatggacataatggtaagtaagcattagaagcaaacatttgccataaccacaaaagactaatgttcaaacttagacaaggtgggcttaaactctagagaaatgactgctccaagattctgcaggaagtatcatgtttaacttctcaaggcatccatcaatcacgtgtttatatatttttaaacgctgttaagaagataatgtggaataacactgctgatg

SEQ ID NO: 913489 - DNA, 4001 bp, Homo sapiens
agggaccctctcttttcttacaactgctgacatccaaggaacacagttgtttgaaaatgttgcttaacttttctgacaaattaattcaggaaaaaaacacatcctttatcttatgcgtactgtatatgttgtaataaatcaaattttattctttgcttttgctgcaaagaatcttagaatcaattttttccctcactttaggaactacacaacaccatgtttttcttccattatttctttaaaccaattgtactatttgtattgtaaatgcactccaaaatgacctgaaatccctgtggaatgagataagaaagtgaaaaggaaaaactaataacttccacagagtgcctactgtaaactagacactactctaggcacttttatccctgattctcaaacactgagataaagatattattaattatgttttaaagatagtaaagtgaagcagagacggtttaaataaattatctaagcttgcaaagctaatctgcgccaggtcaggttttgattccaggtttgaatgactacggagcctcattacaaaataagatctgaccaatttaaagactatcctctactttgaaaaagaaaagactaaatagtaccttcagcactaaacagtaccttcttctgtttttaatggtacttgtggaatttttaaattttaacttattacatgagcaaaagaccaatcacttggcactaattttaaatattatttggaaaaactaagaaatttaacacagttaacatttaatcatttccaaatgacagctagaaaatcataccataacttgaagtccaaaaagcagatataaatagagtatttatatttaagataaaactaatgaaaaaatatttgggccaaaaagaacaaattagacatattattccaattagtaccacataaaacttgaagtgctttttggtgcctctaaaaacaaaccagacaaaaacaggttttttgagggttctgggaaagggagaattataattcaaaatcagaggacagcaaatgaaatctaagtcagaacagtacttacctgctcaagtcactttttccatggtgatgatagtggtcagggtggctgaggtggtaatgctcctgtccactccacctctggggtggccttttccaaaaaccttcctgaggctgccgaacatttctgtctggtcggtcaaagcggttcatattgtcacactccactagacagattcaaaagcaaaagactataaacatgtacatactccataaaagttgactcttatagcttgataattaaatgctgtaaatcaaataaaaataatagtttaaaaatatcagccatttatgttaatcacaatatcaagatttctaaaagcataaccagttcttctggtgaaaactgaacttaatattattcaaaatgaagtaaattataatacttttacattacagtcatgtaaacaattaactgccacactgttttaaaacaggcaaattaaccttgaaatcaacattatacattttaaacactcataatcagttttaggtggttttcatcactgtcacaagttggctctgatttcagaatgaaaatgacaggaaacagcagatttttaagagaactcattcctataaaggactgctacaattaattttcactgatctcaagaagcacaaattaacttttcatcacaaacaaatcacacttttaaaattaagctcacattttcggaaagtaagacgcttcaatctgcctgcagtaagagcttgttcaaaaagtctaaaatgccactgaaaacaaagccagtagtttgcagcaacaaacagtacactcccttaaacccaaataccacaaaaacacgaaaagaatctctttgaaacaccccaagcttcttcacttacccaaatactttttcctcacatatctgagcactcactaagagagttactttgcacaagggagacattgtgttaccggctgcctactcagacatagttgtacccaaggcactgctgaacaggccttccttcctgctcaaaacccagccctccctgtgggaagcaagcccagtttgccctgtgactccatcttcactcagtgcttacatagctactgacttaggacggttactaaaaatactgctaaacactaacccaagccacaaaacaggaaaggtttctctagtctgagaactactacatgagaaagttcaagtcctgcatgttcagaattccttgtaataaaaagctataaaaatcaacataatccccattaaaaaaaaaaacctcgcttatttaaattactgtttcactgaaccaaaaacctgaatttgaaacatgacgagtgtttcattacagtataccagataaaaacaaactttggcattccaaaaaaggatattgtagttttaaaagtatagatgttcagttctcatatatactgaattcattttaatgtatttcctctaaatgtataacaatttaaaacatttttaaaaggacactgaaattttgtttatattcattatagtcaccttgaggaagaagaaatatacatttaataatgtgaaaaaagaatttttgttcatgttttaaaagaagccttacatttgaacttatttcaatttgttgtcatcttacaggaataaaccaagtttttttttttttttaagttcagttatagaaaacttcacaaataaaggcatggtgaccattatgtccaaaaatgtcagaagtagaaaataagatagcaaaagaaaatttaaagtaatcatctcgagaaggtttttctttttgtttgagacaggttctcaatctgtcacccaggatagagtatagtggtgcaatcatagctcactgtaaccccaaaccccttagctcaagtgatccttccacctcaacctccacagcagctaggactacaggcacaagccgccatggagagtcttttttttttttttttttttttaagagatggggacttgctatgctggccaggctggtctcaaaatcctggcctcaagggattcttccacctcagcttcccaaagtgctgggcttacaggcatgaatcaccatgcccaggcttcaagatttaaaattgcttttagcttagtgcctttagcaacatcatatataaattcatatttgtattatattcatagattcagttaagacccagttaagtatttctacatggtattaaaatgtttctttagtttaagtaactctatataacgaagggataatctacatttaactgttctgaattcatatttttcctcaattcaggaaagagaaattccactcactcccaaagcaagaaatattgtccaaaaaaccacttgataggttatttgaatgatatccacacagtagtccacacagaggaagaagcaagcaaatcgggcgaataggccaggagatgggttaaatattgtgagcaattacaatgtagaaactgatgtggtgcttttgtatttgctaaaagttatgggctccacatatagactccaaattgaggaatctttattgaaacttgaactcaaacatggacataatggtaagtaagcattagaagcaaacatttgccataaccacaaaagactaatgttcaaacttagacaaggtgggcttaaactctagagaaatgactgctccaagattctgcaggaagtatcatgtttaacttctcaaggcatccatcaatcacgtgtttatatatttttaaacgctgttaagaagataatgtggaataacactgctgatggtttcttagaaaagattaaaggttccctgacaaaataactgaaacaatagagaagaaatgagaaagcaaacaaaattacaagacagagacaaattcggtttccagagacaattttttttttttttttgagatgaagtctagctctgttgcctaggctggagtgcagtggcatgatcttgcctcactgcagcctccgcctcccaggttcaagctattctcctgcctcagcctcccgagtaactg

SEQ ID NO: 913490 - DNA, 4001 bp, Homo sapiens
attacagcctgctttcccgaagttaacagaacatcaatgacttataacatgtctcatttatttatggaagaagttttttttggcacattacaaatggtttttttgcacaaaaaagagtattcatgggctacttcggttttaaaaataagtatttttatttatttttaaataaataaaagatcactgccactgcactccagcttgggcgacagagcaaaaacttcggttttaaaaataaatatttgatttatcaaaggtacaatttcacattcaaaaatctagttctggccgggcgcggtggctcacacctgtaatcccagcactttgggaggccgaggcgggcggatcacgaggtcaggcaatcgagaccatcctggctaacacggtgaaaaccccgcctctactaaaaatacaaaaaattagccgggggtggtggcgggcgcctgtagtcccagctactcaggaagctgaggcaggagaatggcgtgaactcgggaagggaagcttgcagtgagccaagatcgctgccactgcactccagcttgggcgacagaacaaaactctgtctcaaaaaaaaaaaatctagttcttcaggcttttaatttcttctaacaaatcttattacgtttgaaaatctactaaattttaaacaatttcaagcgaaactttgcaacttaaaagtctctttaaaattttaaattctattcataaaccactcaattttctttcttaatatgtctatttgctgattacaaataagccttcctaagtattttactcttacaaagctaacaagcgaaattgttaagtacaatgaatctaaggttctaccacacattccaatactatttaagaacttgaaacttttcttatacattttaaccattctaagccagttacacattttcaagtacatatccgatctttattgaatgaaaccatcatataatgaatcagcaattactgaaatgttggctcagaaaatcagttaagtgcaaagcccagattttctatcaacgcctttaaaaaaactgagagatgaaattgtatatattaatacttgccgcctacctgatgtttttaagtatatatacactgtggaataaatttagctaacaaatgcattgcctaacatagttatttttgtggtgagaacactaacatccactctccgtttttcaagaatacgtatatcgtcattaactatagcctccatgctgtacgacatatctgtgaacttgttctcgtatctaactgtaattacgtatcctttcaccttcccaatctccatcctctggggtgatggcgaaaagcaattaattctccgagtgcacttaggcagtgatcaccttgcgcctggggccattctaaaagtagtggtggtgaactcccaagcctaaactaggttaatccactattcctcccgcctccgaccctcactgaaaaccacaactgaccctcctagccagcacactcgctggctcgcaacaggacgcagacaattgctgatgtacttccctctcgacacactccctcccatgcagtcgctagaaggcctgcatttttttggatagcagtaagattcgctcagaagtcgcagttcccttttgccggtcgaccgggcgaaccccctcccatctcacctcttgatggtaacgcctcggaagaacgggtaccacgcggagaactggcagtgaagcacatgctccttcttcatcctccagctgccgccgctgctgcctttccctctcctgcctgcaccctcccggaactctgggcgccggccccggaagtgcccgccgagctattttggttcaaggactcttccggtccctaaagcaagaaggaagaccgagaaaaggaagcggaggagaatcccggggcatacgcttgacacacacgcatacaaaaagagctttagtctcgaaagaggaattaccgaagtgtcgagagaggaattttaagaagtttacaactccgtcttcgccctaaacgcacgctgacccggaaagtaatctcctgaagctaggtcaaaggcgggggttctacggatgccggaaggagggtgcgcgcccatccttttagcaccgcgagaggcgccggtgtttcgagccgtggcaccggcatcggctgacactgctgcctccagctagttatttcgtcctcttccgttcttcacccctacaccttggagtaagtaaccggggcaagccagtcacagcacaaaacctctttggggaggagaagaagaaggggaaagggaccacatctgcatggtgcgtgcagccgcgcggtgtctcccaggctgcggctgggcacgcgtccaggcgcccaagagggaaactggggattggagggaaattgtggattggagaggaagagcctgggctactccgagtaaagaaagcggggaacaccacagctaagtgttagttccagtgtaaagattgcagcatctgcagaggagtagaatgcttggtagagggaataccgcctgtacgatcctggagggttcgactttgggaggtaaaaggcgagaggtaaatgtgagaaagcagaggaaagaggagtctccttggagcgctgaattcgtttagtctggcctcgcaaaagttgtcaacctggaaaaaacgcagatttttatcagtattcctgcgatgatcgaatcataagactggaagaattcgaatcgaacttgtactatcgttttttcctttgcttcactcctgtcacccagcaaagttcagttttgtttgtttcgttaaaagaatgagaagtaactagctgcttttatttatttatttgagacggagtctcactctgtgcccagattggagtgcagtggcgcaatcttggctcactgcaacctccgcctcctgggtttaagtgattctcctgccttagcttctcgagtagctgagagcgcgcgcgcgccactacgccggctaatttttgtgtttttagtagagacggcgtttcaccatatttgccaggctggtctcgaactcctaaccttaggtgatctgcccgcctcagcctcccaaagtgctgggtttacaaggcgtgagccacggccccgggcctaccaaccagccgcttttaacccctagtcgtgtcgcttaccacacgagctttaggcttgcgcgaggcatctgcgtctaaaagtatctccttaaatgtacattcttcctggttcacctaagtagttttaaattagaaacagccccaccgactgcaggcctcttcagaagggtgttccttagaataataaacaattatctgcgtattttgagttagaaactcttccccccaggaatatatacattgttttgggttgtgttttgtttttctcaaaaatgttactggctaagtggctagttggaagcagtgctttaaagaatacattttcaaagcagaggtaaatagattataatgttgcagagtatgttggtggggatggacagtcatgattcatcatttatgccttgatccggaactatgcagtcctttctgatttgagggaaagaagcaatattgtatatatgtctggagggtggtgccagaaagacttaatggcagacaggagcagtcgctcaaataattgttttgatttgacttagaaagtaaaaaattgcgcggaaggagatgttagcatcgatgggggatttatttaggtcagatgttttctaatgaagataggaatgaatgtacggaagagaatagatcccgggaacatagcccttctgcgaggagcagtactttaacagcccaagaaacatttgagcataggccgggcgcggtgcctcatgcctgtgatcccagcactctgggaggccgaggcgggcgcatcacctgaggtcaggagtttgaccagcctgtccaacatggcgaaaccccgtccctactaaaatatcaaaaattagccgggcgtgttggcgcatgcctgtagtcccagctactcgggaggctgaggcaggagaatcgcttgaatccgggaggcg

SEQ ID NO: 913491 - DNA, 4001 bp, Homo sapiens
acccagcacagacggggccaggatgctagctctgggcctcccacccctcactgctgtcctccagcactcgaggcagagcttcctggttcacaccagtggcttctgtgtgccaccttcccaactcacgggggacacccaccctctaccacgagacactctgccttcctgccctccccagccctggcagccagaaccaagccttgctattcccccaggcaaggggccccttcccagctcctccttggcagagtaacatctagtgcccccacccctgtaggtgctgaccgcagtgcgcctacccctgcaccacgaaccaagcactaactccaagccagctctccccatcgtgggctgactcatcatcaccatgcaactggccccaactaggttcttaaagcccgccccaccccacaccccacaacctaattcttccctgtgtgagggtctgactccacccaacacacacacacacacacacacacacacacacacacacacacacacactcctgtgtctctctagcttatttcaaaatccaaattagggttggggcacttcccaaggggctggaaggcgaggtcaatgtcaatgccagctctggtctgagagggcaaaggacgtagaaaaagaaggctctgctttctgaattactagggaggatgggggagtattactaccgaggaaaggctaatttcctcccagtggaccgctgacagcactagggctggggctggggtcgcagtggggcggcggctggcatcggatctccgctcacagcacggaggcagcctctctaggtgcccgctccgagaaagccaggcagagtccccgccggctggcgccgtcactgccttggaacacgcgggctctgctcgagtcctgggctgacctacggtggagatgaggggcagtgctcccgggtgccagctcctgggggcagccagcaccgctcgtagcggaccagttccagggccaggaaggcgaagcgagagccgcaaaaggctcccggctcctcgaggggcgcgtcttcccatagctggaccgaatttgggaggatgtgtaagtcccctggggtctcccgcgggcacagggacttgatgaggggaggggagaactacgtgcctttagttcccctcagcgcctctgcccagcccgcagtaggggtgcgccccaccccatccccactgtccaaatggggacccagggctcagaaggggaggggattggatcccaacgcgctccactctcgaaaatctctccaccccagacctggaccctctccgtagcgccgagagcaaagcccccaaatgttcgcggtcccaggaccggggatgggggatgggatgcctgtcctcccaaggccaacgcgaatggaattcgagttcccaggaatcaaagttgccgcgcgtcggggagctcggagcggggcgcgaggctagggccaggggcctgggaccgaaggatgccgcgagcgcccgccacgggcgatggccgcgctgggaacaagtggttcggcagccgcggtcaccaccaacttccccgccgcgcggcgggcgaacggcgaggggaaggagagggaagcgaggagggaagaggcggtgcgtggctccgggtaccgtgtgcgtgtgtgcagcggcgccgcgcctcgcctcgcctcgggctctgctctccgccggatcggcccccgcgggccgcctgctctggccctggccaccgccgcgtcttcccgccggcgcgaaggctcatccgcggcgtgccggcagctcctgggtctccgcgggccgctcgccgctcgccgctcgccgctcgcaacttcaggcgcgccgggggctcggactgggcgcgccccaaacgtccagaggctctgccaccccgcgctccatgcccaggccgggctgactagccccgaccacctcagcgtccggccgccgtcggacgcgtcctctagccaagcatcgcgcctgcagcccgcgtccctctctcccgagccgccgccgccgctcaagtccgcgatcaactttcccttgcttcccccgccccgctcggcccccgccccgctcggcccccgccgtccagaccccgcctcccgcagctccctccctcacctcccgcctcgcccggcccccgcccgcccgcccgcgctcggcgctcccccacccctcaggccgccaggacccccgagctcccgcccggccccgcccggacccccgggagcggcgccgagccccgccgggcgctcagggcatgaatatttcagtgctggcgaagctgccctctgccgatgtcatggcaccggctgctgtggcaactctacgaatcccccaaaggggcagggaggaagcccgcggaagaggccccaggtgcgagacagagcagtgccccgccaggccgccagccgtcccgcagaggggcgcgcagggggatggggcccccagcgtctcgtccgccccgcgcctcaggcagagcgaggtaacgctcccgggaagcccgggcgggcgagcgggcgctcggcctaggtgagcccgcgccatctgttggctttaagcgccccctctctgctcccagagtcgctgagcagtccctctagtccttggggcctcttggcctacgcttctctccaaccagctgcctttgcccacccgactcgtgcgctcccatctgcgcctcctccctcactagagctcaagaggcctccaagtgcttagaaatggaggaccccgggttggaggagacccgtgaggtcacttaggcgccctcacccctgcgggagctccgtctgcagtgcccgagtcatggtctcccggctcctttttgcacacctatagggacagagactttatggctttctgagacagctggatcaagaaagggtccatatgcaggtaatggaagaggtttatcccctacctttgatctttacttccccggggctaagcattctgattttttaaaactatttctcacatgacaggatttccgagctgtcactgttccagtcagtacattgacagtacctgcctggagccaggctctgggctgagactttctgggcctcaactcattctatcttcaataaagtctttctggtgggccctgccattatcccagttttacagtgagaaacaggctttaggaggttggggacttgcccctgtggtggagtcgggtattgaacccagaatctatctggttccaaagctccagttccttaccattcgctcattcattattcattcattcattcacagtcactgctatgtgctagctaactgaaatagtttctaggaataggatggagaacaaaacaggcttggtctttgtgccccatgaagcttctctagtaggggaaccagacattcatcaatgaaacacataagcaggtaaaattacagccagaatcagtgctaggaagaagagtgctttaatggcgcctggccgaggggatcagggaagacctcctagaggaggtgactgagctgaaggatgagcaagggagagagagtggagttttaggcaggagaaacagcatgtgcaaaggccccaggtgcccactgcaggcaacggctgggccaggaacaatggtttggtgaccgcagtcgcaatcaacttgtgcaaaggtgggaaggagctggcatatgtcaggaagtccagaaagggtggggagagctccgtgcctccagcgtacgaggaaacgctcctgggaagcttgggagggtgagtgagcctgcaccatctgttggctttaagcaccccctctctgatccgagtcactgagtggtccctctagtccttggcagtgactgtaaagccacaatggagtgggggccagactgtgcaggtgtgttggccttaatcaggagttgatctttatcctaagactgaaagcttcagaggccgggcttggtggctgacacctataatggcagcattttgggaggctgaggcagtaggatcactaagactctatctaaaaaaaaataagagagagagagaattgattg

SEQ ID NO: 913492 - DNA, 4001 bp, Homo sapiens
acgcctcaggctgcaggcaggatggcctgggcccgattggcagaaggtaacactgggcccctccgttctccaccgtaagtgcctgcacccccaaagcagtgtctgtggcctcaggttacctcccctcattctttgcttcctttgtgctaaccctgtggcttcctataagatcatagggttcccatctcacatcctacccacaccctggttaccagttctgctggctgaacctaagcctctgtctaaccattttttctcaatctgttccaggctctaccaagcctccttcctactctcagcctgggggttcagatcacacacaattctgagcttctggatcctccactgctgagctctatgtagccatcaccaccctgggcctcacggtggctgccacctttcatgcctcttgtgttgcctgactcctggcccccagagcaactgggtcttgttgctccctccctggggacagaccagtgcctgttccccacctgccccctgccctgattggctctgagtgaccaatgagagatgtctgcagggaaccttaccatttggcacactgacagagcgctctggtaggtcgctggcattgtcaatcactgagagagtgacctcataggtggcaaccagctcccgattcatgggggacttcaccattacagatcctgtggaccagaccaggccaggttcagcctgagaagaaccccctaaaatctgcccttcccaggggtgctcctggccaaaccctcccaatccccacaaaggatgacggtccccagtagaatctgggacttgtggctggggtgggcccacagcctcctcataagcttgggtcacgtggctctgcccctcccatgatgcttactaagcaggtgatgttggggaagttatgtcacctctctgcacctctgtgtccacatttgtaaaactagataattacactaccgactgtcaacccatccttttctcaataccctactattttgaggattagaaaaacaaaatgagtttccatttgtaaagtacttagaacagtgcgtggcacacagaagctatgtaactgcttgtttaaaaactgctgtattccttaacaatgcaaatgtacttaacactactggactctacaattaaaaagtggctaaaatggtaaatttcgttatgtgtattttatcaccatttaaaaaatgcttagattctagggagatcaagtttaaaggaaagtcatggtagctgaaaagccctgaggggttccctggaggggacagtggtgggaccgtctggatacttcaggcccatccctttgtcttgattaaatagggagtgacatgggctgattgtgggacaggagcattggttccatggcagtcctagcaaggggtttccttctgttctacccactgcctcccagagtccctgcctgctccccaaatcagagaggaaccccccagaagcatgggcggggactggacagacctagtttggctgacctcagtgctgcgtttcttgggacctttcttgttcctgcctgttagagggcctggtggcttctcctcccattggcttcatcccagagtgagacctcctctccctctcaggtacaggggtatctgagattcccttcccccttggcagatccccctgctgggcttctgtcttccgtgggtccccagccatggggtagtcacttaccctgggccgcctcctcctcctcctcctcctcctcttcctactctcgctccctgtcccccaggctggggagcgaggatggggagagggcggctgcattcagtctgcaaaggctgggccacggccttggcccaggccccacaggacaggaagggtggtgggggtgtggtgggcatggaggaaggcaatggggtgaggcagagaagagatgaggtgggaagtgacagagaaacagagctcaaacctgtgggcctgccagccatgaggaagagagaagagggttaacatcagttagttcagggtgcagcagggatggagcagagcagggcagggaggatggtggggactcagagctgacggggtgggaggagggagggaggggtggaaacagggagtggggaggggaagaggcactgggaaggaaaccaggggagcaagtggaagcccatttggagtggagagctcaggggctgaggctctggcaagaagaaaaggtagcaaagtgggcaagggaggagtggagggctgaggaggagggggcagagaagacactggaaagaaaaatagagaagagagtcagctggaggaagggggaacaggaaagagaaaagcagtaggggattgagcagagcctcaagttgagtagggacgtggagcagctctccatggtcctgaccaacccatgcagccaggaattttgctaacctgggatgtagctggttctatctaacttctcctagtgctcatggtttttccttcttctgtttccctttgggcctcaaatgcagattgagtttatcatgttctttggctcgctgcacactatgaccactggcacttctcttgttttatgtgtgcgtctactccctttcattcccatactcatctctccttcccttctcccctcaggcagtcattgtaatgtattgaagtatattttttgttaataaaagtatttctgaaaatcatgtattattttgtatgtattttacatttatggaaatggtgctgtggcatatatctcatcccatttattatccttttcagtaaatacttattattaggatccatctacattgctctgtgtgtgtctaatttattgcttctcaccgctggcactgctggctggtacccccatgatgcacacccatgatattttactcttcagtctcccagaaatggatacctgcatggccccaactccaccatcaccaataacactgcagtgagcatcctcagacagtttcattaatgccctgagactttctctggaacatatactgggtaatggtggtacaagtgtcccttatgctggattgctatccagacagtggaatcagtcacaactcctacagcagtgcatgagggtttccatgtccccacacggtcaccaatatcaacattgtccagcatcctaatgtccactaatcacgtgtgaaaaactgatatcttactgctgttttagtgctttgtcacagccatgttgattcttctatcattcctctgggccttccaagaagtacacgtatcagctccatgtccctttcctaactcctcaaaggagaaaaacactgaacttttgggaaaatgataaaaccatcagcattacaataaactacatacattgtgaaagataagccatggttctcttggtttcgtgatagtgtaagaaaatcattgatcgcatgcaacttgcagaggatttaaatggccagcatacatatgaagaaagtgttcagccacctagttagtaaagaaatgcatattaaacaaggtatcacggctgggtgcagtgactcacgcctgtaatcccagcacttgggaggccgaggcaggtggatcacctgaggtcaggatgatcaagaccagcctggccaacatggtgaaaccatgtctctactaaaaatacaaaaattagctgggtgtggtggcacatgtctgtaatctcagctactcgggaggctgaggcaggagaatcacttgaacccaggaggcaggggttgcagtgagccgagattgcaccattgcactccagcctaggtgacaagagtgaaattccatctcaaaaaaaaagccaaaacaaaaacaaaaaacaaaagaacaaacaaggtattactttcctctaaaattgccaacatgaaaatgttatcatatttaatactggcatgatgtggtgagataggtgctctcatacactggtagggcgagggaatcaggaaggccagaggagctgctcaagggaggatgaggaagcagagaaagaaagcaaggggagagatggaaaagagaaggacggttctggtttccctcca

SEQ ID NO: 913493 - DNA, 4001 bp, Homo sapiens
cccaatggagtgcagtggcatggtcttggttcacttcaacctccgcctcctgggttccagcaattctcctgcctcagccccctgagtagctgggattataggcgtccgccaccaggcccggctaattttttgtatttttagtacagatggggtttcgccacgttggccagactggtctcgaactcctggcctcaattgatcctcccacctcagcctcccaaagtgctgggattacaggtgtgaaccaccgcacccagccgggtttcttaaagtgacatcacccccaaaggtatgttcttgaggtcttcctctaatcagagaaagactgccttagagactaccccattcctgtgaaagcccccaaaagcccagaaagcagatcctgctgtctgacttcctggcccccacccattgctgtctttggtcctggctgcagagctccagagacatagagaaggacagcaggacagcaagagacagagagcatccccaggctggggcacagcacacagctcccagccacccagccggctacctcagagatggaggagtggcaggaggaggctttttgcaccatccgctgtgcaaagagctttttgagccgcaggtaatcctccaggaccaccttcagcagcgagccctgggggagggaaagggttaacccccaccaaggccctcccctgcctgccccgcccctcgcccactccctctgggagtaaggggtacacggacatctgatcctggtgatcctagggcagaggatcagcggcagagcctggagacagtggccagcctggacacaggtggactcactcctgagccctgcccttaaggccaccgcaggctggagtagccccccatcagccctggtgttctcgccccagtggagggtgggtctagctgagcctggaggtctctaccaccctgtgttctctggagtggggtccaacctcagccaagggactgggcgcggagcctgcagggaaggctcaccttgattggcccctcacgaatgatctggcccagcttggcaatgttgtcatactcctggatggcagcccgcaggtatcggtcatcatcaggcttgacagctgctggctcacgcccaaaagttccctggggagaggggatgttagctggagcagaggcagaccccacacacatgtacaagggagggggccaccccttaaagaacccagcttcttggccagaggttgcaaagacccagcccctccacccctgccccttgtgatgcctgaccgcctctggctcacatgggtgcgcgtggggctgttccacaggtcggcgatctcactcaggttctccggtaggtcatcctcatgctccgcctgggcggccagctccaggttccgacagaagggatccagccacacagggttggctctgcagttggggagggaaaagggtggggagggagggaaggctcgagtagacaggtgcccttccagcctcaccccacatcctgcccatttccctggccatatagtgcctttcactgacttggggtgtgaggccctggtgcctgtggtgcatgctcccaccataggatcctgctggaaccaggaccgcatgtcagtctggattgcctttggtgcagaggcttcaccctgcacccactgcccaaagtctgcatcccctggaacttgaggcccactggggtggagagcccctgtcagccacgtggtttctgagggtggagggagggtgaagggagggtggcccgcccaccagggggcgcccacagcctgggtttcggcagccccagcgctgggagactgcagctctccccagctgggtcctggcaggactccccgcaggggaccgggcagggccagtaccccactcacccatcaaaggagtacttgttggtgttaggcatgtccatgatgtcgatgaagccacgattccctgcagggagaagggttggggcatggaggggaggggcatagccaggggtaggggtggtgttggggggtgagggaggatggggtgcggggcatggtcctgggcccagtgaagggcctgagccaggcttgtggctccggtgggcactccaggtccccagcccactgccttctcacctgtgtccccactatggccctcacttaccagctgagccagccacaatggccttgagcttcctcttgtgtctggagagaagcagagaggggctggtgaggggggccaagctgacgtctcaggccctgcctgcctcgtggccatccgggagcaggtggtcggccccctgatggcaggggtgggggacactcacacagtcctgtagtaccagttcatgaggacaaagagcatggcggccaggaacaggaggatagccaggacgatgatcgccatctgcgggagcaggaccagggtaagcccgggcagtggggagggcggctagggctgtggggcacggtcgccgggtacctgcagggcagacatgtcatccggcagccggacagagatggcaggctgcacgtccaggacgttgtagttccggaaaagattccgtagctgctccttgttctcatcgatcatctggatcaccctgggcgaggggcaggggtctcagctctcctcctcagccattcccccaccaccgacagtctgctctgctcctgcctcaagcctccaaagttcaacaaccccaagccttgcaagattgaggtccaccggctgggacagctttgtgttttacaaggttcctcgaaccttcatgtaggatcctgttccatccttacagtggatggaatactcccttttttttttttttttttttttgagatggagtcttgctctgttgcccaggctggagtgcagtgtggcatgatctcagcccactgcaaactccacctgccaggttcaagcgattctcctgcctcagcctcctgagtagctgggattacaggtgtgtgccaccatgccaactaatatttgtatttttagtagagacgaggtttctccatgttggtcaggctggtcttgagctcctgacctcaggtgatccacctggcttggcctcccaaagtgctgggattacaggtgtgagccactgcgcatggcctgaatactcccatgttacagatggggagagggaggctcagagggacagagttgctcatacccccaaactctgctctctctcctagccctgccccagtctgggagatggccccacacagtgggcctgatggtgtggtctgtgtctcctttggtgtgtcccctcccctactccagggcagggaggcaggcagacagacaggctgacagtccaaacacaggccccgactcaccggtccacgtccaggatgcggttggtatcgcggttcaccacgtggataagcagttctgtctgcgcaaagttcacccggcccttcttgtccacatggaactagatgagaaggggtattgtagggtgtggccaccacagcagggggccacagggatgggcaggcctcttttaggaaccccttctgcccttccctgcaaatagacccttcactactgaatgtttgaatgtttgctgaggaccaggcacggtgccaatcacttcatccacacttggccaggtactatttattattggccccattttatggaagaggaaactgaggcccagagacctgggagaactttatcaaagctgcactgataggaaatgactaagtagggactatactgcctttcacgccctggcctttgcacaatgccctgtctctccttgtggcctggcctccccttccttctccctccactgccccggccccgggtgggcccatgaggcacctgcacattgtcagtattgacaatggccccagtgatgttggagagcaggtggatgaactcctcctcgaagccgcgcacacggtcggggatctcgttaatgacgatcttgacgcgctggtcgtccctcaggatgtagatgccgatgatggccgtgtcgttgtggcctgccaggtctcgggccacaatgtccacca

SEQ ID NO: 913494 - DNA, 4001 bp, Homo sapiens
ttcaaccagggtgatgtttccaaaagtggggtcaacagaaaagacgcttctagtgctggggtcaaagctgatgtggtaggagatggggtctccctcagggtctgtcccattcagggtgtatacgtgagagcctggaaggaaacacagtggagagacatagaatctgagacccaacttttcctaaaagtggcagatgctcaggaccaacgattcagctgtttataaagtgactattcaactcagtgccaaaggtactgccctgaacttggtgctcattgctggcctcacccctgctggctgcttccctctttgtatgtttattcttcacagcgggtggttgtgatgatcagccactttccagattgtaatctataacacgggttacagagcaggtgcaggtctgccgtgcctaactgtagtgcctatgttctgctcagcctggtaataactcctctctcaggatccaagattgaggggctcctgggtacagggaaggggaaatgggagcagccattaaggcaggaggggtgacccacagtgcaccactgtccccgatgcctggacctggttctgcagggatttctgagccaggtgcctactttgctctgctctcccttttccccgggttcccactacccacaaagtgagggagaaggagtgtgaaatctcccctttctcctcccctctctctgcatatctcagcaagttggatgttcttaggccgttttaaagcctagagacctggggctcagggaggtaaatacatttgttcaaggtcacacagccataaggggcagctgtagctgcctgcctcgcggggcgaccctgtctgtgggggggagccctggtctccaggactggccagacttaagtcgccatggcagcaatgaccttctttcctgccattgcccaggggaattcggagagcaaacaaggagcccccgggcgcgcgcagcaacttgggtggtgcctggggcactttgtgttctaagtctgcctgcacccctcagggagacctatcgggagcaggtgccagggctactcacctacaggggtgtcctctgggaggctgaacagagccatgtttccgttggtgctgccgaccccgttgtcgaagaagtgcggggcgaagttggcctgagctggaaaaagaacacagaacagacggacacccaggcaaaggacacccagacaccaggagggagcttcgcaccagcgcggtcccgcgtcaggcccagctactgggcaggagggcgctccgcctccccaacccaagtgcaccgagggaccccactggggcgccgcccagaggatgcccctgacccccactccgcccccggtgggctcgggcttgtcagggacacgtagcatgtgggcgcttagaacccaggtagcaatccaacccctccttcatcaatgggcagattgcacccgcgctcggagaggggcagtgccccagcccagccaaggtcaagccgcgagtcagggcactatctcctgccccacgcagcatcggagctgccaccaagcctacagctctggttcccagcaagcggagagcagcgggggtccgggcgccaaaccctggggccctaggatgccagctctggagaagcgccccggagctccccactactccgctaccccactccccactaccgaatgggccaggaagatggaaggacttctccgctcccgtccaccagcccgagtcccactctggaagtggtccaggaccatgtccctctggccacctgggtgacgccagcgcccatctccctcgccatccacgcggccagcgcggcccagcggccactcacccaagcagaggcgcagcagccccagggccagggcggcccaccggcagcgcctcatgtctccgccggcgcggagtgtcgcctgccgccgccgagaccgggcgcaggggcacggagcatgccctgggcccgcggggagggcagagaccacaatgggggtagcggcgactgcagccgcggcgggagggggcacggggcgggagcggcgggtggcgtgagggcgctaagaggatgacacggctcggatctgctcctgccggccgcctgacgagaccaattagcggcgcagagcggagcgacaggctcccagccgcgggcgggggcaggagggcgtgacaagaggactccccgcccgccacgccccctttgccggcggcccccagtcctggacaggaggacaccatgggggacaggagtgtctttcccccaagttgtcctgaggctttcccagggtacttaagtcctggtggggcttgggcttcgcagttttcttttctcatcaacttcctctgtgactttcaggggcttagctgtcttctctgagctaagcattccagaagaaaagttagtggagcggccgagagggccttgccttagcagtctaagcaggttctataagccgcgtgagaccaaaggcaaagagaaagggtgatggatgggcagcagatggtaaggggttatcaggaccccctctctgtgatctcaacccattcctgccctgttccccaggctggaccacctctcccaaagggtctgatctgtgtggtgggcagcagggaggaccctcaggtgtccaccagggtgagaggcagttctgctccccattcccagtcagtgcccagtctgggaccatgaaggggcagctgacccactcttcaaaccttccaaggaagagtgaagggcctgaaggcagagttaagccccatcttaggacagacttgcacagagctggccaagatagatctgaactgcccgagaggcacgagatctcattcctagagggtatttacacaaagcaaggcactgctattggggtcctggatgctgataacttgaagacacaggtaagcccaggaacctttttggctgctggtaaagctccttgggcttcctcgttctcctgctctgacactggagggtgcttggaaatgcagcctgttttccttttcctggttgggccatttatgggggtacaggtcacttcaagcccaagccaggccacttcccaggatgcccttgggtggatgtgttctcagatagaggagatccctcctctgtgtgctcctgggagaggtctccacagctgaggactcagcattccccccctccccctgccaggggcctttgagggaacagagcaccccccatcccttggtctagccctacatgatctactgtgagcaagggtcagggatttgcagagaagaaggaagatgaatcaatggttttagaatgtgcagcagttttcaggcctaattggccgaaacccttgttgagtctccttaggcttggctcttttgctgaaaagacacactttaaattgcacagatgttctgaatctgcctcccaaagtgctgggacaaagctaaggcaagtattctgcaagtcccatatagggatgtggagactgagtcttgccgtggatttcccaggagccagaggcagagccaaggtttcctggagtagatgtcttggtgggccgagaaaagccagctctccctgggtcctgttagccctgctcctcaccaatctagggccgttgatttctctctcctcagttccctcagtcaacagccatgcactggagagggaaggggaaggagtagcctacatgccatgtgctgtatgtgtgcttatgtatatttgcccatattatcttatttgacctgcactgctctcccaatgtgattttctctgctttgcagaggagggagatttcctcattggctgtgtacgaccaagcaagtgacttattctctctgaggtgcagagcttggattcacatacagtttgggttggctccaaagaaggttcaaactctttttttttttgagctggagtctcactcggtcacccaggctggagtgcaatggcggatctcagctcactgcaacctctgtctcctaggttcaagtgattctcctgcctcagcctttcaaatattggcattacaggtgcacgcca

SEQ ID NO: 913495 - DNA, 4001 bp, Homo sapiens
ttaatgcacactggtactacaagacaacttaatggttgaattttaataaatatttaaatgtgttcatattacagaagttgtagcattgttaaatcattccataaaatttattttactaaaaccactcaccttctccaattttctctattttggtataatcttccatagttagtcaatgggtatggtagatcctaaagtgaaggaaaaactgacttaattacatgccactaactcgagtagttttaagcattaatgaaacactatatgtaaagcattttccacagtgcctactgcagcataagtattccataaatattaattacattcaaacaatatttacaagggtaaggactcctacaataactttccatccttcttgactcctgagacattggaaacgtgtatattctatactagtgtagtatttagcttcttccaatcaaaataaccctcaaattcaggtatcaacttgtctattctttccaaacaaaaaccagaattatgttccctttttgtgacactttaaagtagtacctgcgtgtgccaaagttatacccaaatatttcaacaaatttataccgctttatgatactcctaattttattcaaaacattattttttaaagttatgaggacagaactaaaatgtgttcagactgttcattaggaaaattttgtttaaaacgacaaaaacattttaagtgtttacagttgcccacgtgacaattttaatctttttcctctgcttgctgaggtcacagacaaacatgctcaagactttcaaggtactttttccaagagtaggaaatatcacttaagcaccgtaaaacaaaagaatgaaaagtgcaattccacagataaaattctaattataacctaaacaatgtcaaggactaagcagaaaaacggtatacttgaatcacaatgaatgggttaaaaaaaaaagctgacaaccagaagttcaagacttcctctgaagtttgccaatgaaacgtcagaactccaggcataattacctagatttttctaacacccatcactgatgataaaatcatttataaagcacactcagaatagacctttaagttctatttctcacattcatcttcaaagaaaaatcaatccagaaagaagcagagatgtatctttttaaatgaaaaaaactgcactacactgctcatgagagttaagtgcctgggctgactgttcttaacagctccaggtgggccggggccgtgggcagagcaagcccaagaaggcccacgagttccaggatcggtttctcagggcggcctggctctagggacccgcgcctgtacctggcccaggtgcggtcccactttcccacccccgaggcgggatggcagggcgcgcaggggccgggcccaggaaagagcctgctactccgcaggcgctcagcgtgggggagcggattttgcttcaatcaagacccgaaagcctcttcaggcagttcctgagaacagccgacctcgactcatgactgcagccccgaacccccacccccacgccgcctaaccccgccaggctgggctcccatagcctccctctaaagccagcccagtgtggctcacacggccagacccaggcgaaggccctgcccaccgccccccgaggcccagccgggccccgcgcagatccctgacctccagtccggccttcttagaggaccccgttcctcaatactcgccctccgaggccctcggccgtcccctagacacgaccctgaccccagccactgtacccggcttattattccgcggcggccgcagcggcagctacaacaaccgcgtcgctctccgctcaatttccaagagccagctttgaagccaagtgcgagcagtttcaaactcaccgcgctaaagggccccggattcaccaatcgggtagcccgtagactttcaaagcagccaatcagagcccagctacgctgggcaggccttcccgggtggctagagcgcgaaagaaagaggaaagggcggctagagaaaaagcaggagggcgggcgccaactgagtgcgagcgcaagcgctctcctccagtcgggagagtgtcgtcctactgtttctagtcagcggagcaggaagctactgttcgctccgttcttcttttaaattttttctcccagcattggcacagttcaaatttattatactcaaaatagctcatcaaaaaagtgatattgtgtttacatcgagattccattactttcacttctaatacttagggttaggagtgtatagttatgtttttctaaatgcgtgatttgcgggctggctccaaggagcacatttcagtgaccttaagaaggaaatggaaaactcaaaagaccgcctcaaaaatgtaaaggaaaatttattatttatatcgctgtgctttgtttctacctcatttttgaatttaatattaaattattttattatttacattttgtttattatacaattaaaaacatttgaaatgtattaaattttaaaatattttcacatcagaattttaaatatatagagagaggcatgcatttagagactgggtctcattatgttgcgcatgctggcctccaaatcctgggctcaagcaatcggcctcagcctccagcgcagctgcgactacaggcactcgccaccacgcctggcttaaatataattaaaacacaaaaattcacaattctatgaggggagagaaagaggcttaaattatgctttaaataatccagtgtcaaaaactctgtcttcattgccatccatcatatccttgagagagatttctgcacttactgcagttaatttttttttcctttttcttgttctttccttctttctctctttctttcttactttttttttttctgtttgtttgcggagacaatgtctccttatgttgccctagctggtctccaactcctaggctccagcaatcctcctgccttggcctcccaaagtgctgagattacaggcgtgagccaccagcccaacctaaacaccattctaaaatctttttaaaataaacaaatagaacagtaaaacagagctagacataataaaaatccattttaaggatttctggttgcattgatcctaatgggacatagaacaaagactgattaccacatccactacaagtatgtattagaagacccaaatcaggatatggaatggaacttccttacccttgtgatatagagtatatcacatgcacttaagtgtttaacaccttttaacacaatgagctgcatctatcatctggtgttatacattgcatctggctcaaccttgacaatttttgttcctaggcaacagaggcagagcatttgggagtcatggtgtaggtaggaatttaagaactcctgctggagcctaatcacttttaaaacttatgtttaaaatccaaacttcattttttaaatgaaaactcactgccccagagaagtgctctagggaaccaggctgttctgtgcagtttatggtactggttttaatgaattttaatatgtctttctctttgagaggcttaagaggaattcaacttctatatcatctaaaaatggcaactaattcattatatccattttacctttaacataaagaagaccacaagcttccacagctgtgatgctaggtgtatcaatttaactcaatcatctttctttataaagtttcagaggttattgtaaatccatgctatcatcttggcaaatacagtttattaccctttgggccaacttctatgtagtatctccaaagtgcaacactgtgcttcatagacacaaaaatgaataagatacagttaccgctggaggtgttgagggtaggggagcaggatgataattgggaattctcttctggtacttaccttgtaacttatgttacagggcaatgtgagaacccagaggaggaaactgctaatgctagcagaagtgacatttgaacaaaggctggggaaaggattctggagtgggccttccatacagaggaaattgtataa

SEQ ID NO: 913496 - DNA, 4001 bp, Homo sapiens
taagtgtttagtatcagaagactgtaagactatgggggtgaggcgaacggtcattagggattcggtaatttcaattctcttgaaatgtgagcaaatttgcgtttattaagtaaagaacatatgttaatgcacactggtactacaagacaacttaatggttgaattttaataaatatttaaatgtgttcatattacagaagttgtagcattgttaaatcattccataaaatttattttactaaaaccactcaccttctccaattttctctattttggtataatcttccatagttagtcaatgggtatggtagatcctaaagtgaaggaaaaactgacttaattacatgccactaactcgagtagttttaagcattaatgaaacactatatgtaaagcattttccacagtgcctactgcagcataagtattccataaatattaattacattcaaacaatatttacaagggtaaggactcctacaataactttccatccttcttgactcctgagacattggaaacgtgtatattctatactagtgtagtatttagcttcttccaatcaaaataaccctcaaattcaggtatcaacttgtctattctttccaaacaaaaaccagaattatgttccctttttgtgacactttaaagtagtacctgcgtgtgccaaagttatacccaaatatttcaacaaatttataccgctttatgatactcctaattttattcaaaacattattttttaaagttatgaggacagaactaaaatgtgttcagactgttcattaggaaaattttgtttaaaacgacaaaaacattttaagtgtttacagttgcccacgtgacaattttaatctttttcctctgcttgctgaggtcacagacaaacatgctcaagactttcaaggtactttttccaagagtaggaaatatcacttaagcaccgtaaaacaaaagaatgaaaagtgcaattccacagataaaattctaattataacctaaacaatgtcaaggactaagcagaaaaacggtatacttgaatcacaatgaatgggttaaaaaaaaaagctgacaaccagaagttcaagacttcctctgaagtttgccaatgaaacgtcagaactccaggcataattacctagatttttctaacacccatcactgatgataaaatcatttataaagcacactcagaatagacctttaagttctatttctcacattcatcttcaaagaaaaatcaatccagaaagaagcagagatgtatctttttaaatgaaaaaaactgcactacactgctcatgagagttaagtgcctgggctgactgttcttaacagctccaggtgggccggggccgtgggcagagcaagcccaagaaggcccacgagttccaggatcggtttctcagggcggcctggctctagggacccgcgcctgtacctggcccaggtgcggtcccactttcccacccccgaggcgggatggcagggcgcgcaggggccgggcccaggaaagagcctgctactccgcaggcgctcagcgtgggggagcggattttgcttcaatcaagacccgaaagcctcttcaggcagttcctgagaacagccgacctcgactcatgactgcagccccgaacccccacccccacgccgcctaaccccgccaggctgggctcccatagcctccctctaaagccagcccagtgtggctcacacggccagacccaggcgaaggccctgcccaccgccccccgaggcccagccgggccccgcgcagatccctgacctccagtccggccttcttagaggaccccgttcctcaatactcgccctccgaggccctcggccgtcccctagacacgaccctgaccccagccactgtacccggcttattattccgcggcggccgcagcggcagctacaacaaccgcgtcgctctccgctcaatttccaagagccagctttgaagccaagtgcgagcagtttcaaactcaccgcgctaaagggccccggattcaccaatcgggtagcccgtagactttcaaagcagccaatcagagcccagctacgctgggcaggccttcccgggtggctagagcgcgaaagaaagaggaaagggcggctagagaaaaagcaggagggcgggcgccaactgagtgcgagcgcaagcgctctcctccagtcgggagagtgtcgtcctactgtttctagtcagcggagcaggaagctactgttcgctccgttcttcttttaaattttttctcccagcattggcacagttcaaatttattatactcaaaatagctcatcaaaaaagtgatattgtgtttacatcgagattccattactttcacttctaatacttagggttaggagtgtatagttatgtttttctaaatgcgtgatttgcgggctggctccaaggagcacatttcagtgaccttaagaaggaaatggaaaactcaaaagaccgcctcaaaaatgtaaaggaaaatttattatttatatcgctgtgctttgtttctacctcatttttgaatttaatattaaattattttattatttacattttgtttattatacaattaaaaacatttgaaatgtattaaattttaaaatattttcacatcagaattttaaatatatagagagaggcatgcatttagagactgggtctcattatgttgcgcatgctggcctccaaatcctgggctcaagcaatcggcctcagcctccagcgcagctgcgactacaggcactcgccaccacgcctggcttaaatataattaaaacacaaaaattcacaattctatgaggggagagaaagaggcttaaattatgctttaaataatccagtgtcaaaaactctgtcttcattgccatccatcatatccttgagagagatttctgcacttactgcagttaatttttttttcctttttcttgttctttccttctttctctctttctttcttactttttttttttctgtttgtttgcggagacaatgtctccttatgttgccctagctggtctccaactcctaggctccagcaatcctcctgccttggcctcccaaagtgctgagattacaggcgtgagccaccagcccaacctaaacaccattctaaaatctttttaaaataaacaaatagaacagtaaaacagagctagacataataaaaatccattttaaggatttctggttgcattgatcctaatgggacatagaacaaagactgattaccacatccactacaagtatgtattagaagacccaaatcaggatatggaatggaacttccttacccttgtgatatagagtatatcacatgcacttaagtgtttaacaccttttaacacaatgagctgcatctatcatctggtgttatacattgcatctggctcaaccttgacaatttttgttcctaggcaacagaggcagagcatttgggagtcatggtgtaggtaggaatttaagaactcctgctggagcctaatcacttttaaaacttatgtttaaaatccaaacttcattttttaaatgaaaactcactgccccagagaagtgctctagggaaccaggctgttctgtgcagtttatggtactggttttaatgaattttaatatgtctttctctttgagaggcttaagaggaattcaacttctatatcatctaaaaatggcaactaattcattatatccattttacctttaacataaagaagaccacaagcttccacagctgtgatgctaggtgtatcaatttaactcaatcatctttctttataaagtttcagaggttattgtaaatccatgctatcatcttggcaaatacagtttattaccctttgggccaacttctatgtagtatctccaaagtgcaacactgtgcttcatagacacaaaaatgaataagatacagttaccgctggaggtgttgagggtaggggagcaggatgataattgggaattctcttctggtacttaccttgtaact

SEQ ID NO: 913497 - DNA, 4001 bp, Homo sapiens
cataaaatttcccaattttaaaatgtacccagtgaatttaatttttttcaaaatattttgtaaatgtaacgaaacatatcaataggtccgagacggctcaggaaccattcagtttttttgccttcgctctagagtatgtataatatggcattttaatcttatacattgagaagaaattaagttgtaaataagaaaggaggctgaggagggaggatcactcataagcagtaatagagctggatgcagaatctggttcttttagttaccaaactgttatgtccttcctctgcgattacacaagcttctttacctaacaaatgaaatatatagacaggttagtcagacatgcaataatcacagcatgctgtaataaatttaggacagacagcataagcttcccatttaattaatccagatgctgtctctcttgaaacatttataagtgggagccccagatgagtcatcaaatcaattgtctttgcctcacaaagtctgttttaaaagtataggacacaattatagcatggtttggagcaaaattataacttagctaaacaaatatctttatatcgagtaataacatgtagatattttaaatttctggagaaaagtttaattattgcagagctcatagaaagccaggctccaattattaacactttaaggactgggcgctgtggctcacgcctgtaatcccagcactttgggaggctgaggcgggccgatcacctgaggccaggagttcaagaccagtctggccaacatggtgaaactgcatctctattaaaaatataaaaattagtcaggcgtggtggtggtgcctttagtaccagctacttgggaggctgaggcaggagaatcgctggaacccgatgatggaggctgcagtgagccaagattgtgccactgtactccggcctgggcaacacagtgagactgtctcaaaacaaaaacaaaaacaaaaaacaaaacaacaaaacaaacaaaaacacaactttagtacgactatacccatccattcactcaacatatatgatgaacctacaatttcctgttcactagggatatattttccagctgagggcatatacatttaaactaattattttcagtaaaacatggagtgagcgctacaggagtccagaaggaaggggctagcatagccacttaccttctttgcctttgctaacagatctctaaagtgaagtacgctgattttgcaaaaaccaaagtctcagagctaggggacttggtgggatacagactcacgtattctgactgcgagttcacagctgagataccgtgaacaaaaaggaaccactcttttgtattcctctctttcccaaggagtcagtgtactcctttgcaaagcaattttcacctacagagtcctaacaaatattagctatgtcctctgatttaagctactcaactcaatgccatgttttgttttcctttggggagtcaccaactagcttggacttgaaagacgtcttctgtgcaaggggaggcaaatcttgctggttggaagcagcagaatcaatctggcgccagtatcatctgaatctagcattctttgcacaaactctaatccaaatacaaacccaccagcttttactgctgaagtttaatattcacagcaaaaccacaacgtggcctcacgttaccaccaggcccggcttgagctttttactcgagctgggcttgggcgatctaaaacgagggacagggcctgcatttcctgggcggaatgttatttatagccagggccaggagaagccaaagccgacagctgctgcgccgcagcgcggggccgccgccatgcaagcagttgtcacaccgctcaccttcacagtcggcccctggccgccccccggcctcctggccctgcgtcagcaccgggtgagagaccaaaagcccggcgcaaaaggccaccacagcaactgggctcgcgcaccacatgctgggccagcagcttcaatcgcctccgccacccgcgcccaccgcccaccaagctgccaaagcgagctgagcagaattcgaggttggaaagaatctgccagtagttgccaggacaaatgacgcaactgaacacagagtttccattggctctcaaggaagggataggaagggggcggagtgtaggagccttttcccgtccctccccggttgcgcgtgcgcactgtgcagtttccgcggagcgcagagacgcgctgaagctactcgcggactgcgcgtgaagaaaggcggaaccttcacgctgattggcggcgacgcgggaggctgtagcggccgaccggacgcagggggctggcgggaacgtgaagctccgcggtgcctgatggggccgttgggcggccggtagctgttgctgttgggggaccccctcattcctgccgctgccgtccctgctgcctcatggcggccatcggagttcacctgggctgcacctcagcctgtgtggccgtctataaggtgaggggctgcggagctgggctagggcttcatgacggccacccggttttctggcgctgggtcatccacaggcttgagagcggcgtgtcgccggcctagggatgtcgtggagtggcgttgccgcgaggacactccggagcgaagggccgggcaggcccggcctcgcgcctggcgattcctccggaaagtcgtctactccgcggcggaggctcgcggcgatgtagacgcgcggggtcccagggcgtcatggcggcgggatgcccggaggggtcccagggacgacgtagctgcagggtgcccgggggggtcccggagacagcggggccgctgggtgtcccggggggtcccggggacggcggggctgcgagcattttgggggaggtcacggggacgtcctggcctctggatgccggaaggggtctcgctgacgtcagggcctcaggattcccgcgggtgggaggtcctgggaaagttgtggccgcgaggtacttggaggcggtggtctctgggacagcagggccgcagaacgcgctgagctgggcccgaacgtctaggtcccggaggggcggggaggctgcagtcgagctggggctgatggtcccgcaaagctgcctggctgtgaagccagttgatggtgcgtggtctacagaggtggcctttctggaagtgagagcctgacaggacttgtggcctttctctcatcagtggggaggcagaagaaacgataatcatgaactccgttgccactagtcccgcgtttaaatgtcaaatgacttgttaggaaaagccaaagggaataatactacttcatttgtagaaatgggaagaaaggggcccagcgcggtggcttacgcctgtaatcccagcactttgggaagccgaggcaggcggatcacgtgaggttaggagttctagaccagcctggctaacatggtgaaaccccgcctctactaaaaatactaaaaattagccgggaacgcctgtaatcccagctgctcaggaggctgaggcatgagaatggcttgaacccgggaggcggaagttgcagtgagccgagatctggcactgcagtctgcactccagcctgggccacggagcaagactccgtgtccaaaaaaaaaaaaaaaagaaatggtaatggtaagaaggaagagaggtaggaaaggtaacgtaataatagccttcgttttgtgtgtagaaaggttgttattacttttgattcaattgttgactttgcagagcagactgaaaacatgaggcagttcttcatggaattataggctttctatgaaaacgaggaaattaaatggtaattaaatttgcaagtttaaaatattgagatagcagtttttctttccacacagatggcaaagtaacactggtgcacaaatgcacacgtctgaatacgtctaatgagactatgtatttcgtgtttttttctctaggatggccgggctggtgtggttgcaaatgatgccggtgaccgagttactccagctgttgttgcttactcagaaaatgaagag

SEQ ID NO: 913498 - DNA, 4001 bp, Homo sapiens
tgaaacaaccttgctactacgtttggaaaactagagtgttatgaacacactccgaagacacgcatgtccacctttctaaaacgagtactggccaggggctcttcagttccttaagaggcttccaaagccctgccagaccctggcaacaacagggaacaagaggaacagcccaaaatttctcggagtcacagaatgtcagtcttaaagatttcctagttctatcatttcaccttgccagtaaggaaaagggttagagaaaagtatgtgccaatatgttcgtgtgcccaaccgaagtgtatacacaagccaagtgatgctttcagaggtcttaggagaagcaatatagaaataaaataacatgccagacagaaacaccaaggcacagagcaaaagaaactgtgaggcccgcagaacaacagagaggactcctcagtagagagactgagagatcaacaacagagaaagaagaaaaaattactaaagcaaaaacgttaaaacagcaacagagaccaagtggtagcagcagagtagatattttaaattcagtctgcaaagagcttacaaagtaagactccagggcatagaagcatcacactcctcacaatggtttctgggtctctatctcattaatggcacccactgccccccatcaccgtcatcttaaaatggaggcagtaacaactaccagatcctataccttcatctccacactgataagggcgtaaccctcaagcatttgtgaaggtgtcctaactatgtcaggccactagggtgctgctcccagctccaaaaggcagattcacctcacggtccccacctgacccccaggaatgggtgtcccttcttcaggggagccttttctccctcgcaccagtggcatcacgtcaactgtttataagctacctagaggtccccacaggctatggaaaagtgaaatgcaattgtaattacatgggcaagcctaggaacgtaggggtgggaagagttaggtcctgaaatacaaggctgggaaacgcgattcctcggagaagcaaccaccccgcccaagcacaggctgggctgcctagaaagtgacctcccgggagcgatcacgcgcctggaccgagcctctgcgctcccgccctgcctcggtccctctctcccgcctccaacctgtcccggcgggcaggcgggcgggggtgcggggaggagtcgggagcagcccctggagcacaggggccgccagcaccggctgcttccagccctcctgcctacccgcccttcctcctgcaggctgggggctcggacagccccagtgccccgcgacgcccacctggacgcctggcgacccccgccccgcgctctgtacctttactctgcggagggttctgactccggtcccggaggacgttgatctggtagacggctccgtaaggctcaaaaagttctttcagctccttttccgaccatgaccgggggatctgtccgacaaacatcttaatggcatctgggtctggttggtctgagtgatccaaagctccgttcatcttgttggctgtgccgttactgtcaaaaacggaaccgggagccagagttagggcggcacgatgagggacaggaagaaaaaatagtgggggtgggggagcggggaggcggaaggaggaggaagaagagcagtggcaaagtgcctaatgagtcgtagaaatttgatgaactaaaacaaagcggaggcaccatgagttgctcctcggcggcggcgaggctctcactgcgtgctgctgtcgagcagagccgggggagcacggggcagcgccctgccgcctgtcacccagggcgtggacatcttggaggctcgggaggcagctgcaagttaagtgcaggtctagctctgcaaggctgccatcaacgcatcagcgccttatcagccctaccctggctgtggctgggaaagaaaggcagagctagatgtctgctggatttctctccctctccctgccccgccccccgccccaccgccctttttgggaggtttttggaagagaggagagaggtggtaataataaagtcacatggaaagaaaatgaaacacttggcagtccgtcagatgactaatgcaagatgcgggtgatgaatttgcagagtgcgcgaggcatccatgtgtgcatcaaattagtacgttgttgctactcagaatggaaagcggtccagctatgcagctctgcgcagctgattggctgcccacgctggagaaaaaggccggagctgggagggggctcccctttaaaaagcacattgtttatgggacccaggcacaaagggtttaattcagagaggcaaaggagatctcagaattgcctgctttgtgctgggttaaaaaaaaaaaaaaaagcagccccagaaagttgagttcccactaaaagacactgaatatttcaaatctctcacactccataaattgttctctgtatatctgacttccagatgttgcacttgagttctaaacaatcacacgtttgggagagaaaaaaagaaagtctgccttttcttctcccagcttcagtaaatatttggggctgacagagagcacaaccataagcttttgcatatcagtcctcctcaacgctgtttccaaaatccccatttggaagagaatgctgtgtacagcccgcacttctagtcaccatcaagtaatacgatgatgaagacatgtctttttcacttgcccccaccctcctttgagcaggaataaacagtaaagcaaaaccatgtaccctttttgtgccccctacccccgctccaaatataccctgaacccagctactctgccaagtgacaaggctgaatgcctctcggcagctcatttgcagcactgcgcgcttgctccagcttctcagcctgtgaaaatagaaggcgccgaaacaaagcaggcagaagctgcccctacagagcctcctccatgagcagacccaccccaaaaagcagagaggtcagaaaggggacatgctaactaatactaaactgcaagggccagatgtgatctccctgtagcttcctggtactaccaagaaggtagacaaagatcttacagagagctacttacttggttaaaatgaaacaccagacaaatacaccatcagagcactttaaatctgctgtgggtctaggatggccctaagcccctaaaaacaagatactcatggttaaaaagccaaaaccctacggggtaaggaaaaatcctgaatgagattcaacctagagaggaaaatgatgtcaaatactcttcgctaggtcctggtttcaatttctacttcttcgtatccccctattttaccactttatttttttatccttgaaataaacaatcagactgtctaacttgaagcattttcagagcttgctctaatcaaccttattgttataaaaaatgttctgctgaataaaatactgagtacaaaatcttctctcaacaattttggtgtaatgtaatccttgtttatattagagccagattgtttatcttgttcttatgcacctatcctttttaagtcgctctttgagaattcaatcaacacttgaaccctgtgggtctgtggctgtagcggggtggaggcagtggagccccttgcagtacagcatgtcatgttcacaccctgtcgggggttgagagtgtggcaagacttatttctgggacaggaaagacttgtggttactgctgttgacaaccagctagattgaaaagaggaaggtattgccacaggtctcggctaacagaaaacagaagttcaaaaaatggggctgccgcacctcatctgcggagcacataatgtaacacaatggagaagggagtggcattgtactagttctagtgtcagaattctagagcaagcagtcttcaatgcttctgcaaataagaggccatttactctttttcgaaaaatataaactcaccaagatgcatcaagtaagggaagtagaggagccggccaatgcctcatgcctctggcctgtatgtggctggtgta

SEQ ID NO: 913499 - DNA, 4001 bp, Homo sapiens
tcttgtttcttatttattgagaacatcattaatttaaaccaaaatataatccaatagggaatatttacaactaaagtttgaaaaattacccttcaaaacaatttcccctctgttttttaaaatgaggtacttaaactctctctataaatgtactaatatattctgatatattgctgtggcacaaacagctaattaagcaacacattagaatgttagataagatatattcttcacagaagtcaaccttagtaaaatgattttcatgtaaatcaattataattcactagtctagggccaattcttttatttcttatgtggcaatatgaatggtttcattatttgagaagtttgaaacagatttttccattttctctgtcgaaagcttcactgttctcaccttagaaaccaacgcttatcttgtaaaatgaaagatatttgaagatgtgagaaatgtttgccctgcatagaaaggcattttataaggacataagcataaatcaaaaatcaatatattccacagagaccttgaacttcacaacttaataggctatataataatagtttgtgaccgaaattgtgagggcaaaagttctcacttgtccttgaatttctaaaccgtttatctacatggatgccaaagggagaagcagagactaaaaactgtaatttacgtaaacatcaagaatattcctcttaactctttttcatgctatgtttcataagttcaccaaatgagcaaattaaaaatccccaagctttaaataccatagaggcaggtctgatcacaaggcatttgccagaatgataatggtattacaagcattctcaatcaataagttttctttcagtagttaacagagaggtaagaaataaatctctaacttaatccaaccaacatagcggcagaatgcaaaaagctctatgaacggtagatactaaattttttaaaagcactaaaccacaaacaagcagttgcaaaagctcttcattctgatagtctatacaaacaagattataggagataaaaaagggtgttgaaaaagaaaaaaataaagccccagacatgcattaagctagtttgacagctgcattgttcaaccggtcccattgtcagacccaaagatgtattcagtgctacaatgtctgctagcaaataaacaaaagactacatttttcaaagcaggatgccaattctatcataattttccctctgcttcccaaaaggtcagtggtgcctccttcctggtatgtgagagaacccccaacacagaggcaggaaacaaatatttgctttcaatacatggggacccaggacgccatgcatgaaagaggtctccaaacgggtacacattttggcaaacaggataaagtgatccaaacctggtaacacaggaggactatttaggtaggctaagtccagattagagcggtatttggaacgcaagtctaatatggagtctcctcagctcctttttcggtgattattccatgcagagtgcataaaaatgaaagaggcttagacattgcaaaggaaaagacgaaccaagatccagattcagagcccttaaaattatccactggccactcacaaatagcagtgagcaaatacatgatatgctttcaaaaggcaactagtacaaatagaattcacggcagtcctccgcctttctctcgctggctctctctttctcccaatctctgggtctcgatttcatctccctcttcctctttagattctttttccccccttctcttctaaggtaaggaagctacttgattcagagcataattattgtctcagccagctctagaaactagaaaagcgtgcattaaaaacaaaggacacaacaacataccttaaaagcagctcttcatttctcatagtaacagcggatttgggacagcgcatgcttctatactgatagtctcaacaaaagccagttcagaagtatgctcaaacatcaatgccacagtcgctgctcactaacgcgccctctcctccctctctctctctctctctctctctctctctctctctctccctctctctctgtcttcccactctcttccctagtcaaatgctgaatagtagagcaagggggctcctgcagattcactaagtagaaataatcctctctgacaagttatgttgtctatgcatattattacactaatacactgtgctgcctataggggtcttgtctgcattcactcaagcctggctggtattacttctcctaattaccatctttaaaaattgggggaacaaaaaaaacaacaaccaaggaactcatttacctttttcttacacacttaatagcaaaaccaatttcccagttgccttttgctatcaaaactaccagcaagcatcgcagatgagtaaccacagattgggatgggtcagtgtgctaaaaaggatttttgcctctcttttctgggacactgcattcacagttggattcatctgctcctcttgtcttgtcctcaggaagagtgacaaggtcaagacccttagccccaccctgagtcatagatgcatagcatagagatcgaggatttggaaatattttaactctgtgcgcaccagaattctcacaaatcagagcgtcattcacctggaggagggtatctaaaggaggcaggcaatgcaaagattgtttggtggcactggagtcctcatcgacacaggagcatcatctgcaaaagaccaatgagttgctcttttctaaaataagaaaaatctgctttcctaccaggcttcgcatgtacagttaaccagggaaatatacattgtacttctgtttattggaattagaaaaattctacgcagattagccaagtaaaataacaacacacacacacacacacacacacgcgcgcgcacacacacacaggaaagaagagatgctaaggactgagcaatccgtcatcaaaagtgcaagctaaggcactattccaggaggtgtgtgctgacctgaagccaagaatgcgctcagcttggatggaacaacatagaacagcctcaaacagacgtgggtcactgaatcctggtcccgctcccattctccaacatgcacctcagtataacctggactcaaagcattactggggataataatagaggaggaaagtaatggtggactctgttccccacctatttgaagatctggaacacactccaatttcttgctaggtctctgacctctgaacttggtcttgatccacagctagaaaaatgaacatgttctctgggcagggggagacgaaggtttttaaatctccactgcacagaaatcttgcatgatgtatcagctggactatggcaaataagcgaaggatagcactcaccatccctatttctagagggcaacaagaaggcgtgatgagtcacttgacaaaaatcagatcatgaaatgagagccttgtccctaaaacaaccccattttttttttacatattcttgcttcattctaacatatgaaagttacagtgaatatataaaaatgaacaaccttgccagcgaatgatatcatataaaatctaagatgttcttttgaagtaagaaaagcatcatgtaaatgagcttggaaccagagagatcttagggagaaacagtttgagcccattcgccttgtgacttgtgctcggtgctggggcagaagtctcttaacctctctgtggctctctttactccagcggttaaatgggggcaacaaatgctaatttattttaaagcatgtgaagagcttgtagtgaaactgggtgtgttcagtcagcgtaaatattattaaaaatgggataactggactgataccagccaccggttttgtccattagagaaaagtaaaaatacgctgctcggacacaaagccctttttgcatatttccatgcagtttctaatgggggctaaactatgaagcaagcactaacgtacaacaataatgcagttgcttatccaaaggtaaattcttaacattggaagcccatgttgtagtatatg

SEQ ID NO: 913500 - DNA, 4001 bp, Homo sapiens
aaatcatgattaggcgaattcttcagtttagcctggaccctctagcctctagaggagaaaacgcataaaactttcatactagctcatgtgcaaacatgtattacgtgtctatacaggtatatattttaagatgggggacaggacagaggtctcttaaaacaaatatcgtggaaatgttactaatcatgattcacatctcggagaaaactaccaaaacagaatacggaaaagatgaacctgatcgtgtacaagcaaattaacattcttaatattgactcaaaagacaatttgcataacagattctatcatccccctcctccacccccctccttttttttggtggggaggtccttgcagctcaaataattggccactgcagagtttctcaagaatctcttaactcataacacttaacatgctagaaaaagaatctagcatggcaggggaaagttagttgccagggaaatggatcataaagcctggaataacctcaatactgcagagtaccataaggtgccagacagaatagggatgttaagtcctacagtgggtagaacaggaaacattttacacgcactcttaccataccaatccatttttttctcactggattagattaattacagcttagatccgctatccaatttctcgcctgatcagagaaaacttaaaatgtcgaaaaaggacacagaccttttgttcccactctggcaatcttttctctctttttaggtttccttttcctaacatgcctgaaatacaaatagatcctactgacccctccgagctaataaaaactttcctatcaagccagctaaaaattagacatactttcctttcttcaggaatcccagctctctacttctttccaataaacgctctaccttagtttgacgacatgtaaaacaaccagaatcacattaattattaaattacagactgcatatcagacaaaccatgattacgtaaaaattacctctaatttctgcaataaagtacacctggctagtttcacgctttataattatccccccgcccttccttgtctccgcttcccctctcccaccttaggaaaggatctttgcaaatattaaatcagatgagcgggtaatttggtaagaagagctctttccccccggccaccagagctccgtcagccccgcatttcaaatgacacaagcgtgcacactcgcacgcgcgcaccccgcccggaccccgtgcccgctcgccggtccccgcccggtccccgtcacgccgcgctccgctcagtcctcacccggacccccagaccccgcccggtccccgcccgccccaccggaccccgggactccgcgcccggctcgccggtcccacttggactcatggaccccgcccggaccccgggacgccgcgccccgctcaccctgctcgcgggtcctcgcgccggtcggtggaccccgcccgtcccccactcaccccgcggggacccgggacgccgcgctcggcccgctggtcctcacccggactcgcggaccccgcccggtccccgggacgccgcgctccgctcgtccctccgggaagccccgcgccctgcaccgccggcgctgctcgtccgcacccgctccctcctcccgcgtcccgtgccggcctccgaaggccgagggaggcgacggatccgaagcggccgagtcgcgcccgggagctgcgggcgacgcccgtccccttcgcgccgccgactctgggaggaggacgcccgctcgcccggcctcgggacgcggcgccactcacattctgtcaggaacgagcaggcggccctcgaccatcatgtccgggaggaaatccagcttgaaggcagaagtcatgttcgcgggcgcacgcggcggcagcggcggggggcggctctgcgcgcgtccgagcggccgcgggcggcgcgagacgggcagggacaggtgcgcgcggcctcccccggcggccgccgagccggcacttgtcacattctctcctcgcgctccgccaatcccctccgaaatccagcgccggggcggccggctgccgagcgccaggtgcggcgggcgggggcggagctcgcggggcgcccgccgccgcttaacccctgcgggcccgccggcccagagcgcggccccgaacccggctccgccccgcggggacacagggcgggccgcctccgcgctcaccgcccgggcacggccagacttctcagggtcccctgggcccccgaaggcaaacccgctccccgcctggctctgctcccccgcccgggggtccctggcaagaggccgccgtggccgctcggagtaggtttagggccacccaggcgccaaagcccgctccacttccatacccgagccgcgctcccagagcccagccgcgggaggcgagcagcccgagggttcgcttcgatgctcctcggtgtggtgtgcttgcccgggcaggaactaagggcgatcaccgaaaggatataggaggtttaggcaaaataaagatcagatctatgacccaagtgacatttagggacttatcgcagtgccctaaggaagacaaacctgtctctgcacgatggcactgccttttctgtcatcttgcaaacactaagaagtataagcggctgaaaataaagtcataaatcacgttttctacacaaacgataatcatgaatctgccatttcctagtatttaacacaataattagaaaccagctgagtgaattcacgagtgttaggtctgtaatgtaagggccatgaagcttaaatatccacttaagatttgtgactgatttactaacaagaattgagaaaaatggccaaactcagaaaaaacagagaagctggcgagtttaatttttaagtgatttgcataagttctggaaaactaattcgtttctaaggtgacattctaattgatcgttctcactgttgattatgtgggtggcaaacttttcacagtgtagtcacaagtatgtaagacttcatggcatatttcacattctgaatcaacatcataaattgcgtaccaaaagtttatagtttacctcttagagaaaccttcacttgattttgtaatgacatcttaaacttttagggtaatgtatgtgtctatacagctatacatccatatacctatacaaacatacacgcacacacacatggttttgtttgaaatatgtaattttcagtctttgtctttctaaaaatcagaactgtgctaggaagctgggctttctcctcacaaattatgcctgaggataccatcacacaaaccagagggttaaacaaccaagttacaaatagttaaatgtatcagacatgatatagacaaaatatgattttaattatttctcaccagattcttgtgtgatgacagctaactatctttagaggttatgaaggcaaatggacacttacatatcaattttaaatccagtttgatgcattgagcaatacaaagtatcagacctgggatattcaattaagtccacacatgcttaatggacttggttgccttcttcagctgaacaatgtatctggcttttgaccttctatttccaagatcattagatgtagggctaaactaaccttaattttttaaatactaccttactggaggaaccaggtctgggctcctaaggaactgaggaatggttgcaatcgagtgaattcttatactcccaaagggccaaacttgtccccagactactaagctgcatttattccccagctactcttctgcctttgaaattacaggattttgattggtcttcaattatcttaataattagctggataaatgaagacaaaccttggcagttcttggttttccatacgttatttgcataaatatctaatgtatataatcagctgactatataaaaattattttaagaaaggagcagacttggcctccaaaacagaagcaaaacacaactgcattaatcaaaatgaaaaatattttctaatcagccatagcataaaggctacattctgtaaggtagaacatgtatatct

SEQ ID NO: 913501 - DNA, 4001 bp, Homo sapiens
tcagaacgtctaaacatattagaactgtggagattgagtagaagaaatcatctatcaaaaggttagtcctggatttttgccattataaggtgaaagattgcagtagctcatccatcagttaaagaaatgcaaggttatggcgtctctcagtcacctgctgccacaggaagttctttcctatgtgtttctgttgataacacactgttgacttgatatcgtgggtcgtaggacagaaaactactaccaagtcattgagacacaaaatgatggaaatatagatctgcagaacgtgaaagaacccccaaacatctgcttcctaacctttgcacagaaactctggcagtgaatgaatgactactagtttctagcctctggcccagacggtttggatctcccccaccacctagtcccaccaacctcctttccctgtattttcttttttctgtttctgtttctttctttttttttttggcgggggcggggcgttaggggcggcagagtctcgctctgtcgcccaggctggagtgcagtggcactatctcagatcactgcaacctccgcctcccgggttcaagggattctcctgcctcagcctcctgagtagctgggactacaggtgcgcgtcaccacgcctggctaatttttttttatctattagtagagatgaggtttcaccatattggtcaggctagtctcgaactcctgacctcaagtgatctgcccgcctcggcctcccaaagtgctgggattacaggcgtgaaccaccgcgcccggccacctttccctgtatttcctattccagtcatccacagggttcccccagttcaaaccttcctcagcatgccttccctctgtgaactcttaacaaacgatatagctgccccacccccacccctacacaatctagtacccaattacacttcctgctaaccttttattttttcaattgttcaactattttttcaaggactgcactttgatttttgttgttgttgttgttacccacagagcctaacagcaagccctcagatatgattggttgattggggccgggcgcggtggctcacgcctgtaatcccagcactctggaaggccgaggcaggtggatcatctgaggtcaggagttcgagaccagcctgcccaacatggcgaaaccctgtctctactaaaaatacaaaaattaaccgggcgtggtggcgcacgcctgtagtcccagctattcaggaggctgaggaaggagaatcgcttgaacccaggaggcagaggttgcagtgagccaagatcgtgccattgcactccagccttggtgacagagcgagactccatctcaaaaaaaaagaaaaaagaaaagaaatgattggttgattagctgaagtgacctaagtcatgctggacaggtgaccaaacaagcgcttccatccagtaaatggtacaaggcctcaattacaagccgcatcttctacaaggcgacgccaatctttaaaaattcccacataaaatctcacttgaggagacagacaggaaaagagaaactgcaaaaaaaggcacaagttttctcacttctaaaataaagatgtttgaggaacacacaacgaaagtgcctgccaatcggaaaaagccgtcctaacaaaagaccttgggcaagtcacttggcctctctgcgcctatctgtaaggagatgatacccaccgccaagtccaaagaagcgatcgaagagacaacggtcttgaggcgcccagccgggtgccaggcacgaagtgagcgccagggaaaaggactgttatcagagcgggcagagattgaatcccgcggacgcgatctgcccactgacctgccctccctggcggtccggaccggcccggccccggggctgcgggtcctggccgcccctcgccaccctccgcggtcgcctcccttgggccagctagcagctgaagcgaagcgcggcgctcgcgtcggccgagtcacaccatcaggtgtggatgccgcttccgggagtttgaatcccgcggctgcagggcggggcacgtcactgccggcagggcgcggcccgcaagaaggaggagcagcgcgcgcgcggcggggacgcggctccccgattggctgccgcctttgaagggcggagagtaaacctgagggcgggccgagaagtggctggggccgcggggcgggacagagggcgggaacacttcctcccgggcccgccagctaattctgggatcgggggttctctgcgggcttagacctaaacaagcttggtgtctcgcagtcaggggctggttttgtgtttatacgcttttaggagaaagcaaattactatttttaatgggataaaaccagtgacgatggaccgagacgaactagttctgcgctcttgagcatagattctccctgtgtgaagtgcggcccctcctgccctgggacaacgggatttcacaaaggagcacagcccccttgtcatcccctcgggtctcactctgtcgcccaggctggagtggagtggtgcaatcatagctcactgcaacctcagtctcccgggttcaagcgatcgtcttgcctcagcctgccgagtagctgagactacaggcgcacgccaccacgcccggctaattttttattaaaaaattttatacagacagcggagtgggggggggggggggtggtctcactttgtttcccactctgatcacgaactcctgccttcaagtgatccttccacctcggcctcctaaagtgctgggattactgccaaaaatcagcagcacagcagggagtgttaacgggagagatgagaggcacgcccaggttgaacgctgagattatgaatgctagcggaccggctttcagaccagactgctaccctccagcctgatatctatctattgatcgattctagctcttgattagccgctttgagaacgttactgctgagagaagaagcacatgaaatgtttagcagggcctccctttctctcctagacccagcataaactcgctggagatttaaaacagtagatacacagtagcaaaacatcctaggtacacaatattgtacaaaggttataaactctagattaggactttctagatttaattccttactgccctgactagatgtgtctccttggataaatttatttaacctatttgagcctcggtttcccgatgtgtaaaatgatgcaaataataatatttacttcacagctcggttataaggattaaatgaggaaatccggccaggtggaatggctaattcctgtaatcccaccactacgtgaggacggggagcgaggattgcttgaggtcaggagttggagaccagcctgggcaacacagagagatccactctcaccccacccaatccctgtctctaattttaaaactttaaaatttttttacatgaaagaaattcatgtaaagtgcttaacatttagtaaatgttcaattgatgttagccattgttaaacaaaaggcaacactcaaatgttactgaatagaatggatgagaaaaccatgtggggaattttaaagaatcagagaaacaaaaccaaaacagaatgcaagataacgtttggtacctgcttccaaggagctcccatttctgaagggaaggtaaactaaagtatcaagtgggattagggtgggaaaaatcagggcaaaagataaatcatcgtgtgaacattattcattgcccagagttgaggggcaaaattaatttccacagagatttacaaagattcttaaagagatatagagaaaaacatttccctgttcaccttcaagccaaatggggagcaaaaaatgggggagagggaggagggaccctggagagaggtggcacctggcggactggcacctgggtagccagcacccaggcctgctgtgccagacactccaattccacacctgccctccaggaccttcttttctggctaaaggtcgccctgtgagtggggaccttgaggaagaggagcaaacaagaggctcattggcctgggggg

SEQ ID NO: 913502 - DNA, 4001 bp, Homo sapiens
taagattgtcctgtgtgaaatcagaacgtctaaacatattagaactgtggagattgagtagaagaaatcatctatcaaaaggttagtcctggatttttgccattataaggtgaaagattgcagtagctcatccatcagttaaagaaatgcaaggttatggcgtctctcagtcacctgctgccacaggaagttctttcctatgtgtttctgttgataacacactgttgacttgatatcgtgggtcgtaggacagaaaactactaccaagtcattgagacacaaaatgatggaaatatagatctgcagaacgtgaaagaacccccaaacatctgcttcctaacctttgcacagaaactctggcagtgaatgaatgactactagtttctagcctctggcccagacggtttggatctcccccaccacctagtcccaccaacctcctttccctgtattttcttttttctgtttctgtttctttctttttttttttggcgggggcggggcgttaggggcggcagagtctcgctctgtcgcccaggctggagtgcagtggcactatctcagatcactgcaacctccgcctcccgggttcaagggattctcctgcctcagcctcctgagtagctgggactacaggtgcgcgtcaccacgcctggctaatttttttttatctattagtagagatgaggtttcaccatattggtcaggctagtctcgaactcctgacctcaagtgatctgcccgcctcggcctcccaaagtgctgggattacaggcgtgaaccaccgcgcccggccacctttccctgtatttcctattccagtcatccacagggttcccccagttcaaaccttcctcagcatgccttccctctgtgaactcttaacaaacgatatagctgccccacccccacccctacacaatctagtacccaattacacttcctgctaaccttttattttttcaattgttcaactattttttcaaggactgcactttgatttttgttgttgttgttgttacccacagagcctaacagcaagccctcagatatgattggttgattggggccgggcgcggtggctcacgcctgtaatcccagcactctggaaggccgaggcaggtggatcatctgaggtcaggagttcgagaccagcctgcccaacatggcgaaaccctgtctctactaaaaatacaaaaattaaccgggcgtggtggcgcacgcctgtagtcccagctattcaggaggctgaggaaggagaatcgcttgaacccaggaggcagaggttgcagtgagccaagatcgtgccattgcactccagccttggtgacagagcgagactccatctcaaaaaaaaagaaaaaagaaaagaaatgattggttgattagctgaagtgacctaagtcatgctggacaggtgaccaaacaagcgcttccatccagtaaatggtacaaggcctcaattacaagccgcatcttctacaaggcgacgccaatctttaaaaattcccacataaaatctcacttgaggagacagacaggaaaagagaaactgcaaaaaaaggcacaagttttctcacttctaaaataaagatgtttgaggaacacacaacgaaagtgcctgccaatcggaaaaagccgtcctaacaaaagaccttgggcaagtcacttggcctctctgcgcctatctgtaaggagatgatacccaccgccaagtccaaagaagcgatcgaagagacaacggtcttgaggcgcccagccgggtgccaggcacgaagtgagcgccagggaaaaggactgttatcagagcgggcagagattgaatcccgcggacgcgatctgcccactgacctgccctccctggcggtccggaccggcccggccccggggctgcgggtcctggccgcccctcgccaccctccgcggtcgcctcccttgggccagctagcagctgaagcgaagcgcggcgctcgcgtcggccgagtcacaccatcaggtgtggatgccgcttccgggagtttgaatcccgcggctgcagggcggggcacgtcactgccggcagggcgcggcccgcaagaaggaggagcagcgcgcgcgcggcggggacgcggctccccgattggctgccgcctttgaagggcggagagtaaacctgagggcgggccgagaagtggctggggccgcggggcgggacagagggcgggaacacttcctcccgggcccgccagctaattctgggatcgggggttctctgcgggcttagacctaaacaagcttggtgtctcgcagtcaggggctggttttgtgtttatacgcttttaggagaaagcaaattactatttttaatgggataaaaccagtgacgatggaccgagacgaactagttctgcgctcttgagcatagattctccctgtgtgaagtgcggcccctcctgccctgggacaacgggatttcacaaaggagcacagcccccttgtcatcccctcgggtctcactctgtcgcccaggctggagtggagtggtgcaatcatagctcactgcaacctcagtctcccgggttcaagcgatcgtcttgcctcagcctgccgagtagctgagactacaggcgcacgccaccacgcccggctaattttttattaaaaaattttatacagacagcggagtgggggggggggggggtggtctcactttgtttcccactctgatcacgaactcctgccttcaagtgatccttccacctcggcctcctaaagtgctgggattactgccaaaaatcagcagcacagcagggagtgttaacgggagagatgagaggcacgcccaggttgaacgctgagattatgaatgctagcggaccggctttcagaccagactgctaccctccagcctgatatctatctattgatcgattctagctcttgattagccgctttgagaacgttactgctgagagaagaagcacatgaaatgtttagcagggcctccctttctctcctagacccagcataaactcgctggagatttaaaacagtagatacacagtagcaaaacatcctaggtacacaatattgtacaaaggttataaactctagattaggactttctagatttaattccttactgccctgactagatgtgtctccttggataaatttatttaacctatttgagcctcggtttcccgatgtgtaaaatgatgcaaataataatatttacttcacagctcggttataaggattaaatgaggaaatccggccaggtggaatggctaattcctgtaatcccaccactacgtgaggacggggagcgaggattgcttgaggtcaggagttggagaccagcctgggcaacacagagagatccactctcaccccacccaatccctgtctctaattttaaaactttaaaatttttttacatgaaagaaattcatgtaaagtgcttaacatttagtaaatgttcaattgatgttagccattgttaaacaaaaggcaacactcaaatgttactgaatagaatggatgagaaaaccatgtggggaattttaaagaatcagagaaacaaaaccaaaacagaatgcaagataacgtttggtacctgcttccaaggagctcccatttctgaagggaaggtaaactaaagtatcaagtgggattagggtgggaaaaatcagggcaaaagataaatcatcgtgtgaacattattcattgcccagagttgaggggcaaaattaatttccacagagatttacaaagattcttaaagagatatagagaaaaacatttccctgttcaccttcaagccaaatggggagcaaaaaatgggggagagggaggagggaccctggagagaggtggcacctggcggactggcacctgggtagccagcacccaggcctgctgtgccagacactccaattccacacctgccctccaggaccttcttttctggctaaaggtcgccctgtgagtggggaccttgaggaagaggagcaaacaag

SEQ ID NO: 913503 - DNA, 4001 bp, Homo sapiens
gctgaggcaggagaatcacttgaacctgggaggcagagattgcagtgagccaagatcgcaccactgcactccagcctaggcaacagggcaaaactccatctcaaaacaaacacaaaaaacaaacaaaaaaaacctttcaaaaaataaatcttcacttataatagatttagtcaactctttaaacaaaatccttcaattatgggcagaggaagggttctctagaatacctttcaatttggtccttctggtcaatcctggaaagctgtatacgtagatgagaggttttagcttccggtcagaaaaagccacaacttcacaggggatgttagttgccatgacgcccacaattccattactacactgcagtacagtctttttcttggtttcaatattaataaatattacataattcccacaagggtagcaaatggtgttgtcgttgacaaaatgaacattctgcttagggaatccttgcacccatctttgggaaaagatatgtcaacatcaatataatacatttcaaatacttttttttttttaacaaagcaaagggtcatcaaaatctttgaaacatttctattttcatgtcctttctgcccccaatttctaagataaaagaacacacatgctggctgtgagatccatttgagtcaatgaattatagaaatttaaatgtagacctaaagttccgtaggtctcccaggccttcttcagataactttttcagcaaaggaaactctctgaccaaacctgagaaagtctcagaaggacttctggggtcttctatacttggaagacaaaaagtgaaaataacagagaaaagagcttgatctcaacacagtggcatcctgggccattcttttataattagtttgatttttttaaataaactttaaaaaacaactttgcataggacagcctgctttgtggttgttagcagagtaggaaaattgcttatttacacagatgaagagtatgtggccatattttagatttaaaaatacagataaacgtagaaaataaaaggaatgaagtcgacgtgaatgaaaggctagcacacaaaaagaacatactctcaagtaaggagtgcgtgctaggtgtatgctagaaaggagaggagatgaaggagattctatttttatttaaatattaaaggtatgcttgaagatggtggaaaaggcaagtgaaggacactggtttggtgagaaacctcgagacattagagtgtccaggactagcaggggatgctgtatagagtggaggtgggggctgggaggaacactctagaatgtaggggaaaaaatgccacctatatctgcgcagtgcttgatgcttttcaaaggctactataaatgcaaataaatccaaagctagtggataggagttagaaggaaaggattcagggacctaactttggggaaaatcaccaaaggtagcaaggacgggatccgggctgtcgccaggtggagggggagggggatgtgatcagaagacccggatcactagcgggaatcctgagctagaaggaagagatgaagggtgcaggggacgttgctgggtaagagacggagggtcagggtcgcagaataaggagtgggaaagacaactggggacggggtcaaggaacaaggggatggggagcggacaggggaggtcacacggggagggaggctgagggaaggcactgggggcagaggggaagaggtcgaagctgcggggaaagccgccctaaggaaccggagggagaggagggaggaggggacttggggcaggaggttccgcgagacccagatcggtcgcggggccgtgaacaccgcacctcacggacaaggacgcgccgccggcggagtgggggccttcgtcgcgctcccggccttgcgccatgggcagtgttttcctcaggcgggagcaggcagcgcacgcagcaccccagggcgggtcggttacctttccgccgccgcggggctgcgggccgcgacgccgctgctgtgtacacccgtatcccggagaccgtaagccccgcgcccattggctctgcgctttggcccgctcccttctgagccgagcagattggtggaaggtctgccgctctcggccaatgggtgagcggcaagccaagcgaggggcgggccccttgctgttcaaagtgtggtctgtttaccagcaacattggtgctacctgggaagcttgttataaatgcagaaacttggctcccacaccagatctactcaatcagaatctgcattttaacaaatttccccaggtccgggccaataattgcaagtaagactcatgcctacaatctccgcgctttcgaaggtcagagcgggaggatcgcttgaggctaggagttgaagaccagcctggaagacatagcgaaacctgccgcgcccgtgccgcatctctacaaaaaaatttaaaaagcagccgggcatggtggtgcacgcctgtagtcccagctacttgggagactgaagtgggaggatcgcttgagcccaggagttcaaggctgcggtgagctgggatgacgccacagcactccagcctgggcgacagagcgagacctgtctctaaataaataattatttttaaaaatcaataaatttctaaacagactttcatttagagtgctgactgtgccaaacattgttgcaacgtcttcacatctcccatcagccccattttacagataagtaacgtgaggaaaagagaagcacataatttgtccatggctacaaagttgagtgggactttatttatttatattatttatttatttatttttgagatagggtctcactccgttgcccaggctggagggcagtggcttgatcttggctcactgcaacctccatctcctgggttcaagcgattctcctgcctcagcctcccaagtagctgagattacaggcacgtgctaccatgcccagctaattttttgtatttttagtagagacgggttttcaccatgatgaccaggctggtttcaaattcttgacctcaagtgattcgcccgccttggcctcccagagtgctgcgattacaggcgtgagccaccttgcccagccctgagtgggacttaaacgcaggtctagctaatttagagctccaagcccttaagtaccatataacactttgaaatgtaccctcttgcttcctcagggaagcagacagctctggaagtaacctgattgaatggtcggcagcttgtcattccttcttctctcccataccttcccttagactccctcccttacccttcttcctttcccttcagtcgtcttcccttctctacccttcccttcctttctttaggtctttccttcctgtcttgctttcttctctccatttctttcacaaatatttacagagcatcccgcatgcattcatgcatgtgctagtcacttggaaaaaatagaaaaacaaataaagtttcttccttcttggaacttagagactggtgggatccagggagttgggctagatatccacatggtctcagatggtctgtgtaagttgtgaaaggatttatgaaagtgattttatgcaagaaatgttgtacaattcacggattgttaggcctcctaaatgcttcatacaatgccctatgactcttactgtacaacttgcctgcttaagtaagggtgagccctgtggacatgtggagttagctatgccctctagctatgctagagagtcagctgttatctgcacttctgcctgttgtgtcctaggctaggctccacacctagtacacaattaaaatctcttacttaccaaggttttcaccaaaaataaaagttgcaaaaagttaacattataacatgtaattaaaactactaaagaaacagttttacatgcaaggtgtgtaaagaaagtaaaatgtgtttttggtgaaagattataagaagtaatgggaatgtggatttttctctgcctacatttaagtgttaaaggattgctttaagtaaaaaaaaaaactaaaggtttaaataagttg

SEQ ID NO: 913504 - DNA, 4001 bp, Homo sapiens
tttttttttattgatacagagtctcgctgtcatccaggctggagtgcagtggcgtgatctgggctcactgcaacctccgcctcccgagttcaagtgattctcctgcctcagcctccccagcagttgggattacaggcatgtgccaccacgcccggcagaaaacagactcttcacagccatctaaaatcacgaaaaccgccgagtgcaaaagaggctgttactcggaattcggcatgaatgtggcctgtccacacgctgacgagatgagggagtgatcacacgtgcatgaaaatcacagaccacaaacgaggggaaaccccacagttcaaataaatacacccacttgataagttctggctctgaagtctttcacccagtcagtgagaaacggccacttcaattttgcctacctcggttctcctttggcaaagtttatggccttcatgtactcagtcacgcaattttcaaattcctcctaaggcaacataaagaagcacaattagaccgaaatactgacccctgctcactgccccatctgcggatgccacggctccctcacggttggcctggtaccccctgtgtgtcacctgtgtatccacaggtgacggtgtggcagacacagcctgagtgtcgtggcgaggtcctggacctgcacccgggttcccgtcccgcagacacagcgaggcagcagaaaccgcagtgcctgtgctccagcacgcccgccccaccccagctcccctgtgcccactcggggcagctgcaggcgcagatgccacagagaccacgctgctacgaggcaaaggtccaggggtcctgtgtgtcagatatcaccacttgagcaaaaagcatggacaggaaatggtgcaagtttcgtgtcactctggaaaggaattccttcactctactaccctaagaacgattttaagcctggtctagcctggcattgctctggagatggggtgaaaattgaactgttggggataaggggcacaggacgcctctcaccaggttttctgccgacttcggggcacacatctgggccctgcacaggtgcgctcggcccagaaactgggtgatgggcgccttcaccttgaagtacatttggatgcagtcctcgctcacctctggctgcctcatctgcaagagaacaccaccacagaagatcacagacccggaggggtggcctccctgcccagaagcaccacgggcccgctttcagaacaggcccccagcacaggtggagcctgtttccagccccatcctccatcctggccccttgactgcccggccaggagctgcctctccccagccccactctgcatccgctgcacacccagaggccctccctctccctgtcaaagctgccctgaccgaggatcccgggaactagttaccttcagggcctgctctgcacacagaacaaacaggtctgggctgaagctctctgaggggtcaaactccgatttccctaggttggccgatttgatcaactcgtaggccttcttcaaggacgcagcatctgtcccaaacgggtggttgaggaaggtttggtcactgggctgggagaagtgagccgggcaacgccatcccgaaggccccaggcagccgccttgggcccccgggccacagccaccgtcagaacctgtcgccgccagggagcagcggtgtgggcgccttcctgtacgtttgctctggtcagacgatcgggaggtgggggctccggctgtggccctcgagggatcacccattgggcgggctgggatgagagggtccggggcctccccggggcgggggtcgtggcgggtcccggggcctccccggggcgggggtcgtggcgggcctggggtcaccttgctggctctcggcgcgggccagctcctgcgtgatgaccaggtccatggcgccggcgccctgctcgtccgctctctccggggtccgcggtgcgtcctgccgcccactgtcggttgggttctccagccgcgaggacccggccacggttgcctggagaccgaaagggacgcggacgcggggctacgggtcggcggcggggccacacttcggggaaggcgaacaacgccgcgcccccgccctgccccccgccagctccgcgggagtgagacaccagggcagcgacccccggcgaggggcgggaagaagaaaggggagggaaggcggcgtggggggacgccgggggctccgcgcgggcctcctctccccgctcagggctcctgtgtgcccgggttctggtcctgaccccgggctcaccctccaccttccccgggaacttccgactgcgtccttcgcgcctgcgctcgtcggctcattcattcattcattcattcattcattcattcattcattcatccattcagtcagtcagtcagtcagtcagtcagtcattccttcattctttcgttctttcattcattccgtcattactttaacaggcggtgatttgcccctgccacggtgctggaagtgcagcgggcacagaaagtcgcgcagtggaaatgcgggctgcgggcgtggatggggccgccgggtctggggacgagctaagacctggcagcagggggtggccgaggcgggaggagcagacgcagagccccggcccccacggagagggtagcagcgcagccacctgccccccggggctccccacctcccagccggggctgctttccggccggggtccggacggcgcctacgaccgacccgaattggaggcttggcggggcgcgcagcccccgcgcggggaagccggagccactgaaggacttgggtcggcctggggaggggagggcccgggactcaccccggggtgggcacactaggggagctctaggggaggcccacctggggtaggcccacctgggagaggaccccctgggagaggcccacccacgagagtcccacgtgggagagtggaattccacccgggagaggcccacctgggagaggaccccctgagagaggaccgcctgggagaggcccacctgggagagtggaattccacccgggagaggcccacctgggagaggaccccctgagagaggaccgcctgggagaggcccacctgggagagtggaattccacccaggagaggcccacctgggagagaaccccctgagagaggaccgcctgggagaggcccacctgggagagtggaattccacccgggagaggccaccatacctacatgggatcaaataagctgcctggacatagttttgaaacctgaacgtcgtatgtttctcaggctcctagagccccaccccgtcttgaagttggcagcctcagatccctgctaaatgaccatattccttcccaaagacagttctcagatgggcctttgttggtaaagacactccacacatgggtacagcctcgataaaatatttatcccctcagagaaagtatatccaaacataatgtagtaagagatttcccaaatccaagggcattaaatattaaaactcagttttctagttacacattagccttaaatatcaagagtgcaacacaaaattatcacagaacgcaggaaaaggagatgagaaaggccgcagatgggcagccaggtgggccggggcacagggcagggtcggaaagggtccccagcccaggagcttctgtgtccgtggagtggggggcaccaccctcctggcccgtggatgtgttcagcaacctggaactgctcgggacccatagtccaggcattcttatggaggctccatcgcagacatgaaggatgatggtggatgatccctggaggagggtgggtgcagggttgagagctgcaggtgctaatcctggctggtctctctggtgactggaccccctccaggagccaccaagcctcacctcatttgaatggaagaatctgctgccatcacccaggaaattcgagggcttttggagccctgtgcggggtctcgggagcagagaccagatctattcatttctcatttcatcaccccatcttgccaggtagagacggt

SEQ ID NO: 913505 - DNA, 4001 bp, Homo sapiens
taaacagttgatatttccactgttataacatataatggtatctgtttcagaaggatgaaatcaacgtgaactgatcagaaaggaactgtggcatttctttattcttcacctattcactgattgtttgctatgtgccaggcactgtcctgtcctaagttctgggaatatcaattagtggggagaaggaaaagggaaaaggaaaagagaactgcaatataagatgaggccagaggggaaatagagaattgtgaaagcagaatcgagaaagttggctgaggtcaagtaagaagaaaagtagaagaaaggaagaaacgagaggagtaacagaaagagggaaatggaaataactaatccataatagtggagcagcttctgaggccggcacctgggcagggttcctcacagaaatatgcaaatatatcctgaatagggcagagccaaggaaatgaggggctggtgcctctgggaggctggggcttccctatggggaatgaagaatgaaataaacaaagatgactggtgggagaaaagaggagaaaacactcaaaagcaataatgggacaataaagaactagaaggaacaagaaaggaaatgggaagaaagagatacaaatgactatgggtaatggggagaagtgaagtggccacagcagcatggatgtcagagagagatgtgagtgatggagcccaggcgtgaggaagatggatgatatgaaagagatcgtatgataaggaaaggaaggaggtgttgaccacgggaagacggaatttataaagctagactggagatggaggaaaagcaatgatgaggggatgtgaatggtgcagaggaagcaagagagtaactagaatggggtggggagggggtggagcacgatggtgctgaaagatgatggggcttgggctggcttcatgggagtgaaaactggtcagttgcacagggccccttgctcagaaaggccccattcttggttgaatgctctgctgttctgtcttaaaattatttgtaatttttgaagagactttgtgttttcactttgcatcaggccttgcaaatcatgtagctggtcctggctggaacagaccgtgggatgggtgatgggggaagggctctgatggggccatgaaggatttgggtagggccatagtggatggggactgtgaatggcaagtaatgacagggacccgaggctcttgaggttatacgtgagggggctaaggggcaggcagggagtcactgaagggttgcagaaataacccctcattggagaggctgaaaatggggtgtactgtaatatgggggagtggtggggtgatacgagatgttaacacaggagtcaatgaacacacggggcagaggtgatgggcagaagagccttaatgaagctgtgtgacagcaggtgatcacatgttaggaaatcagggtgtgacaggtggacaagggccattgattgggatgacagcaggcatctgtgaagctttcttcccggtttcccctgtgagataagacatctccaatatttctgtgtgagcctctcttatggtatcactccatgactaaaaatctagggctgggtgcatgtcacgtgtggatttcagaattcattaattttctaccgcacttagcatagcgccgatgccacagtggggatagtggggtgtccacacaaatgaaggagaaacaggaggtaaagaggccagagccaacggagaaaggcgcgggagtgagtgagggtgcaggggaataagatgttgatggggggaaatattggaatcaccgtttgtgacaatcgtcagtaggagagggacaatggggaggggtcaagggaaaggcgacagaggggcgctgactcctgacctcagccatcctgatgctctctgggggcggcctcagaggctgctgtggagatcgcaggagctgggccggagtctgggaaagaagctaaaggcgcgacgcgctgtctctatcgcccgccccgagcggaaacccgcgctcggcgcgtcggcccgtcgcctggcaacggacacgccctctaggggcgctagcgggaattcgaaaggggaggagcttctgcggctggcacctgggcagggttcctcagagaaatatgcaaatatatcccaatggggcggagccaaggaagtgagggggcggtgcccctgagaggctgggaggagtcccacggtgtgggcagatggagacacccaggagaaagaagagggcgaattggaagaggccacccagaaaggacggtgtgtgacactagggagccaagcatggagagccgaggactaacgcttggaaggaaatgtggaccagaaggttccggatgagggaaggactggcggctacactctgccttccgagacaacgaggaataatctcacttcagtcagttcaacccttgtaaaacagctactgtgtgcaagacacggagggaaagctgaagtagagaaaccacagacgctgtcttcaaagggtttaatctaatattagtgatgagaaaaatagggtgcagagcttaaggcatcctggaaaaacgtatgtagcgccacatcgcgaaaatctctcttctgggacccctctcccaaaaacgtttcttcgccctcttctcccccttctgcctccactctttctggacttcaggtacaaatagttgaaataattatactccttggttcatgaaatgtgtaagactcctctctggttttattttccccctttatccccatccctactcccaacccctatcctcaaccccataggcattcatgctgctgtgcttccatatgtatttttgggaaatgtacaaaatttttatcagtgtattttttaaaaatgtttaaataatgctactggactttggagattatcttattttctacttttttcactcaacattctttttaaggatctgtcctcgttgcgattggcaagcatatagttcattgcttctgagtactgcacagcgtttcataaggggcatctaccacacttcacttccattccccaggtgttaggtaacaaggccgcctctaattctccaatacatcaagtaatacagccatgatcgtctttgtccgtggtcccttaaggacctctgtgcaaattcctctgaaatatatgccaaggagtaagattgttaaagttatagggatgcacagggacatttgcttatgcagctgcgtcctgcacaaacacatccagccatggggcaatggaggctgaaaaactgtctctactctctttcccgtgccatgtgccctactggagaaaggtgtgcactttttattctcacaaaatctctgtacgccagccaagtcatgaacctagaaggctgtaactatctagagggtgtgatattttcaaactcatctggccagatgaacagttttccaagagcacaacgatgcccagtagcctagtacaagccctgggtacttaccaagcactttaagattgtgtaccagagttactgccctacgctgcactccagtgtggggtttccatccaacacttccatccatcccttccagaaggtgataggtcttttttattaaacactcataaagtgtttagtaaataccagatactattctaagtgctttgcaaatattgactcatctaattagctaattttctaatttctgtcaatatgatgaaagtagtgtaagctcattttttgctttcattttcacttctctaactactagtgaattttttgaccatttctttatacattcataggctacttgagattcccttctgtgaactgccttttcagtgtctgtgtctatttttctattgatcttttttctttttcttttgatttacagatatctttgagaagcctggacatcaatctgctttagaagactagaaactctgcctttatgtctttaagggaacaatagtccttaactttgatactgtggctctttagctctttttttccctatattttttatatagttttttggtattatttagacctccttaa

SEQ ID NO: 913506 - DNA, 4001 bp, Homo sapiens
ttctcactctaattcatcctgcttttgtcagaattgctcattgaaaaaacttgttaagcttggcactgtgatgggtgctgaggatacaagagataagatgtgaactctctaacctcaagaaatttaaaatctagtgaggacgagagacgtgtaactagaccaggagtcataatctgtgagacaggtgctctgacagaggaaagaagggaggagtgaaacacacagggaggaaaaggggggtggaaatttattttttcttttacaaataaaaagaatgagagaagcaaggaaattaactgattatagccagtgtgccaagtgtgcttcgcatttattatcttaaatgtagcctcccttctaagagattcttaaatctctatttgattgaaaaaaattgagcttcagagaagtttgttatcttaccagcagtcatacagcaaggaagtgctgaatgaagctgggacctagctggatttgagaatacatatgcatgccaggaaaatcttggaggaagtacgctggaactatgtcttaataaagggaaggatattccaagaaagggaacagattttaaaacgttcagaggcaaaacaacacacatagcaagtagcaagtagcttgcagtggtggagtaagaagaaatagggagaaaatgagaagagacaagcagataaataccttattaaagtacagatctgatcgtatcactgtcttgttccctctcacctaccaaataaactgtaacactacagtttaactgtagttaaatgtagtactacattcagggctttctaggatcttgcagtgccagtcaactcccctcttctagcttatgctcttgcttagtatttttcaaagattacctgcatttagtcgcttttgaacctttgcatttttccttccccctggaattatctctccctttctcctcactccgtctctacagcaaatcctactcatcctttaaaatccagctcaaatgcttcctagtccatgaagcttcccagtcggaaaaacttgcctttcctctgaattcatttagcactttacacgtcttttgtggcattaccacaagctgtcctgtttatgaagactgggtattcaaaagacctttcctacttaacaactatgtgcccctaggcaaatgcctaacttctctaagcctcagtttcaccttctgtaaaatggataacttccaacctgtttcacatttattgtgaatatcccctaagatattaaagctttttaagtatgaagcactgcacaaatggtattattaatatgcagcgtttgtcctgagagctcatttacacccttgaaggcatgtaacctgtctcacgcatatttacgggcccagagtgcctggcaccatgtcttgtacacaacaggcgttcgcgtcgtgtttgaattatgaatgcaagatataggactaaagttatagtcagggcagctagggtggggactcttgttgcccccggcaaggcacgcatttcttgtcatctgctcggaagaagctgcaaggggagagtccagtgagaaaaaggttagacgaaggaggcgatgtgactgagtctggtctggggacaagcgcagtcagcgcagaatgaggaggcctccgacgagaagcggtaaaggaaggtctacgtccgcgctcctgtggaggtcgccgggctggggttggcggcagagtccgcacctggccgggccagcggcttttcggtctaaatatcggggttttcagcctggccttagctaagggagcagaagatcggggtgacggctgtggtgtggccgcagggctgaggtggggaggccgggaagagagagtttcttcaggagggatcactgtcttacctgcagcagcctcagttatgtttttgacaactatagcaaccaactacctctcgcgagaacttacttttggccatcgcacgagcaagtttattccaagactcgcgataaccctctggggccgggagcagggagcgagacgctgagcttctgcgcctgcgccctagcgccggctgcagcctcctcacttcgagagcctgctgtttccgcggatgctttaccttgccaagagttgggtttaagtgcataggtttccacctttacattttgctttctcgactctttgatttcaatatttctctataataggagggaaaaaagcaaaaggaagtttaaagaaaaaggcctttattaaactgatttgaaaacatcatttaaatatttctccgtgaaatatgcaatattttttaaatgagcccgtcacgccctgttgatgagagtgcaaaatgaccctgcttctaggtgctcaatatttgtacaataaacagacctgaagtttatgatgttaatacaaatttttaatattcaaaatttaacattaaagagctagaatagcaaaacacaatagcaataacctggaaacaacccaagtgcccgtcgaaggaatagtggatgagtggaccaataaactgtggcatattcacaaaatggcatattacaagcagtcaaagttaatgaactgcagccatacacacaacacggatgaattttagcagtatatatactttaaattgttgcagtgttaagagccagcttgaagggactcccatgggccaaataagggacaatttgagcatgaagtaaacaacgacgataacggattacaacccattgaataaaataggaatatgcaagtccgtgttgatacagagaaaaaggaaaactctttcaaagtaggatgccaacccagaagtgtagcgagaaggatggaaatagagaactaccatttgacaactactgaggaggatgactcaggcaggagtcttcaatggacgctaaggctggtgggtagatgttctatgaggcatagaatactggcgtgattttggaatgcttccatggaatactacttgattacagagggggaaacagtgaatggacgcaaccaacatgatcaggtgatcatggttaacatcaccagtgttgggaggagtctacattgtgagcctcctggtgaaacacactaaaaaaaaacacacacacacacacaaagcatcctttttggttttcctaccatgaaaggaactcaggttgtagaccatccaaggacaagaaagactgggaactgtctctgactgaggttatatgacaactaaattcaatatgtatctctgtatagcattctggaccagaaaggaaaacaacattgttaggacggtgggaaaaatgtgaattagctctgtgaatcgcataccaccccgaacatgcccaatctcatctgaattggatggtagtgttgtaccaatattgatttcctgatgtggaagtttgtttgttgttaggtaggagagtgtccctgtttaggggaaaataaacactagtgtgtttaggagtgatgagacaccatctcttcaatttgctctcttgactttcaaaaggtccagaaaaagactaacaagggatacatacacatgtacacacacatatgcacatgcatgcacacctgcacacatacacacacagtgagcaatggaacaagtgcaataaagtgttaactatttgggaatctgagtgcaggggacatgggacttccttacacgatttgggcaacttttctatacattcgagatcatttcaaaacaattaaaatatatacacacgcataaccactctccctgggaagccctttgcttaggaaatagttaccagagtcaaattttaaaatttttatttatatgaataaagaaacattataaatattgagaaatattttttgaaagttgcagtgttacaggtaataaaggttctcaaaataaaactactgtggcactactgagtaaggatttctctctggattttttttcccaagtgagagttttgggtgaatttgcactgagacagctatcccacttgcaaatgacagactctttctacataataagctgggttaggccaagtctttaatagggagctgttcttccagaaatcgc

SEQ ID NO: 913507 - DNA, 4001 bp, Homo sapiens
ccttttccacatgaggaatcagggatccagggccaaatttcactttatctttcttttagaaagggctgtacctgctgcatgtatgttttaattaagaaaactgaatatacagaaattccagatttcagaagcaatgctttgatgttcatttgcagtagctatggatggattcatgaaaacaggggcttcctcagaatccccttgcacatctatcagccactctagtgtatactattgactcaccagttttgcaaagcaaggcacgcctccaattctgttcttcccctaatccattcccacaaataataaaatgattgactgctcagcgttaatctttctatgaaactttacagagtaatcctatcatttgcctgttatacagaaatcagctgaaaagcattaagaatattagcgtgtttttcctccatgaaattgctagagcacaacaaacagagccccttctcctgcctccttttctctaacaacccccaacagaacaccctacacccagattcctctctttccatggtgaggctgatggaggcttagaaggacacttggtatgcccgctccctcttcccttttttatcagtcaaaataccagtgaaacggaagtcaatacttatttgattcatggttttttttcctttttaaagcacgaataacatttctttcaaaataaatatacagttctataaaaaaatataagaaggtactataattcttggtcactgtccagcagaaacatgtttgattgcttttagagtcagaagtcaacaccatccacaaaaatacattcttttagccaggttttagaacactttgaaacatagaaaattccttattctacaaacaagtccttttagagatattctaaatatgccagtgatgaatgtctaattcatatgcaggattcaaggctattgaggtgagctagactaagaataccaagaacacaaaattgtattgatacacaaacagtatgtaaattactttgtcagattacaaaaatgcatcagattttatctatggttttcatagataaacataaagcaataagttagttgctttaaaaaaatatatagctcaggtgtttctcttcattcaagtgtgaaaggcacagcagtcccgagtcttaggggcacccaccgcagccacatcaccgcgctgggacagatgcagtccgcagcgttcccagtattttgtcccagtgtgtaaagtacggagcgaagttgcagttaaagtgagagtgatgcaggtcgtggtgcaccacacccccgtaccacccgaagggcaccagtctgtgagtggaccaagggaagttgtagccggagtggtcctccacggaaagccagatgttgaccacgtggaaggtcagggtggtgagcgggtggcacccgagcagtgtgacgttcatcatgtcgaagaagcccaaagaaaacagttcccagacgctcatatactgcgttgccagcgcgaacgaggacgagttctggtggtgcaccttgtggaaggtgcggtacagccagggcaccttgtggtgcagcaggtgccacacgaagaactccatgtcgaagagtagcaggcagaacaggatgtggtgcagcagcaggagcagctcgggagcttcgtggggcaggagggccgggctgcgggcccaatgcagcagcgtcacggggaacacaaacatcacatgctggtagagggtctgccccaggcaaggtagcagctgctgcgcggatggcgagaagtcagggtggatcttgtagcgccgcagggcgggcacccaggagcacaggatatccaggaccacgaagggcaggcaaaagcccacgtatgtggtgatggagaagatgaccgggaagaagggcgactgtaggagggcctcccagctcctcaggtggtcccagaggggctgcaggaacagctgcccggagctgcaaaggacctgggggtcggagcagttgtggcagctcattgcgaggctgtgcaaggcagctgaggctgctgctcgagtcccatcgacttttcacaggactcacggccccgccccgagtgatgtcagctgcctttccatccctttcccggcgatgcgaagcttgaataagctagcaacccggcagagtggcccttcattgctgtaaatgtgctcatctatagccgcatcttaccggcttttagatatgcgtgtatgcagtggcacttcgtacttttcatgtaagttctgatttttcagttgacgtacaattaacacgggacacaatgtacagatctaccgtgtggagtttctatgagtttggcaactcagttcacgtgtgtcatcacgggtctcaaactagaccgtttacattgccaccagaaagcgctcctttgcaatcaatgcagaattgtttgtgttttttaatgcatacgtataactgcatccatgtgctttcataaagacgcaagcataatcgcattttaaaaactgtttaaagctacatgcggtctgtagctcgggtgttttctgagaacccggttgcggtctatccagcggcgatcgagaaacgagccctttgcacagggaaccgctggtccccgaacgccggcggtgaccgtcagctcaggaaatcagacgggaagggtggccggatgggaacctccgccagctccagcttgtccccagagttttcctggccggcgggcagcaagctagagagaccacgcacgcaggctctccgggagaggccgcagcccggccgcgtagctaccctcggcggcgcgtcccggggcgccgggcccgcgatcggagccggaggcaccgcacagcggaaagagggctccgcggcggccaggctcagctttgccgggaaaatgctggatttaactcccagtctgcgccaatctggctaaaaagcccgttgtatctcaatttggggcgggaacacttaattcagcaaaccacctgcgttgttcgtcaagggaaagagatgtgagttcctgaagcctcccgggaggctattgaaggaccaggtgatgtcgtcactaccctacccttccccttgttggctttgcggggccaacttgcagtcgccctctgccaccggtccttgaatccactccgggcccacggagcccggctagggggctagtctctatcccctgcgtttctccgccacccatctggggtcctcgggccaggggccaccgagcacaaggaggtcggtactaggagagctcttgagagaccctgggaacagcacaaaaatcctcgcgttcaacccggggtctgacacatgacacgatacaagggccccttaggggatagacgttttagacaccagctttgaagccagggagcactcctaattcttgcttagtgtcttgtatctatgtggttgtgtccagccctttactccttgaagcttgcattttcttatccccccgattccccacaaagggaaattggagtattaaatggaaaaataataagtctaccgtgtaaagcccacctactaggtgccacgcattggctaaatgttttatctgaattgattttatccaatcctcaaaaaagctggcttcctcaccctgccaagaagtaggattattattattgctgtgggtttacagcagtaaaatcataggtcctagcacacagcaaacacaccaagtaatatgcatggtattttaaatttgtactccacacgttacctaaagaataactgagaaatttgaaattaaaatcaagtaagattatgtaaagagaaataaaagatataacgccatctattatgaggaaagaacaagtactacaaaaatatggaccaatatatgggcctaaaactaagatcatatatggtatatatgcatacatatgatatatataatatgccaattcataatatgtaatatataagatatagatacatataataggccaatttgtaattcagaatctcctaactggtgtgtgtccactaactgccactgatggaatactgacattccttagatgctca

SEQ ID NO: 913508 - DNA, 4001 bp, Homo sapiens
gggtgaattccctcactccgttggtggagggaaaggaatgcatgcgtgggtgaatggaggcctttaaggccctgtgctccaggatgcatctgggctaattgggagcctggcctgtggccagggcagggagactctgggcctgctggaggcgttgtgacctaggcagtctcgggtctgcaggctgccagtgtagatgccataggagtgcccagggaggtatgcagggaggctgggcagccagggcccctaggggccacctgccttagtctggggagaggcagattaattttgaaggtacagtagaagtgagccaggccaagagggcaaagactgttattattaggctgtgggtcacaattgctaccctctgagatccccctgaacctaagcctccacaggcacatactcatgttttccaccagcccaccctctattctctcaagtctaaagctgaggtttagctaatttcctcacccctctccccacccaacaccacccctacccagaggcaagcaccgcccatgtatgggcacctggcagggttgttgccaggaacagagagtccagaaagatggatgaaccaggcccaaggatggaggagcctggggctgccttgcagtgctgggcagagaatgtaaagcccttgctggcacagtgcagggacactctccacaggcttgttcccacgcctcccagtgctgtgggttcgtaggggctgcccccaactgcaaagtgaaagaggtggcgtcctggtgaggattcaccggagcatggcagtcttttgagaggacagcaaggacaaggtcaggttggtaaaggccctacagaccatgcagccaatgcctccttttgctctggcccagagcccccccctcccccccattcgggagacactagtcaggcttcagggaccctgagcttgaagaaggcagagctgggtgggatggtttcctggtggtcccacctaccaactcttcttcctccatcactcctgggcagatgcctagaggatgtatgtgtatatatgtctgtttgtgttttgtgcctcccacccatgctcctgccagcctggctttccaagggctgcctgctctgccccgaaggtccaaccccagtctggccggtcattcacaggctgtcatcggctatgtcctggctcagacttgccaccagccactgctcctccttccccaccccctgctcccgggagaagcggttgccaaccagcaattcaggcgagtcgggtcagacccaaggaccctccgactagacacagaaagcgcggacctggtcacttagcagatgctgggccaagtgaagtgagaacatgcgcttggagtcccgaagccctgatggttaagcctccccaagcccaggcaccgaagcaacgcaatcctgcagcttcctagctgacccccgacggccgctgctgcgcaggactcagaggactccacgagtcctggggcctctcggccccggtgctgtccctggatagagcccccgaccgccgcccttgctcccggcaccgcgctccgccagcccagcccagcccttcttctcacctgctctcctcggctctgctgcctcggccgacgctgcaccgcaccactcaggagtgtgggcgggggtgtgagccggaaggggtggggggcgtgtcgcagcgcgggggtgggggctgcagcctgggttcccggcagggcctccgacgtcgcccgggtccccgcggccacccgactggagaaagcaagctggccgcacttctctccttcctcttgtacctcctccctcctctctcttccatttcccccctcccccaagccccctcttcttcgctgtcctcagccccatcccttccccagctccccgcccagggatctcagctcccggcccccagaatctacccggagcgcttcccggaggaactcgggcaacaaatttaggctctagaagggggcacagaacactgtcccgcccatgcctcctgcccctagctcagcatttcccagtcaccgcacttccccaaccccattattccagccttggggtgctgctgctgaatcctggagagggttgggtctgaggaagtctctgctcgctgccctcctctccccaccatccaggccagtctcaaaccctgctacaccatctttcaaaataataataagaaacaataactgggatcaatattcactgcaggacttccctttctgttaccatcccattcctgctggcactatggggtggggagcagaggtggggtgctacagacttgggacaatcctgatggcagacctgaggatgcttaaggactgcggcaagaggcaggctctcctctcagacaaaagcatcccccaccccagatagagacccccacacagaaatagcacagacagaccgacaaaggcagactccgcccaggcacacacagcccgactcgcagatcgaggacagacatgcgcacaacagcagagcagaccctcacaggcgcagctaacacacaggcgaccctgaccagccgcctcttcacgctatgatgggaagactctgcctcgatcatcagactacggtcttcgggacatggagtgttgcgcgaacgctggcttgaggctctcagggctgggactaaggatgggaaactttcctgacagtcctgggccgctgctcccactcaggacagggtggcagtgggggttggcaccagatcccacactcgcatctctcccttcaagactcagaccctcgggactgacagggatacagcaaacaccaaccacggctcccccactcctcctaggacaagttctctaatgaacacacacatcacatcatacacacatttccagaggtcggactctaaaagatgggccgtttttcttcctctgccggaatgctcggctcctactcctttctcaaagcctcaacggggcgggattctggtctgaagggaagctcagcccaggcacctcagagctctgaggctggtgtggggcgtgtcctcaaagggcggggcctggcgtgcctagctggagcgggtcctcaggctcccccgggcggcatccccgggctctgcgctaggcctggaaaagagggtctatcctgggctgaggggagcatggtgctccttggtgaccgtgggtgacagcctttgttgggtttgcttccttcctatccccttttccaggtagaaaaacagctacaggtgcctacgtgttagtttggcttaggtctggattgggacttggagacccagttcaccctcccctctgctctggccctgcgcgcctccacgcaccccccaccagtaaagagactcggcctcctgggacagacacagtttattgatttgggcggaggcgccgcggtgcagcggcccaagtttggcactgggagcaatggaaggaaggacagacagatgcaggctctacacaggggagccgcaggtggggactcagggtcctcttcacctccgcaaggagcgcgatggcttcgctggcctcggtgctccaagccccattggacaagagagaaagggatatggaacgggtcacagggaggggatttgggcagaagtcaaggttgaggagtggctggggtactcgctggaggaggtgggccctgagccagagctggccagtgggcttgcagagcagcccccttgacccaaggcggttgggtgggctggaggaggagtggggatgctagctgcgggtgtagtagtagttgtagtcgtcctcgcacgcatcaaaagggccaggcgggctgcgaggctcgccgtcctggccagacacaggacgctcacgcaggcgcaccgcatcgtacagaccttgcggtggctcatcaagcagcacatcgcgctcggaacgggagcgcgtcaggaggcccacgttgcggagcagcagcaagacgggagcatagagcaggttggccagtcccatgccaaggctgagctgctcaaagcccagcgagtgcacaatgtggcctgccactatgggcccgagcgc

SEQ ID NO: 913509 - DNA, 4001 bp, Homo sapiens
tctccgtagggtagcggggccgaagggctgagcccgctggccacgcagctgtcggggacgccgaggtgttggccgtgtaggcgctggcattggccggagtgggcagcggcagggtgggctcccacacctcgggagtccgggtggggccctcgccgcccccgcgcatgtgggcgatgtagtcgggcactatgggcacgatgaccatgtacagcatgttgtccagtaacagcgccacgcacacgataacaagcaccaggcgcctctgccgccggggctcctgcagcgccgcgcccacagcctccgacagcttggtggccgccgcccgggcctggcccgcaggttccgcggattccatgcccccaccccgatgctcttccgaggacgcctccgccagggccgagcgctggcgtcccgcagtgcagaggcgagggcacgggacttcggggaggctgtcctggccgagcagactcccctgtgcctcaggtggccgcggagctcatggcccagcgtcccgggaaaggaaaggactccgtccggcgaggcgttgcagctactcttagccgatcccgggacccgcggctgctgggctcaggggcggccgggaagtcgggcgcgccgaggggccggggccggagactgggcgcacttcgcccggggcgcgcccagagcagcccccgccgcgctaagaggccgcccgcgctggccgagggacatgctgttgccgcccgcccgcttgcccgcccgttagccccgccgctgcgctcccctcccctcgcgtcggctcttgcctcctccgccgcctcctctttttttttcccttccactcggggctgtgacgcggcgagtcccagcccccgagtggtgcccgggccacttacgtcgctcatgctaatgcgacgtcggcggggcgggggccgggggcggggcgtggccgggcaggggtccgctctccagatgctccagggctggaggcccaggaagggctctcggtgtggaagtcttgaaccagcccctgggatgggcgttccgcgccggtagctggccctctgccccccgccccctgcctgccccccgcccgcggttctaggactcgcggggtcagcgcccgctcttctcctcttggggaagggggcgcggcagccggttcctcgaggccccttgggagaggcgggagccagaggcttgcgatctccgcttcagcctggacctcggcgcacagcgagcaggaagcccccgaggtgagccgccgctgcgtccatctgttctcgcagctggattgtggagccgcgtccggaggagcgctggacacggacacccccaaccctttctccgactccgccccctggccccttgcacacacactcccgccaggaggggaggggaaggctcagcaactgcctggcctggctctgacccaccggcccctccgcagaatttctcggccgcgaatcgcggccgggagcttgtggggactgagggcagaagttgccgcgccccagtcggggtcgcgaatattagcctggccgctgccgccctcccgcactgcctggccacattccccttgcctggaatccccctttctcctttagcggtctggtcccccagctccgcctcttctctccccgccgccgcaccccctccccactctaactcctcccaggcactcttcgcacccgaccaagccctccctcggctcctgccagcctccgccccctgttctgcacactcccccatccctcattttccagagcctcctccaagccccgggtgggctctggagtgactgtggctggggtcctctcttggaactgtaagaaacccttcttgggtgccgcgcccactccccggagagcgcccagccgcttcgctgtcgtcaggggctccagggagactcaccttccttctgagagggccgcaccccttgaggcgcccgtgctcagctgacaggctgagctgcccaggctgtgcgctgggcctgacgcgtccccagagcggcgttgaccctggatggcacatggaacccgtgttccagtgggcggactggcgggagagaggctccagggcggctgaggttggaggtggggattgtgttgttgagattacggtttgcgtctctcttccagagtcagaggggagccttcccatttttctggcctcaaaagtaaagcagcattagacgcagatgcttctcccattgtgccccccaccccgcaggaagtgccgcgatgcagtgcaaagagtgtggtctttcgaggcagacaaccaggatggctcccagctctgccacgtactcattagagtacctgcagggaattactttgcctctctgtccctcagttagtttctttgtaaaattgaataataatagtacctactgctaagggggccgggcacacagtaagagcagtataaggacttgctatgttgttatcgtgtgtagaatgtgcggtttatcctcatttttcacttgtgggtcttgtgaagaacagatgaaagacacagggggcacttggctagctggctgatccctctggctaggtgggcattgtgactccaggctctgtctgggttggtggaggacccggagggcattggaatgtctccatctgtccctgagatggctgtaggatgaggggatggggaccaatgtgtcagggtgagaggcggcagcctggccacctgttgctcaattccttcacccacccagtcaccctgggaaaggagaaactcatccactgaagggctgctgccacctgctctgcagtgactgaagtgccctctgtctgagggaggaaaagagtcccaatgtgggcacaggcctggccctggatgaccttgggcaagtcacagcccctcagtggggcccagcctcagcctccgtctggttcaggttgaggtgagagcccactcactgcagcccttagcagaagtgcgtgctgcagaagactctttggagtgggctaattattttaaattgtatttgatggcctttcgtcagtacatgcacactctccagcacatcccaatctcgccccagctgacttcacacacttatgccacttgctggttctccagtcatttccgtttgagacctctgggctcttctgactctcccattatgaggctcttaaaggggcagtctcccagcctacaaaacaattattatttatgcacatgctatttcccctgtctgattaaagaaaggaggaaggaggacttgaaggacaatttttttttatgtctagtggctgaagaacagaggaatcatagaggacaggaactttcccagggccttcaaggtgcagaccacatctccagccctctggcccacatggctgttcctgagcatgaagccaggtatctctgggctcatgactagctctccagtcctcggttcctgtatggcaggaggcacactcatttattacttgctttgtgccaggagtattgtgtgtgctgttttactccattctcctgcaatcctggtgcagtgtaggtgctattcccctggtcttatcaggtgaggaagctgggcgtggagatgctgggtgcttgcccaagctcccagcagcagatcctggaattaaacccaggctgggggacctgtcttgtggtcctcacactgcttccctattcccggcacggcgtcgtgctcctgctgctccatctccaaggtggccgcacgctggcagtgtaggggtgaggagcagatcaagacccatgggaggaggaaggtcctgggctggctccctaaggaggctccaaagacactaaactccctcattctctaactttcagatcagagggcaacgcccccccaatccatcgtggctccaaatacgggagtgccggggttgcaaggaggcgtcaggcccctgcagcaaaaggctacgggagggtctgagccgagatgggacctggcaaagcctcttctccccgccagccgccgggagctgtccagggtgctggccccggccccaccgcaaccaagaagcctccca

SEQ ID NO: 913510 - DNA, 4001 bp, Homo sapiens
cagagctgggtgggatggtttcctggtggtcccacctaccaactcttcttcctccatcactcctgggcagatgcctagaggatgtatgtgtatatatgtctgtttgtgttttgtgcctcccacccatgctcctgccagcctggctttccaagggctgcctgctctgccccgaaggtccaaccccagtctggccggtcattcacaggctgtcatcggctatgtcctggctcagacttgccaccagccactgctcctccttccccaccccctgctcccgggagaagcggttgccaaccagcaattcaggcgagtcgggtcagacccaaggaccctccgactagacacagaaagcgcggacctggtcacttagcagatgctgggccaagtgaagtgagaacatgcgcttggagtcccgaagccctgatggttaagcctccccaagcccaggcaccgaagcaacgcaatcctgcagcttcctagctgacccccgacggccgctgctgcgcaggactcagaggactccacgagtcctggggcctctcggccccggtgctgtccctggatagagcccccgaccgccgcccttgctcccggcaccgcgctccgccagcccagcccagcccttcttctcacctgctctcctcggctctgctgcctcggccgacgctgcaccgcaccactcaggagtgtgggcgggggtgtgagccggaaggggtggggggcgtgtcgcagcgcgggggtgggggctgcagcctgggttcccggcagggcctccgacgtcgcccgggtccccgcggccacccgactggagaaagcaagctggccgcacttctctccttcctcttgtacctcctccctcctctctcttccatttcccccctcccccaagccccctcttcttcgctgtcctcagccccatcccttccccagctccccgcccagggatctcagctcccggcccccagaatctacccggagcgcttcccggaggaactcgggcaacaaatttaggctctagaagggggcacagaacactgtcccgcccatgcctcctgcccctagctcagcatttcccagtcaccgcacttccccaaccccattattccagccttggggtgctgctgctgaatcctggagagggttgggtctgaggaagtctctgctcgctgccctcctctccccaccatccaggccagtctcaaaccctgctacaccatctttcaaaataataataagaaacaataactgggatcaatattcactgcaggacttccctttctgttaccatcccattcctgctggcactatggggtggggagcagaggtggggtgctacagacttgggacaatcctgatggcagacctgaggatgcttaaggactgcggcaagaggcaggctctcctctcagacaaaagcatcccccaccccagatagagacccccacacagaaatagcacagacagaccgacaaaggcagactccgcccaggcacacacagcccgactcgcagatcgaggacagacatgcgcacaacagcagagcagaccctcacaggcgcagctaacacacaggcgaccctgaccagccgcctcttcacgctatgatgggaagactctgcctcgatcatcagactacggtcttcgggacatggagtgttgcgcgaacgctggcttgaggctctcagggctgggactaaggatgggaaactttcctgacagtcctgggccgctgctcccactcaggacagggtggcagtgggggttggcaccagatcccacactcgcatctctcccttcaagactcagaccctcgggactgacagggatacagcaaacaccaaccacggctcccccactcctcctaggacaagttctctaatgaacacacacatcacatcatacacacatttccagaggtcggactctaaaagatgggccgtttttcttcctctgccggaatgctcggctcctactcctttctcaaagcctcaacggggcgggattctggtctgaagggaagctcagcccaggcacctcagagctctgaggctggtgtggggcgtgtcctcaaagggcggggcctggcgtgcctagctggagcgggtcctcaggctcccccgggcggcatccccgggctctgcgctaggcctggaaaagagggtctatcctgggctgaggggagcatggtgctccttggtgaccgtgggtgacagcctttgttgggtttgcttccttcctatccccttttccaggtagaaaaacagctacaggtgcctacgtgttagtttggcttaggtctggattgggacttggagacccagttcaccctcccctctgctctggccctgcgcgcctccacgcaccccccaccagtaaagagactcggcctcctgggacagacacagtttattgatttgggcggaggcgccgcggtgcagcggcccaagtttggcactgggagcaatggaaggaaggacagacagatgcaggctctacacaggggagccgcaggtggggactcagggtcctcttcacctccgcaaggagcgcgatggcttcgctggcctcggtgctccaagccccattggacaagagagaaagggatatggaacgggtcacagggaggggatttgggcagaagtcaaggttgaggagtggctggggtactcgctggaggaggtgggccctgagccagagctggccagtgggcttgcagagcagcccccttgacccaaggcggttgggtgggctggaggaggagtggggatgctagctgcgggtgtagtagtagttgtagtcgtcctcgcacgcatcaaaagggccaggcgggctgcgaggctcgccgtcctggccagacacaggacgctcacgcaggcgcaccgcatcgtacagaccttgcggtggctcatcaagcagcacatcgcgctcggaacgggagcgcgtcaggaggcccacgttgcggagcagcagcaagacgggagcatagagcaggttggccagtcccatgccaaggctgagctgctcaaagcccagcgagtgcacaatgtggcctgccactatgggcccgagcgcgtaggccaccgaataggagatgtcggcgatggcgtagacgctgccatagactgagacatggcgcacgtccaccaggaaggcgagcgtgggcagcagtgctgtgtcgactagggctatgccaaaacagaggccgcatagtgagaccactagcggcgcgaaggagcggcaggcgggcacgatgcacgagctggcgccgatcacagccagcccaagcgcgccgtacagccactgcaggtgtgggtagcgcgccgccaggcgcacggtgaggtagacgcccagcacatgaggcacgaaggccggcagccaggccatgcccatctcccactcggaagccgccatcgtatgcttcatccacgtggcaatggtgggttcgaggaaggcgaggggaatgttacaggtggtgagcgcgccggccaccacggcaatgtaggggtctagcatgaggcggtggatgggagtgcccactggcaggttggcccgagcccgtgcagccgccgagaagggtttggccactgccagcagcaacagcgcgtcaaagagcgacacggcagctagcaccaagaagggcacgcgcttgccggcgaactcatagaggatgcccccgaagggcggggccactaggcttccgaagctaatgaaggccagcgccacgcccagtgcacgactgcgctccggctcctccgggtacttatcggcgatcatggctatgccagacgtgtcggcgaaggctgagcccaggccctgcaggctgcgcgccgcgaacagcgtggcgtagtcctcggcgaaggcgaacaggactgtagaggcgaacatgacgcccaggccgatcagcagcggcacgtcgtagctcatgcggtcgatgaagggcccgctcaaggggttcactagcagctgcaggatagccttggaagcaaacagcaccccgatct

SEQ ID NO: 913511 - DNA, 4001 bp, Homo sapiens
ggctcatgcctgtaatcccagcactttgggaggccaaggcgggtggtccacttgaggtcaggagttcgagaccagcctggccaacatggtgaaaccccgtctctactgaaaatagaaaaattagcccgtcatgatggtgggtgcctgtaatcccagctactcagaaagctgaggcaggagaatcacttgaaccttggaggcggaggttgcagtgagctgagatagtgccattgcactccagcctgggcaacagagcgagactgcgtcttaaacaaataaataaatacagctaaaatgtgaaattttaatgactttttttcctatttttgaacgtgaccagctaattttaaaactttttttaactgcgtggatcaaataaaacatatctgcagaacctctaggtcaccagtttgttaactttattattcagagagcaccttgcagggactacgcacaaaataggcaatcactaagtatttacagacgaaggcaacttcaacttccttattgcatccaaaagcaagggcactaaatggtgtaaaagacttcaaatgcagggaaagacaatacaacggtatttgtcctgctcctagggcaaatcaggaaggaaagaatttccagggtctaggggaggctcaagaatgaagagagtacctaattcacaacaaaaggccaagttctgttcagaggattttatttcaagataaatcataacttctacccatactatgattccaaagggtgaaaaaagtgttttgcctcttctaccctccaaagagggcatggcaatgccaatgtctctaaaatgcctctgcatagttgtcagaagctatatttcagtcattgaaaatacttgtccattttcagctgaggtaaggtttgttaggaaacctctgtaacaacttattcaatttatttggaagtaaactcccagactctcccagggtttcctgtattgatctcatctttcgggcttcctgaaaacacaaaacaaatacaagaatgacagctctacagtttgtctagtccagacttttaagatctgacccaaaaaaccaatcaatcaatcaagtttgtcctgatgtaggcccatagttctcacaatgccctaaagcacatgaagatgttaaccagcctggagagatctatgtcagcctcttttcaacaaaagggcgttgggacctacaaatgagactatgttcagaagctactatctcagctaacaattaagcctagacaggaaaccaaactattgtcattatttagttttagtctctttagttctatttcacacaataatgtctacttgagcagcaatttacatttttcaaaatgattttcccattcattacttcatctgacactcacaacattctttaaggtggtattggttagcctcattttacgtacagtaactcgaaagttcagagcaatgaataaatccgtcaagatcacacagccttcaaaactgtaacctttcccactttggcgtgaataatatacctcccaaatgaatgaaagggcctttcctagcaaaaggcagggagaatcattacttctatctcccccattcttttcctgagaaagcaccccaggagccatcggtcacctgagccctcgcggcacaatcgaggaagccctggatctcttttctgcacgcatcgtcgcggaattcattctgcttccagcaagccatcatcaccgacatctccgtgatgcaagtcgcctctggaggggcagatccgggggaccttcagtcacaagaagacccaccttcctgccctcctacccacccgcccctgctcatgctccggcttccgctccggggccgtcctgactccgactgctcaccgcccttctcccggcgccgctccccgacgcggttagctagaatgagaggtttattgggcttcagcacaggcttccgcgggttcccaaaccgcgccagacgaccccgcaggctgggtgtcgccatagcgcaccaagctcccggcaggctttgcggttccgtgcgtgacctcgcgtgacccctacgggctggacgaatcggcgcggagctcggggaaggctcgttggcttgctggcagccacctctttcttttacttggccggggctgcggcgacgctgggttcgaacagcggcgggttcatacttgtcagcagattaggaggagactctgggttcgtacgccgactgaggcttctccttgatgggctccgggccccgaagtctgggggcagtacggggccggggacatgcaggaaagggccctggtaagtggacactgttctggtggtagccggcttggtctaggggcgattggcatagggcggggttgggggggggggtggcgaatcaaaatttgagactttaagatgttgggttgggaaagattcgtgttttactttaataaacctgaaagaactgtcgtttttcactgcctataggaccactacaaagccgcaaagaaaaattagacttgtttcattttataacaacaacaactgctactactgctactagttagataccgtttgctcatttataacaatctcagttggtaggatgaagcttaaacacttggcattcatcgtctttttcagtcctctcgccagtcttacagacttggaccttcagttgtgatgcttaatcagaattttttttgagatagggtctctcttggttgcccagactggagtgcaagtggcacgttcatagctcactgcagctttaaactcctgaactcaaacgatcctcccgcctctgcctcctgagtagctgagaacacaggtgcaagacaccacgcccagctaattattttttgtagagacggggttttgtcatgttgcccgggctggtctcgaactcctgggttcaagcgatcttcctgcctcgccctcccaaagtgctttacatgactgagcctccgcgcccagccagacttgtttctcaagtgacttcttctggccattttcacaactcattccaaagatgtgcagcatattctcaaagcatttccaaataagctccaagaaatgtttttggtaatggaagcagaaaacaagcctgtagctcatgactactttggaggaagaacatttggatttgtaaatttagtgtgttaaaaaaatcacttatcacagatgtttggaatcttcccactgatttctgcatggctgcttatttttcttcccttaagtctcagttcatgtcacagagggcttccctgacctctcacacctcaccaccatcaacctgttttctccatagcacctatcacagtctgaattgtcttattatggccttacctatccctaacacccatttaaaaatgtaagcatgaaagaaggaacgttgtctatcttgttcattgctgaatccccagtgcctagaatagtaccaataaatacttgttaaatgagcaaatgttttatttatttatttatttttggatttggggtcttgttctgtcacccaggttggagtgcagtggaatattagctcactgcagccttggcctcactccagtgatcctcctgcctcagctgctggagtagctgcgaccacaggctcacaccaccaaacccggctggcttggttttattttttgtagagatggggtctcagtatgttgcgcagactactcttgaactcctgggctcacgtgagcttccctccttggcctcccaaagtgcagggattacaggcatgagccaccacacccaacctgaaacttttttacaaatctccaactttattacacccacccccaaaaaaataatgaagcagaagacattgtttaacaagaagcagtttattacacaaaacgaaacctgagataatagaaaataacacttgcagtaataaaggaagcagccttgcactccacctccacactccagagtataattaaaagactcctatcagacatttctatcaccaataatgccaacctctgtatacagcagcaggctgggccccaaatcagaagattcatgtt

SEQ ID NO: 913512 - DNA, 4001 bp, Homo sapiens
tcactgaccggcttgtcacatccctctgcggggcatcccggagccacacttcattcccgagaactcggtacaattaacttaaccaacgtgaacaaggcgaaggcgcccagctgtcacagcggctccgcgcacgcaggcagacgaagaagggcccccgcccccaggagctggtcccagcctccagcctggcagcctccttcgaagacttccctacactgggcgcggacctccagccgccagcagccggcaacccagccccagccttcctcctctatacccgccgtcccagccgcgccggccggccccgggcgcagggcgggcgggaacgtgggcacccggacagcgacggggaggtcaagcagctgtgcccaggacccgggcggctccgaagcctcaacacgcacacactcgcgcgcacgccggcccatcggttgcctggaggagtcgggaaggtgcttccacggctcttcattcattttcccaaaggcaaggttcccttcgccccggcgcctctatcctgccatcccagggggccaattgcgccacagcccgccacccagccacccacagccaccgcgtcctatctcccggcacacacaacccaacagactcgcattacatctccaccgccagcgtcgcctccgcgccccggccgctgccatccggctccccagcttcgccgccccgcagccccggctccccgcctctggcctcaccgcgcggctcagagctgcctcgctcggctcgccgcaccaaggccggccagagacgccgccaccgccgggaagcgccggcaactcccgagtcacgccgcctcccgagacgcggcggggcgcagggaggggacagcagtgggggcggggcggggaggaggaaggaggagggggcggggagcaaaagttcacaccgctcggggctcagccgctcccctatctcttcccaggcccgcccccgccatcccccttccctgaaccgggtcccacgggcttaggcgcgggagagctctggcctccccgcccggaaccgccgcaaggctagagccagggttctggaagcgcatccgagctcgcaaccggggagagagtggcggatgcccacttacctgccccgggccgcgcctggaaacttccccaaagtgcgataggggtgtgggggcggagcgcaaggctggggggaatccccgtcccctaccgccaaacgacgcgcgctcacaccgtgaaagcactggtctgtccgtcggtcggtcccccgcctgcggctcccagagctgggcggtgcaggggcgccccgattccgactactgggctccttctcccggacagcccgccggtgcgttccacgcggcttgcgccccccgccggcctccggctatccacggcgccaccacgccactgctcggtcccctgtcccctcgctccggccgcgtcctctctgcgagggagggggcgtgtgtcgccgctgggtaacccttcccgcggggtcctcaagcgcgcagggcgcccggagcgcggccaggaccaatggcgaagggactcctcccgctggggatcgctgaagcctcggggaggccgggccaaggagcccggggcccaaacctgcctcggctcgtcgagctcgcaagttcattgtctgcctgggccgccgccgccaccgccaccgccaccaccgcgccgggagcgccgcggggagtgaggctgcgcgccgcctccgccggcccggactccctacgcccagccccggccgccgccggcgctgcctggcccgaacccgcggaggggcgccggagccccgagcccagggccagacctcctaccgccgctcctcgccgaccccacctcggcgtctggcacctaacttgtacctgagaagcctgagtccagcccgggagcctctgcggctccggctccgcgggagcgcgcccagccccgagcctctagccccgcatccagggcgcgtcaacctgactccccgagcgctgggaggaaaagtttgggagtgacgtgcagacggcgaatgaaacatccgaggagaaccctccccccgccccatgtcgcgctgacacacatcagctccagtctggaatgtgagatcaaggcgtgtgcgccgagcggtgggtttggcccctgccccctccccctccgagtcaacactgcttgtgtgttgcggtgattccaaataaaagcacatcgaaacccctgaaatctggcagtgacaccttgccagatacttcttttttttaaagacagagtttcgctcttgttgcccaggctggaatgcaatggcgcgatctcggctcactgcaacttccgcctcccgggttcaagagagtctcctgcctcagcctcccgggttcaagagagtctcctgcctcagcctcccgagtagccgggattacaggcatgcgccaccacgcaaaataggctaattttatatttttagtacagacggggtttctccatgttggtcaggctggtctcgaactcccgacctcagatgatccgtccgcccccccaacccaaagtgctgggattacaggcgtaagccaccgcgcccggccgccagagacatctttaaggaacttggcggtctggagccagcccgtacattaatattcaaggccacagcgctggtgagttcggcgccctctgttgtatttttgcatcccgggaaggctggcccggctctttggcccggcgtgttttgcttccgcgggggaggtaaagctctgcaggaccccgatcgccacggcctgccgcagtggcctggagtcggctgccccagggaaccacctggacagcccgagggcaagaaagcggcaccagtggccgactccactgactctgggctgaagatgccatcagttaaagaaaagacacatgaaattctggcagattcgctcagagggcgcttggagcaccaagcccagcctctcaggaaactgaggtccaagggacaaaaagaatctgcagtctcttgccggcctgtgtccccgtggccagagtccagcaccctcttcctcgaagcaaccagaagtggaaatgaaagtgctccgttaactgtagactacatgccaccgaagggtcattcctgacagtggcttctccccattatctctttattgccggaggcttcatctcgcccccctgaagctacagtccaccctgaggtcataaacttctgctcagcacccatggcaactaatgcagaggtcaccatcagaggattataactgcagatgggaaaccgggatgagaggggagttctttaaaatcctgtcttgttttcctgcaaataatgcctcttacataaaatctgcgaagaaagatgaatgcagcaaagagacttgccttagaatctcagactagattgctttttccatatagactccacttagtgatttttgttctttattttttttttaaacaaaaacctatttctgaaaatacaacgagctgctttttgcagggttcacaattcccaatagatgatgatgccatttttcaaggtctcacacacgttgtggctttggggcttatttattagctcccaagaaaagcctgcctttcagtgaggtttatatactcgagtaattgcatcaggggacacagagcaggttgctgttaaagagggttggttgtacatgcgtctgcaaggaaggccctgggccaggcagctgtcagaccagtgtgcaacgggtttaaacaaacacagggaagggtctgtggaaacagcaaggaggaaatccccttctgtaagggtgtgtggaacattattccagggccacacatactgccagggaataatgcctttcctctcctccctccaagtaaacacataactccgttatggagatggcgctgggcccacccagatcactttcaaattcaggtgtcagaaaccacggttgacatggagcaaaattgtttttaagtaaaaatcacggtgccgctttgatatgaattccaccagggactttccaaaggtatttatacacgtgcctg

SEQ ID NO: 913513 - DNA, 4001 bp, Homo sapiens
gcttggactaccacagtccagcactaatctacagcttcccctactgcagactcctggggcccagctagttaacttggaatttcttgtctgctgtttctcaagacgccaaataagtagaatccgcttcccacgttaccaacctttccccaaacacttcttcttgatgcaggaattaatcttctctcttccaggcatgtgaaaaatcaaatgtttctgatatctcacttttcctggccaggggcagcagcaaccagggatgacaaaggtgtggaaggaaactgcagccctcacagcagccacggtgaccgtgctgggtccctggccaggacagtggctcagacatggcgagctttgatcatccaagaaaagcaaggcacacatgtgaccactgtgggccgacctgcctgccacccccctggacaatatcctggatgaattacccctgcatgcttcacctacaagccagctcactgcaatcatccaaagcccagaggagagagccgcaaagacagggttggacttctgcagagggctcctgagctggctctcctccggagctggactttggagggaagcccagacctgcagctccacctccagctcacctatgtgcccacaggaaggccataacaagccactttacctcaccagctctgtgtgcccatctaggaggtggcaagaaagaaaatcttctgacagtttctcaggaacttgggggagaaaaacttgtttgcaaaaacctacctacttagaaggcatttttattcctatactactttgaataaaatcatatatgatctatgtatgtctttatgtatcaatcaagagatcctagttcaacattcagtttgtaaaattagtaagtgccatgttctggaagggagggttcctgattttgcaaggttgccggtcctgggaggagaagcaggaaagcgggggatggataatggtccaggaaggtccaaggagggtccaggagaaacgctgggcaaatctctaggcctcagtttacttcagggcccctcgggggtgcagatgccctccgaggcctttctgccccaacgctgggtggctaccctaacccaccgaggcatcccacaacactcaggaattgcagctgataaagaggggctgggggcactgctagggcgcccagaggcaaggttagcccctttgctcagcctcactgaccggcttgtcacatccctctgcggggcatcccggagccacacttcattcccgagaactcggtacaattaacttaaccaacgtgaacaaggcgaaggcgcccagctgtcacagcggctccgcgcacgcaggcagacgaagaagggcccccgcccccaggagctggtcccagcctccagcctggcagcctccttcgaagacttccctacactgggcgcggacctccagccgccagcagccggcaacccagccccagccttcctcctctatacccgccgtcccagccgcgccggccggccccgggcgcagggcgggcgggaacgtgggcacccggacagcgacggggaggtcaagcagctgtgcccaggacccgggcggctccgaagcctcaacacgcacacactcgcgcgcacgccggcccatcggttgcctggaggagtcgggaaggtgcttccacggctcttcattcattttcccaaaggcaaggttcccttcgccccggcgcctctatcctgccatcccagggggccaattgcgccacagcccgccacccagccacccacagccaccgcgtcctatctcccggcacacacaacccaacagactcgcattacatctccaccgccagcgtcgcctccgcgccccggccgctgccatccggctccccagcttcgccgccccgcagccccggctccccgcctctggcctcaccgcgcggctcagagctgcctcgctcggctcgccgcaccaaggccggccagagacgccgccaccgccgggaagcgccggcaactcccgagtcacgccgcctcccgagacgcggcggggcgcagggaggggacagcagtgggggcggggcggggaggaggaaggaggagggggcggggagcaaaagttcacaccgctcggggctcagccgctcccctatctcttcccaggcccgcccccgccatcccccttccctgaaccgggtcccacgggcttaggcgcgggagagctctggcctccccgcccggaaccgccgcaaggctagagccagggttctggaagcgcatccgagctcgcaaccggggagagagtggcggatgcccacttacctgccccgggccgcgcctggaaacttccccaaagtgcgataggggtgtgggggcggagcgcaaggctggggggaatccccgtcccctaccgccaaacgacgcgcgctcacaccgtgaaagcactggtctgtccgtcggtcggtcccccgcctgcggctcccagagctgggcggtgcaggggcgccccgattccgactactgggctccttctcccggacagcccgccggtgcgttccacgcggcttgcgccccccgccggcctccggctatccacggcgccaccacgccactgctcggtcccctgtcccctcgctccggccgcgtcctctctgcgagggagggggcgtgtgtcgccgctgggtaacccttcccgcggggtcctcaagcgcgcagggcgcccggagcgcggccaggaccaatggcgaagggactcctcccgctggggatcgctgaagcctcggggaggccgggccaaggagcccggggcccaaacctgcctcggctcgtcgagctcgcaagttcattgtctgcctgggccgccgccgccaccgccaccgccaccaccgcgccgggagcgccgcggggagtgaggctgcgcgccgcctccgccggcccggactccctacgcccagccccggccgccgccggcgctgcctggcccgaacccgcggaggggcgccggagccccgagcccagggccagacctcctaccgccgctcctcgccgaccccacctcggcgtctggcacctaacttgtacctgagaagcctgagtccagcccgggagcctctgcggctccggctccgcgggagcgcgcccagccccgagcctctagccccgcatccagggcgcgtcaacctgactccccgagcgctgggaggaaaagtttgggagtgacgtgcagacggcgaatgaaacatccgaggagaaccctccccccgccccatgtcgcgctgacacacatcagctccagtctggaatgtgagatcaaggcgtgtgcgccgagcggtgggtttggcccctgccccctccccctccgagtcaacactgcttgtgtgttgcggtgattccaaataaaagcacatcgaaacccctgaaatctggcagtgacaccttgccagatacttcttttttttaaagacagagtttcgctcttgttgcccaggctggaatgcaatggcgcgatctcggctcactgcaacttccgcctcccgggttcaagagagtctcctgcctcagcctcccgggttcaagagagtctcctgcctcagcctcccgagtagccgggattacaggcatgcgccaccacgcaaaataggctaattttatatttttagtacagacggggtttctccatgttggtcaggctggtctcgaactcccgacctcagatgatccgtccgcccccccaacccaaagtgctgggattacaggcgtaagccaccgcgcccggccgccagagacatctttaaggaacttggcggtctggagccagcccgtacattaatattcaaggccacagcgctggtgagttcggcgccctctgttgtatttttgcatcccgggaaggctggcccggctctttggcccggcgtgttttgcttccgcgggggaggtaaagctctgcaggaccccgatcgccacggcctgccgcagtggcctggagtcggctgccccagggaaccacctggacagcccgagggcaagaaagcggca

SEQ ID NO: 913514 - DNA, 4001 bp, Homo sapiens
cacaggagaacccacagcaatactcagtacagggactgtgaccactgctctacctgctgccaccacagagccaagccactgctgcagaacacagctcctagacccttcatgagacccatctccagccaggccatcaggagccaggaagaaaaacggctgcccccaaattctacatgttcccatgttcctcctacccccagcacatgcccagcagcacggcccatctctttctccacttacccacccctcttctccagcagccaggagatgggagggttgatggaaccaacccctctctctgctgcagatctaaagttattcttcaattgagaccccacagaatctgccaaacagcctgccatctaccaaaacccacatcaaccccatcttagccagatacagaaatgaagcttttcctgctgccctcttagaggggcagaggccaatgatgagctccagtctcccaaggccagcccacgggacacagtggaacacacagtgcctgggccactggcccaagcagatcaggcagggctcctaggagctactcaggcccccttctctgctggaaaatcaatttcaacccagcagaggcccactggccttgccgcacagtgagtccataatgaatgataattaccggtgtcattattcatcaagcaagtactgactgagtgcccactgtgccaggcactatgctaggcccaggacaatcccccgtacatcctggggcccagcaacaccacgcatcagaaaccaaacacaacttcaggtgcaaggaaaataatgaaggcgtcaggcctgccttggtttctccctaaccttttaggcttaaatccccccacctccccttaccccgtccacacccaggactggaatctgctcacccggttcccttggaagtccctggaggaagcacatccgctggggggaagggtccctgcttccctggaagactgtcacggccactacccttctgtctagcgcagcaacggcctgccagcctcttccacgctgctcacagaccctggcacgccggctctgagtttatgaatcactccctcctctctccgggcctcgcctccggaagggcttcgcacactcacacatcacccagacaccgagtttccacaccaaattcgctcctgcagaactccgagaaccgactgcaacatctgctccccttggtctcggggttctggccacaagttttcaaaacccaggcagcctctctcctgcccgctgcgctttgggggctccctctccttgggggctgcgggggcagcagacaaaggccgtggatgtgacggaggggtgtgaggacgtgcctgctgtagaggccaaatcccccgcgctcccaggaatgtgcatttcggtgtgtggcatgtgcctggccggtgtgggtgtgcgcagatcagcctgcgccgtgtgcggggtatgagtggcgatgagctgtgtgtacctggcaggtgtgatccggttgcagcgggttgtgggtgcctgcctgggcttttccccgagctgggaactccacctcccaccgtccgcttcgcccccttctccctccaaagtctggcgcgcgcgcctggacgcggaaggcgggggctcccggctgggcggcctcccccgggctgggcggcggttccaggacgccggcgccccacttaccccggccgccgagactccaccggcggccccgaccctccgcggctggggtccggcgcgggcagcatccgctcgcaacttcgctttcctcctggaagatcccggcagaagcggttccgcggccccggcgcccgcgcggcccgagctgtgcgtcttctccggggcgggccggagggatggaggcgctgcggggccggtcggcacgctggaagggaagcggcgccaggcgggcgccgtcctgcgcagcgagcctgcgagaggtcctgcctggcgccctccccgctcaggcccgagccggctagcggcggcggattcctgaaccgcgtccaaggcgtccgggagcccttctcctcctcctcctcctcttcctcaccccacccagctcccacccctgcgcgcccggcaacttgggaaccgttggcgaagttggcgctgctcgggccgcgagccggccgggcctctgggggaggaaggggaggagaaggaggagctggcgggagaggagaggaggggagagaggggagagaggggagccgcccccggggagccgctgtctccaggacccctctgcgggcctttgttccgggcgctgcccctcggccctccagtccccggggactcgcttggggccgctcgggtatccacgctctcctggcgaggctggtgggtggaggctgcttggagaacccccttggcttctccgtgccggagcgcccggggccgttacggccgccccctcccccgacctttgccagggagaccctctggctgcacgggttccccatcatctctgcccggagaggatcttcctgctcccccctggggcaagtgggctggaggacggtttccctggttccaaagaacagagcaccgtctccctgggcggcagcaggtcccacatccgccctcctgcactttcctgcgccgccagccagtccaaggctcccctaattcaagaactgggaaacgggagggacagagggtcttcccggcccgccagggctgcctggcattatcttcggaccctcccaggcagctgggtctccggccgggctgccaggcaagtggggtcccagtcgcctcccgtgcatggcgtggtcggctgggcagcaccggctgcggggtgcaaaggccagcttctcgagggatgaggtaaagggctcagaactggaacacaaaccgaacctccctgttcctttccgaatcctggtgatggccctgtccccgagaaggcgagaacgtcttggattccacttgctgggcattcctcctgggacttccagtacgtaacgtcatgagctaattcaggcctaagacagcactcctgacatttaatgggatagtatggggtttagacaataagttatttcctgtacaggagaagtaggaaaatccaaaaaagctaaaacctgattatctacacttggcctccctctgccattctcagcatttacagatggacagcaaatagagaaccagatagaactaatcctgaccctgttagggacaagttgccccaggaaccccccgccccacacacaatgcagctgacccttaccctgaatactccgaagctgcattcctggacccttatctaggtgctacagcaaggtcaccagacttgcttacagcccaacaggcagcatggggaaggtcacgagaaatgtggataaacttaagttacaccctcttctaaattcctatattgtaagcggtcacgagatgatatgtggtaaagttaaccgacaaccccagggtctctctcccccatatgaacccctcattttataagctccagggctgcctcctctgactgtggtggagcagcccggcaggataaacttactcgcctaactttgggtctctctcttgtcctttctctcagctaacgttacattttggtgccgaaacccaggaaggggacaggctctggctgcgtgtccttagaggtgtctctctctctctccctctcccccctcccctctctctctcctatcacccctcacccaagggccttgtccagaatagaggagacctgaaggacacctgactcggtggctgcctctattccagacaaggcctgcaggacaggggacaccctctctcgccatccttgtcatctgcagtctcttcttcctctaccccccaccctccattcactatgggagcctctcagtctacccatcccaagaccacccgccttggctgtctcctctgcaatctcaaggctctcagcctccattcagaggtccgttctaagagacttatcttttactgcaataccacttggcctcaataccaattggacaatggctcccaatggcctgaaaatggca

SEQ ID NO: 913515 - DNA, 4001 bp, Homo sapiens
agaattattaaatttactacttatcctgctatcacaggacttaatgccttagtccttcaccttccattctctttctccaagattttctcctatgccctatctagaaacctggttcacaaaacttcctcagttctaacagtttcagttgtcattctaattaccctaaatatgcctattttcccaaggtagactcctatctcccctttctcccaccccaaattacgagctttctcactacacccatgttcctttagataacaaattattacttttcctcttgaattaacttctctattcacaagccaagcccaggcattttagtaagatcttacctgttcatcttgtcccatatgttgttccactcaaatttatcctttacaaaaccattttcctagaacaacactttttatcttgacatttccttaaggccaattaatgaggagcattatgatcatagcagcaacaacaacaaagtagcagcaggtgctaacagttgagggctttcatgggtcaggtaccgtatttagctttacacacattactattttatttaactctcaaatccatgatgcatgtaattattatactatacttactttacaggcaacaaaacaaagcctatattacaggaattattagtccagggtctatttacctaaaatgtcctttaggaaggcacgaacctctcaaatggcaatgcatggttgtgtgaatgtgcatctgtgcatttttctggggaaagggttcacagcttttatcggtatatcaaaaaatacatgtcccaggcctggtgccgtggctcacgcctataatctctgcactttgggagcctgagacaggtggatcgcctgaggtcaggagttcgagaccagcctggccaacatggtgaaaccccgtctctactaaaaatacaaaaaaattagccaggcacggtggcgggcgcctgtaatcccagctactcaggaggctgtggcaggagaatcgcttgaactcgggaggaggaggctgcagtgagccgagatcgcgccctgcattccagcctgggcgacagagtgagactccgtctcaaaaacaaaaacaaacaaacaagacccaaatatgattttttaactgctactacaatggttaaacattctctattaaatcaaagtaaaattcttgagtctgatgttaactgtcctccacctactagagcgccccccatctccatctactaatatagcctttcgtttgaagccatgctctgcaccaactcaccctcatactgtcccgacctggaatacatccccaattccaaagcccatccatgcttccaaaggcttaactctggacccatcatgaagccttccttgtctactccagtccccactgatatcatatggcctccaagcgcgcgcgcgcgcgcgcacacacacacacacacacacacacacacacacggacgcacacattcccaaaggcagtccccttcagccctcttctcacacattcgtgctcctacatacacactgtgacgtgcatctgcctcacacaccctgacactccacattcacagagacacacacgcactgtcacactcactaaacacctggtcacagcctgacagtcatacccaagttccccgcaacagctctatctatgcccagtacctcaaatacaactttggacacacaggcatagtatctttctctctaatacacacacacaagcccactggcccccaaatactgcccaaggtcccaccaaccatctatcccacactgtcagccctgtgttccacagacgctcaaacccaccgccgctccaacccaccgccgctccctctcacgccccgcctcacccgatgctggtacagacagacgttcccgaagccgccggtgcccagccgctcccgcatctcccagggcccgcccgcgcccggccgcagccccgggggccgctccatggggcgggagggcaagcggcctcaggttccacagttgttccaaggccggttccgggccgccgatgctcgcgcgtctttgttctcgcgagaatgaatgcgtcacttccggtaaccgctgcgagaaggcccttccctaagttctcccagggcgctgccagagccctgccggctaagggatggggaaacaaacaggtactcggtccgctctttaagtcccctacgtattttccgggagggctgaacggaaccacaatgtttttctagtcttggaaaacataagatctctccaaaccccacattcccgtcaaatccacttttcaaagcagcccagtctctcctgtatttttttctttttaattaagatggggtctcgctccgttgcccaggctggagtgcaatggcacgatcacggctcactgcagcctcgacctcccggaattaagcgatcttctcacctcccgagtagctgggattgcaggcgcgcaccacctcgcttggctaattttttattttttgtagagacatggtcttgctacgttgcccaggctggtcccgaactcctggtctcaagtagtcctcccaccttggcatcccagagtgctgggattatagacatgagccaccgcgtccagcaattagtcttttctaaacttcatattgtctctactcctatctacacttcacctttcttcagatccctgccatctatcctccaactccaccaccagctgatccggcacgctaaagaccaccaatgatttaaaggctgcgaaatcgttaaaatactacgctagcaggcccactaatgaattagccttcttgttcactgacttcccaatacacctgctccaggatatcccctgtcatcccaaatgactcaagaatgtgacgctattccggagtgaagagtgtttctcgggatttcgcgagcttttttcctagatgcctcacagagcttgctgtccggcagtccagttatgggtttgccagcacagtagttcattgtgagaagtgtttctaatgggtgctacagggctgcagaggcaagctttgggaatgctgttggtgcagcaagtgcttccgggtggcggattgccatagcataggggaaacaactcctggtcttccatttaagagggtcataccttcactgtacctgggggatctcaatactccaagtaaaggaatcagcatggaatcaaattattgataaatgtgatgctgcaaccagaatgttgagcactgcatgatacagacgaagtcgatgttgtaggtcattagtaacatgtggtatgggaggttctggtttctgtaagtgcatggtttccatggacttggagatgatgatgcctctgaggacatgtcatttagagctgggcagaccgcacagagaattgtggtacagattgttgtaacagtatgaagccctctcatttgctgtatgtacagcatggccagtgctaatgtgctcaatttccgtaggtggggctgtaatctcgtaattcccagtcaaaagaggtaggaagggatgctgaggacccagggatactgatgattgggctgacccagaagtggccatctttgtggaaaccaggttggttcccttggttaactttttaaatgcccccattcccagggccatgagtaatttgagttgttttttgttgttgttgttgttattgtttgagatggagtttcactcttgtcacccaggctggagtgcaatggtgtgatctcagctcactgcaacctccacctccagggttcaagcaattctactgcctcagcctcccgagtagctggcattacaggcgcatgcaaccacgcccagctaattttttgcatttttagtagagacggggtttcaccgtgttggctaggctggtctcaaactcctgatctcaggtcatctgcctgcctcagcctcccaaagtgctgcaatcacaggcatgagccacctggcctgttttttaaaaagcctaagcctgttgaccccaggctccacaatcttcaattttccgagtctcagtttttttttcatgagtaaaatagaggt

SEQ ID NO: 913516 - DNA, 4001 bp, Homo sapiens
  modified_base (3160)..(3160): a, c, t, g, unknown or other
ccgccactgcactccagcctgggcgacagagcgagactccgcctcaaaaaaaaaaaaaatagtcatggcaacgtgtggtgtctcacatatgtaatctcagcactttgggaagccaggggaccaaggagaaaggatggcttgggcccagaagttcaaggttgcagtgagctatgatcacaacactgcactccagcttgggccactgagtgagactctgtctcaaaaaataatcactcctcctaacaaagttgaatacttccagttgaagccaataacctgcttcagtgatttcctattccttaggcaatggaaaatgattgggaaagttgcctttgaattcccctatggttagacttgaaaaacaaaacaaaacaaaaaaccttgtcttgtctaaaaaagaaatcctgcagaccagcctgcagatagcggtaagtcctaaggggttcacccgtttcacatttcaataatatgcaacctaaatagagtttagtgttcatgtacacaaaatgatcccgtattttaaacacacactgtggaatcttttggtccacctcaaacatgtgcagtcttcctgtaaaattaaaaatatcagcggcacaagtcacatgaacatctcatttcacaagtcttaatcccaagagaatatagttttttaaaaaacaaaaacaaaaatcacaccctattttaaatgcaccaagctgcctctattaaaaaaagtctcaagatgagtatcctttaatataatttttgcaaataataatctctatatcattagtaacttcgaaatgtcatggaatatcacccttagccaggtaaattttgtcaacagaagtggaactctccaatttttggaaactacctattaaaaaattagggctcaagttagtagggactttttattacctggcactacagatgttcaatatttactgaacgtatttttaattaacctctagacagtctctttgcctttactcaaaaccttgcgaagtggcgttttatagaggggcaaagatcacatatattgtgtgtctggtacacagtattatattaacaattataacatcaccaagaatggttataaagtgaaactccacattaaatgactgcttataaagtctcttaattttattataacgggactttctgcgaaatactgtttccaaacgctaggtactagcacaggggaaagaagactcagaaagctgaaggttcaacgaacgcagttttcaatcctttatcctggactactgccaccgagtgtcagatgccagaggaataataaaaaaccgggaaaactgaaaacctcggattgcgtttcatcccttaaaaaaaaatctgcaaaactaagatgtgattagtcacgcaatgcttcaggattgcaggaaatcgacgttgtggcccgacgctgactgaaacatgagaagggcaaacaggtttgctgttgttttctcccacctttccttcttttccaggctatgtgacttaaggacatgaaagcgtcttaggggtgaacaagaaaagctagcggcgcggtcattaggtgttagggtttggctagctggggtaaacgtggactctggtccggcatggccccaaaccatcaatccatccctgacctcgccccctttcgctgtccggcccggagcccgcagccgggccgagcgcttgcccttctgcatctcaaggttataggaccggcgggcgcgtagggcagtggtaaaacaacccagtcgaactgcgggcgcggcaaccgctgagcctcaccagcctcacccgctcccaggccccacttcacctcgtacgctggaactggaagtcagactcatggcgccgtcgcttgcaaggcgtgtgcactaggataccgagctcaaacgggttcgcgcggccggcgagagtaaaggtgccagcggcgtactaaagcaccgactccgcgatgctaccgcgcaggcgccgcggcgggtcgtaggcacgtgtgtgagctcgaccctggtaggtgctgagcatgcgtggagctgtcctggccataaggaagtctggactccggattttgacagctacgggaggtgggaggaggaaaagacttaggtagcaacagagtttgcgcaacgccgaggggcggggccctgaagccgaggggcggggccctgaagccgaggggcagggccctgggattagggaatccaggccagattttacgtctcttccaggtgtgtgggcttctgggggcagaaacaggtgttaataggacacttactttaatcagatacctaagatttgaccccagtttttcttgctcggggcttgtgacgatttaccttcaaggccaggtccagcttttatataacatgccagcggcggacatacaggaatcaatgactgagtcccattccagaacctcgcgtagctaccggtgtccatccctttctgcttttgatataattatctactcaggaccttggaacctgcactatcttaaaggtcgagtgggagagaaaaaacttgctcctttctttaaaaaacatgttcacttaaaaaaattagaagttttctctgtcttctacagtctgaaattcgtgtcggttccaattttattttatttttatgtgttttactttttggtaagagcggtttagagacagcaatccggggaggggggctgagattaactcgaagggtattttgaaggcgcatctctaataagctgcctgcttttacttctgttgttttcgtgcggggtgggagttggagggagttgagtgcagttaggggtggcctttagagccacccttggcaatgctagtgccttccaattcttgccggactgctccgcacacttagaagtccctggcttctctgagctgacgcgctgagaagcgtgttgaatgaatgaggccacagcagcacgcgtgacttcgaaatgcccgcggggtgggggtgagaagaaacaggggtgcgctcgccctatccctgtcgccgtcgccaggtcctggcagcacggcgcgcccgccccgctgacttggggggccggaatcccgttggacggcctctgggcatgctcagtagcggcggcagcggcggtgcgggcggcggtgacgcgcgcgcggcagctgaggggactggaggacggcgggagggggcgggggcgcaggaggtgggnccgccgtcgccgtcagggccccagggagcgcggggcgccgctgctgctgttcttcggctcggttctgtctaccgggcagcgccggggccggcggctgcggcggcagaggaacaggagccgggagccgcgttccgccgagagttgggcagaggagcgcccgcgccccggcggcgtcatgggccccctccccgcgcttcagagggcaccagccgcgggaacccccgggcctcctcgcgcccgagcctgagcgaccctcgggttctccggcgccccctccctcgccctattttttttcctactctcgctgccgttaccgcttctgctctccgttatggcaacagagccaccatcccccctccgggtcgaggcgccgggccccccagaaatgcggacctcaccggcgatcgagtccacccctgagggcaccccgcagccggcgggcggcagactccgcttcctcaacggctgcgtgcccctctcgcatcaggtggccgggcacatgtacgggaaggacaaagtgggtaagtgggggtggcataggtctcgccgctccccttccgcctgtgcgagccccctgtcagcggaggcagcctagcgctctcgggcctgcctggacgcccccctggtgtgcacgccaaatccctggcctcttccgctgtcccccgaagcctcgccactcgagcagaaggggctcggaaagtgggacaattcctagggtgtgggtcgtcaggcttgcagcacgggtggcagggagaggcgtgtctggtctcacccaccccccagggaggttgggtgttgattggagacggcgttgttagtgaaaataaggaacttcattttt

SEQ ID NO: 913517 - DNA, 4001 bp, Homo sapiens
tcattaattgggtggtggttcaccttcttcagcactaggaggttgggcagtgacttggggaaggtcagaatgtggctccccagtaacagagacttaaagtagagatccagcaaagggaaggcaaatattctgcctggctgtgctcccacctgggctgccgcacctacctggccctgggccccttcagggctctccttgacaagtgcctgctctggtcccctgacatcaccatgctcacctgcatgcacacagggctttagagccaggtcctgacacatcctggcctcctctgagtctccgtgcatagagatagttgatgctttctttgaagccatttatctcaaattggaaatcaactggttccaaacagacaccatatggaaaccaaaaaaaactgtaggttttgtctcttacttaaaatttgttaaatgtgtctgaggcttcagggcagtttttggttttgaaaatgctattcacataactgaaagcatgactgagtctctgaaagttgctgtaaagccaatgttccccatccttatgggaagctgaggttgacaccagaggagatgtccctgaaaggctatggcaatgctaggggagatgctgcttttgctaacatctaaatgacaaatgtataacttgggaacataaccaggttgctttggatttaagaaaatagtttcattaacaaagtcataaacacactagagctagaacttagagctagtgtctaggactcaaacttcttcatgcattacacaaggactaaacattacatgtgtataaggtagaaaatgatgcatatttataagtcaaaaggtaatgactgtatgatacccaataatgcctgtataatacttgcatacaacattgttcaaaacaaagtccacttaatgtgttacataatttacaaatgtttttaaatttagaaaacatgaaggtaggttatcaaacctcaaaagtcaaataagtagctaaatcaacttattattctcaatgaacttttaattttacttccatggagaggagggcattattatataagaaatcagaaaaaaaaatgtttaggaattcctatcaaatatacaattaataaattaatggaaatttaatataatttccaacgattagattttttggaggtaaattaaaatcagttaaagaaatgaacttgagaaatagagataataaattttccattttactctttcctgcatagatgccacttgtgaagttctagacagaggttgtggctccagctaaaaacccagtcaatacagttaaaacatgtgttcctactggctattcaatgccgtattgctgccacatatttttacttatttacttgtcagtcaacttggtaggtattatttaaatacagccactgctagaatgatatagactattgtattaatagacacaaggagaaccgaggaagctcaaataatgacatggcaaatttccaaaattatgagttaagcttgtaccttcagcctaacccaaaacttacaaagaaattatttttgaatggttatttggcccaaatatagaatgacataaaccttaattcaatctcactatattcattcaaattagtttatcatttacctgcaaactttttctttggttctgcaagtccgtgactcaattcttcactactctccccacgaaaaagtccgtaagtgatgaaaatgctcccatttgaagcagagtctctaacagcaattgtactggtgatccatgcttgtgtcccaagaatagagcaaattacaatgaaggacccaaggctggtgaaaaagcttgataagaacatcaatgtcttctttgtggtaggcattttcacaggaaaataagttctctaggacaaaaaaaggaatatcttcttataacacttttgaaccttatcttttgaagtctggtatttagaaatggagtctaacactttattgtcaaatataaaatctcactcttcctgaggaagggttatgctaatggacattgaactctgaacatggccataaaattaacagtagctgaactttggtctggagtaagaggctgctatggttacagccaaccagcatgaacaaggggtgggcatggtcttcccagggacttcctcaatcatgcaattaatttataatccttggccaagtgtcatggaagcaagtttagcctaccatatcatgacaggagtagaattcctaaataatagggcgtggaggatctgtattcccaaagcgttgctgagtctagcagacaacaacatgaaaccccaactcctccaagaattattggaaatatgtaaacatatacttcactattgtggatatttatgttgcttcaatttcacaattatgattgagaaagaacaacacccaaatatctttaggcataaacctttgttcatatctccacttgcttccttgcttaaacttctagaagtttgacgaagtctgtggatttttctgaagtttttgctatgcattgctcagtttctttactcattagtgatttgactcttataattgttccaagaggaatcctaaggagggtaaacctttgtcaaatgtactgtggagtggaaagagaaaagcttacacctccttatgttttatacctctctatttttagactttatcagagaggtttggctttcaaatttcctctttcaaattggatcatatttgcgtattatttaaattatatcttgagaagtttcatctttattactttttagtactctgatagagatggttctgaacattcttgtttttggtcgttatagctgtatccactctgttgaatggtaaatagtttataaatggtcatttctggactttcgaaaaactctcccatttggcgaaaagatcatttcttgagatgataaatagacattcatagcatgttttccataccgctttttactgtattctttgattatttagtaatataatattaagttggtgcaaatgtaattgcagtttttgccattaaaagttacatttacttttaatggcaaaaaaacgcaattacttcatcctctacttttcttcattaacacctaacttatttgtggaactagctgatcatctgtcttttccgttattgtaactagatgacatgctccgggaggtggacatgtttgttttgtgtaccactggattccagggaactctcaaagagcctggcccagagaagacactcagcaaacatttgttcaataaattattggagatacgtacacacatactctactactgtggacacttatgttgtttctatcttaaaattatgattaaggaagaacaatgcatgaacatccttatgcataaacctttgtccatatctctgattatttctttggttagacttctagaagtgagtcaaagtctgtgaatgttactgaagctgttgctacacattgcccagctgctcattagaaaaagataccagtcacccaccatgcccttaacacaatgaaggtgcacactttcctacatcctcaaaacatgtatattattgggaaaatttactattttttccatttaagtctatttattttgaccacacttttaaagggtgggacagaatttcagtagttagttccttctggccctattcctagtgtggaaaataattttgtatttattattgtattttgtattacataggcctattacaaaaatgtattcaaatggaactggcaagaataaagaagaaagtaaatataataaataatttatccaacaagaagtaattgtgttcacagttgggcaaagactttcatacctacagctttatgtcttagcttcctgctgctataactgaacacctgaggctgggtgatttataaagaacagaaatttatttcttatggctctaaaggctgaggagtccaaggtcaaggggctgcatctggtgagggccttcatgctagtgaggattctgagtcctgaggtggcacagggcgcgcatcatggtggccagatagcaagtgg

SEQ ID NO: 913518 - DNA, 4001 bp, Homo sapiens
ccaagaggtagagtcttccttgggtttttagtaccataggagagaaattgctttgggtacctagagcctcacgtggttaggaaaggataatacctttgaaggggataggagttgggggagaagatagactactgctcacccttcttaaactcctccagaaccgtgtccagtcgggtgtcattgaaaacacaatgcaggggccggttgtagaagcgggtgacagtgaggagcggggtgcagtcgtcggggtccacgaaggccaagtccttgacaaataaaatgtccacaatgttgtgccgctggtcaccctcgtacactgggatgcgagtgtagccgctgcgcaggatctcggagacagtggcgaagtcgagcaccgcgtctgagcgcagcatgaagcagtctcccaggggggtcagcacctcctccacaactttggtgcgcagctccagggcaccctgtatgatgttgagctcctccttcaccaggtcactgtaggggtctgcggcccgcaacgtctccagcaacttctcccgcgtgtagaaggtgcttatctcctggcgcagcgcccagtccagcaggcggcccagcgggtagcacacggggaaggcggctgccatcagaagccgggtcaggcacacgctgtgcgaggcgatggccagcccgtgccgcgaacacactgagtaggggcagatttcggcgcccaggaataccgcgccggtgcacacgagcgccggcagccacgggaagtggatcccctcttcgctgtagtcttccccggtgcccccgaagcccggcggcagcgaggtgtacagccagccagccagggccgcgttggctccggcttggcccaggagtagggtgcagagcagatgggtccccctgccgcgaacggcctgcacgcggcgcgcctgctcctgctcggcggccgagccgctgttccgcagcacccgtaactccaccgggtccagcgacagcaggctcaggcgcaggccgctgaacagggccgacaaggctagcagcaggagcgccccgagcgcccgcagccacgcagggggcagcaggtccccgcctgggccgtacaaccgcgggcgaacgcgcagcaggaagccgccggcggcgccgtggtggtgccacgcgcgcccatcccaggcgcagagtgaaaagagcttcccgccaccgcccgcgccgccccgctccgcttcgcccttgcgcagctcccgcactcgcacctggaccagggccgagcctgccacgcccccgggacgcaagggccccaggacttccacgtccgatgcccagtcgctctgctccctgcagcgctgcggtcccggggggcgagtggggaccgcgctgggggccacgccgccaccgcccgggggctcctcgatgaacacgagccgcggagcccagtcgccggtgccattctcccccgagttgagggtcggtgagggcaccggtgcggcggtggccggcggtcctggctggaaatagacacgcaggaggaagctggtgccttcggcggcgcgcagggtgcccccctccagggacacgcggcctccagcagtgtcctcgggccgcaggcccagcagccaggcggcggcggccgggggccgaggagacagggaaaagaagagcaggagcacagcgcctcggctgcagcagtcccggagcctgacacccaccgctgctgccgccgccgcggccgccgccatcctgcacccagcgcagctgcacgtgatactgcaggaagccgagcgagagctggagggaggaggagccggagctgggaacccagccgcaggcaggtcaccacgtgtacgcccactgcgcgcgtgggctggtggcggtgggcattcagactccacctgggcaggaggtccccgctggaggctggaggtggccaggcatcaccgcactgtgcgtagcgggtacacacttcggtatatctgagatgcagcctgaaaagtctgggtttgcagcatggcctcctactccaaaagtaaggtgctcctctgcgaactcctacccggcagtaattccctgccggctccactgcttccccattggcccgggaaatttcccagcttttcgcttctcctgccacttgcattcccccttctggtcaaaagaatattctggagtcaagtcttgaatatgtgaaaacttttagcctcaactccagccgacctttcattattgtaaacatttctggattatttaagttcaattcttagttaagatccgaatgtccatcaataagaaactgttgaaataagtgaaaccactgtgcaatggaatactatgcggcaataaaaaataatgcggtggatctgttgtatatgtgatacggaaaaaaatctccaaagtaattgtagaaacaaagtaaggtgcagaacagcaagtataatatgctaccatttgtgttaaaagtatttatgtataaatttgtacacacacacacacttatatgagatttatttatttatttatttattttgagatggagtcttgctctgtcgcccagggtggagtgcagtggcacaattttggctcactgcaacctccacctcccgggttcaagcgattctcctacctcagcctcctgagtagctgggattacaggcgtgcgccaccgcgcccagctaatttttatatttttagtagagatggggtctcaccatgttggccaagctggtctcgaatccctgacttcaaatgatccatctgcctcggcctcccagggtgctgggattacaggcgtgagccaccgcgacccgccgtttacatcttttaattaatttatttattttgagacggagtttcgctcttgtcacccaggctgacgtgcaatggcgcgatctcggctgactgcaacctccgctttccaggttcaagcgattctcctacctcagcctcctgagtagctgggattacaggcgcccgccatcacgcccggctaattttttttttttttttttttggtagagacggggtttcaccacgttggccaggctggtctcgaactcctgacctcaggtgatccgcctgcctcggcctcgcaaagtgctgggattacaggcatgagccaccgtgcctggcgggttacatcttaattatagtacaatatcaaaagcaggaagttgatattggtgtaatgtgtgtatatagttctctatcattttatcacatgtatggatgtatgtgaccatcactgcactcaaaatacagatctattatcaccaagatctgggagggagactttcttattaaattccttatattgtttgaatttactcgactatattatttttatgcatttatttttaaactttatatagtaaaattcactttttggtgtactgttctatgaatgttgacaaatgcatatacatgtaaacatcacaataaaaagtaattccatcaccaccaccccccaaattctcttaccgtcctattgtatgtagtcaacccctcccttcgtcttatcctctgggaactactgatctgttctcccctatagttttcttttccggattatcatataaatggagaatacagtctgtagccttttgggttctcccttcctttactaagttagcataatgcatttacgattcatctatgttgttgtgattttcagtagttcatccttttgtatggctgagtagcattccattatatggatgtgtcactgtttgtttatccattcaataaaggatatttaagttatttccagtttttagcaattattaataaagtggctatgaacatttgtgtgatggtttttgtgagaacataaatttttatttctcttgggtaaatttatcataagtctgtattacattttaaaatatagtaatcctaactacttggtaggctgaagtgggaggatctcttgaggccaggagttagagaccagccggaacaatgtagggaggccctgtctctaaaaaattaaaaattaaaaaaaattagccaggcatggcgacacatgcctgtag

SEQ ID NO: 913519 - DNA, 4001 bp, Homo sapiens
agtgatggcagtcttgtgctttaaaataacctagtagcacttactagttcaatccatccccaaatccacgccaccctttcaactttgcaattaagagggagaaggagaaatcccggtcaactcgccttggggggttggtctgagggtagaggactcaagtagggaggaggatggagagagaaagagcaagccaatgaaagagaccaaaatttcccacctttcttaaattcttccagcatagcgtccaacttggtgtcattgaaaacaaagtgcaaggggtggttataaaatttggtgatggttttcaggggggtacagtcatcgggatccacgaaggccaagtctttgacaaacagcaggtccacgatattggagcgctccccttcaaacactggaatgcgggtgtagccgctctccatgatctcagacatggtgttgaagtccaggatggcttcgccggtgatcatgaagcagtcccggagtggggtcatcacgtcctccaccgtcttggtgcggagctccagcgccccttggatgatgttcagctcctccttaacgaggtcgttgtagggatcggtgacccggagcatctccagcagtttttcccggttatagacggtgcctatctcctggcccaggacgcagtccagcagcttgctgaccgggtaggaagcggggaaggtcatcatcatgaaaaacttggtgaggaagatggtgttggcccccacagccaggccatgccgggagcagatggcctggggcacgatctctccgaagatgacgataccgatggtggagactaccacggccacgaggcccgagccggcgatgtcgtcgagcaggatggtgagcgtggtgttgaccagcacgttgcccagcagcagtgagcacagcaggtagttgccctgcctgcgcaccggctcgatgcgcttggcgtaattcttctccttctccgtgccgcagttctgcacgatgcgcagctccatcgggtccagggccatgagccccaggttgaggccgctgaacatgcccgacaggcacagcagcagcgaaatgaagatcacctgcagccagaagggcagcaggaacttcttctcttcgcctacgatcatcttggtgtcctcgccgtcgtggtaaatccaggtggtctcggcccacgggggcggcgggagcccggccacccccgagccacccttgcccccgacggcgccacccgtggaccccgagccgccggcgcccagggcgggcgtggagagcgacgtgcacaggtaataggacttgctcttctccatcttgcgtagcggtttgatctcgatctcgatgatgcccgaggtgcggcggttgagaatgatgtggggcaagatgatgatgtctgaggtgcggatgccgcatcgctgggggccgctgtccggctctggcggcgcggggccccccagcccgcgctcccccgggctgtggcgccgccgctcgtgctcggtgaaggcgatgcgggaccacgtctcgttattgatgttctgcccgtacacccgcagcttgacccgggtccgttcgctcacccgcagcgcccccccttccatgaacgacacgtcgttcgtgtcctccagtcgcagcccgatgatcaccgtctcctcattctcgcccaccgctgcgcagccgcccgcaccgcagcagcagctcagcaggagcagcggcagcagccgccccgcagccgcctgcaggatcccccggccgcgagcgctgaggctgcggcgcgccgccatcttccaagtgggcagtgcggcggctgcctgcccgcccgccatctttactttgggttcacaagcgccacagccaatcatagggtggctgctccagctgcggcttcatcctttcaacccggcggcgcgagcgcaggtaccggcccctgggcgagactgcaacggagcgtccgcggccagtgctcagcagttcgcctccctgactgacactgactccacctcagccagctgaggaaccccgaggctcgcgggagggaaagagggagggagaggagcgccggctgctcccgcgagaggcaggccgaccagccaatcacaagcgggtgcccgccctcccagccagggggctggaatgggggcgtgaccgtgtgccgctccgcggaccaatggcaaggtaagtgggtggggcgacgagagccaccgtccccgtctgcacgccaagtttccaactgaaaggcgcgtgactcttgtgtatgtgcgaggggagggggcgtggccatctgggactcgagagccagtcaaagatgagagctgaagaaaaaggggcgtggcatccgtcctgctgccaatgggaaggagccgtccctggggcccgcgctccccaggggcccctgtagtagatcccggagcctggaccggccaggtttggactaaagccctgcggcgcaaggcggcaggttcccggtgcaccggttactggctctccagttctcaattcgtaggcacaaagccgcgcgccctcctgccccggaagcccgagaagccaactagaggcggcttgggatgcacacagcctaaaaagccggggcaccggccgctgtccccaactccacctgcgcggcgctccgccggggtaagcggcgtcggtggccccggcacagctgcggaccagcagtcctcgcgcctcgagactcctagggtacgggctctctgcggctcgcgatcacgtggcgccacctgcgggcagcatgagcgccctgcaacgctttccaggtcggcggcgtaccccaaaaggtgtgcagaagttacggatggagcggtcagggggacagttccccaaatttcctagtcatagaacccctacatattattgctaggagtatatacttcctagaccttttcccatatttacagagtgggaagggccccgaatctgtattcccagcaggaattcaggcaagttaaggaaatgggagggggcaagcatcctaaacagacccacagaggctcattcttaatcacactgaccaaactctgctagggtcttaggtcactcaagagcaaaaagttctggaaacctagctccccagtactcccaacgtcacctggaggtgacgaggtagcagagtagctgccaaattggtcttttccttgaaacttaaaacattcaggccgggcgttggtggctcacgcttgtaatcccagtactttgggaggccgaggcgggcggagcatgaggtcaggagatcgtagaccacggtgaaaccccgtctctactaaaaatacaaaaaattaaccgggcatggtggcgggcgcctgtagtcccagctactcggagaggctgaggcaggagaatggcgtgaacccgggaggcggagcttgcagtgagccgagatcgcgccactgcactccagcctgggtgacacagggagactccgtatcaaaaaaaaaaaaagaaaaaaaagaaacttaaaacattcaaaatgtttaatgtttctctacctcttttgtattctacaagcacatcccgcgcccccctaccaccgcttttgtaaatgcatcaaacgtctctgattaatttctggtatgagtaatttctggaatgattgcagtggcctcctaactgatctttcctcttcgatacctgttcctttcccttctcaacccagcagcaagtgatcttgtccatgagattctgttgctcccttggctgaaacgcctccattggcttcccatctcatcctagagaaagccaaaggacctacaacatcctactaggctcgaaggtctgctacctcccgttacttctcggacctcattacctgctgctctcctagtggaaggagactgataataagccaaattaatttctctccaaactgtttctccatcactccagggattttcccttgcgagcctttgcacttactgtttgtttcctgggcttgggactttcttcccccagatgtcagcatagccttgttgttcacctcctttagtgctttgctcaaaagccatctgatt

SEQ ID NO: 913520 - DNA, 4001 bp, Homo sapiens
ttgccaaaatgctcacagcaccccacccaccacagttagagctgtgctccagtgtttgctacatcagcactgtttcgcatgttcagaggggttggagcgtttgtcccaagcttccaagtagcagagtggggataaaaacccagggttgctggcctctaccaccgtgatctttactgctgcacactccctccagctaagtaagatatcctctcccatttcttccccatggaaaccttccatggccaggaccttccatggccaggacctgctccaggacctcttcccagactgctgcggcccccacctgcctgtcctcctctctatctgggccctgaatcccctgtgctgtccagattcccacagatcatcaagcctcaccctgtcaaggcccagcctttcctctggtggcacaaagaggctgcatgtccctccttcctggggaggggacagccttttcctgtattccgaagattgccatagctacctgacacgctagtagtgtttaatctacttggatcaaaaaaatttggagaatggaagaaagcatcctttctccagaaaaataagaaacctggtttaggaaaaagaaggtgtggactaatttgtggccaaggacagcagagccaggcgacccacacttggaccctagcggcctgggccagtgagcagagaccagggcaccaccccctgcaagaactgtcccctctccccgcaccccccgggtccttaaggggtggagggggagggccatgggggctcagtaagcctcggcctgggcctctgggcgcgcttgccgctgcgcgggcgcggggcggctgtcacaccaccctggccgggtcccgaaagggaggagtggagcttgcccgcctccgcgagcctccgcgcgcccagccttcctccacctgcccggcgtgcccagggcgctcccagcgctggaagccgggggcgcttgcccgaggcgggagtcgctgggtcatgctcttgcccaccaggtcctccgaatccctggtagggcagcgtctgtccgtgtccccgacccctcccgcaggcaactcgcgcgaacctggggctcgcagagagcgagcgcccgcggacaccggctgaacagtctggaggctgcgcgagggggcgccgcggggagggataaaagccagcaacaaagagcacagacctcgtccagcagttgattgactcgtcccaaaatagccgtctccatttgctgctccccgcgctccgcttccaggcgcagcacccgggcctgcagctcggccgtccgaaagtgggcgagcaggctgagtgccagcgagcagagggccagcgtcagcagcccgcacgaccctggactcggcagccgtgcgccgcgctccgcccgcgccgccaccagagccaccgtcccgggcgcgcccaactccccagggccgcgggcaccggtggctgccgctttgtgggtgcgctccgctaccatcctctcgcgtcttgagaaccaataaataaataaatagaataaataaaggcgacagccgctgccaaaaggctctatccaaactgcggggcagggggaaagggcttgtatcgctggaaaacgtccctttccgctgctcccggcaaagaggacggaaaaattagcagtaggagaggaagtgccgaaaaagcacaaccagcggtaattggggtacacctaggtgagaaaaaagttatttcgaagaacgttccaagtccaggaaagttaggggaatctgaccggctctccttctctccgcccagtctttcccttcaagtgtctgcagagcagttggtgccgcgctgtcagtccttctgggcgcctcgtgtctcccgggccagtcagtttcagtccccgggcgaaggggcgcacacggagggccccatgggcagaggtgggtcgtggcggctggcgaggagcgcaggggccgattccggcgcctctgtaacttgacacactccctgcggcggcacggatcggatgagcaatccgtgctacttcccaaactaatctctccctcccccctccctcctcctcctcctcctcgtcactcctcctccacctcccgcggggccgacggcttggatttgtttatttatgcaaactcgcccagggtggggggcgtggtgagcaggtccggcggccccagcccgccggcccgggagcccctctgccgcgctccccgtcctctttgaagtgacacttggggttatttataggcaggaagggggtgtggagtggagctggcgctgcacttccctctctttctccggattcacaccgagggctcgtttggccttccacggaggcggtgaggcgggcaccaccttccatggacgcgttggggcaggcaccactccacctttcccagcccttgagaccctccaggaactcgactgagttattgtcagggcttgtgggtggatctccacgtcctgatcaggactacctgatcccttcagccaccgctcctctactcccaagcccccaacctctttccccttccttctcccccgacaaccgactccccgggggctctgtacctcctgagatctgcagctcctccagtgccgggcggccaaccacatctttactctggggtgaaaagtcagccctccagggggcagcagagctggcagcccttcctctcaggaccaagacctgaggtagtatgagacactgaaaacggaggagatcttattccaggtatctgagaggtggctcattggggccgcctgccagtcctgacatctccccttcttgcctgccattaatctgagacccatgccatctatccctgtgtggtgagaccagcctgcctcaatcatcccagtcatcaaaggtgagcaattcctacacaaactcaggttccatccctgcgggaggcttagggctaaccaggctctctcctgttgtcatttcctatattccactagagaaaaactggtggcctgaagggcatttggtagttttctctcttctcttgtcacctcctccaccccccacattaagtagcatttgtatcccaagagactttatctccttgtgcctgttgacattcctgtgaatgaggtggtgggactgagtttttgggagaaagcctgtcttcctggaacagcgggcagaggagagtagactgggttttcaaatatgcagtggaggtgggggcagcagtggtgctgggattccatttcaaaataacaaggcatgccagtacaaacttcccattttctatattgacctgatggaacttgatatataatacagtgtcactgcacttctaataaagtgtggcacacttaatagtgcatattggacttgtaacatagtaagtactgagatcatatgtaataaaggtaacattgactgctgggccagtcagccactatggaggacaacaggaatagaaggcgatgctgctgaaagagcccgtggccaggagctctgggttccagttccagttctaggattctcctgatggcttcagtggcaagggcactctgttttctccatccctgtgatgggatgtcccagtccactctacagaggaatgaatccttgggagacttggatggtattgaagaacaccagggggcgttggagagtttctgcactgggaggtacaggccaggaaattcagggactttggacttcccccactcccctcccaggctagtctgaatggaggaactgaggtggggagttagtttcattccctccttattctgcaaactgatcttttccctttcaggactttggaggccctcaggaatgctcaggcagtgaaatctaaacagtttggagctggagcatccttgtgattgggaactgaaagaggagggtgttgcgctagcctgacctggccccagcattgcaaaccctggagcttccagggggactctggagtcagagaaacctgggtgtaaatctcccttttgtcaatgtggaagctgctgaacatctcggaggctcagttttctcatttgtaagatgggctgat

SEQ ID NO: 913521 - DNA, 4001 bp, Homo sapiens
tttatagcttctattactccattctctatacactttaaattttaaaacaaaacaacaacaaaattgccaaagtattagaaaaccatccactggctattgacctgataacacagaagggcccagcagtttgatgccaggaaagccaatgccctggaattgaatatcttggaggctttgtctctgtaacaccccagagatgggtttgctgcttgctacatttggtatcctggattttcatgactgggagcaggtgggatagggcaccagctttgtgattatgctggtttgtttacagttgtgtcctgccactgttaataatggcaaatgaaacaaacaatgtaaacacagacttctttttgtttttcataatctgagaaggtggttagttcttaggtcaggtcagtttcaccaatctaaggagtttttttcctatttttttttttttttgagacggagtcttgctgtgttgcccaggtgggagtgcagtggcacaaccttggcccactgcaacctctgcctcctgggttcaagcaattctcctgcctcagcctcacaagtagctggggttacaggcatgcaccgccacacccagctaatttttgtatttttgtatttttagtagagatggggttagtataatatgagtgtgcaccactacgcacaccactatgcttggctaattttgtattttttgtagagtcagggttttgccatgttacccaggctggtaagtttctatgcaagcttgaagcagagctgttcactttaattgttcctgtgtaaactctgatcagactcatgtgggtgttttgcagggcctaagagtaaagcaggacacctctgaatctctggagtgagtctgtgtggggatagacatctgtcttaggttagttctgacagatctgtgccttagctctaagagagaacatatggaggtaagaagaaactattctgcttttcaaataaataccttttaaaaatcttgctacgttttacaagtccactattagactactgattaactacttctcaaaagaaggaatgtgccagaggttttgcctccacttcaaaaagtaaagtgataatttgtcagttaccagttaacgtcatccacttaggtatctaaactggtaattctcatctcaaagtgaatttttttggcaggaggaaacccaagttgactcgtaagagtatatatacgggaaacaattttcttcctttttttattcctctaagtttgatcctgcaaaatttctgaattaatcagatcatttcaaagatcctacttttctttagattagaggtaattttacagcatggtaaacagcaatgtttaccatgtatggcttaatcagagaggcccagtcagcacagggactgtttctagaaggcccccttacctatactttaacttcacccctgagttgttctcttcgtccagtggagagagagacagagggaagaggagagcaagatagcgagagaggaaactgagattgggagagaaggaattataagcccgtatcatattctaaataaaacaacacaagtcattttacaatgctgaaaacaatgcagaaaggtcttgcctctaaagcccgctatattttaaccagccttcagccttctccttttccccacttatttcctttgaaagacctaccctaagcagaatgcatacaccaaagtcatcttttataaccaattgatcactttaaccagaatgctagaaactacagaacttcatcttcttttctccaataaacatttaatttctaaatggcaaaccttaaatcaaagtctcagagaaaaggagaaaggtcagtcttcctgtttacttacctggtttgaggttttgaaggaattggaaacaactttgaataaatccccctctctctttcttctcctgatgttttcttctagaaatttgcagtgctcactttttttttatccagacccagccaaggtgtgttaaagctgagtgatctttcaaaaatgttcacttttctttctctccaccttgtttctttcaactctttgcttccaaacatgtcctgacaaaggtgtgtcatggtttacagcgttactccacccttccaattatctgacacttgctggatttaaaaaaaaaatctgcctccaggaatcaaactttactggaggcagaaagcttctccttccagcttaggtagattaactatttataaggcccatggggaaaaggaaacaaaggaccagcataaaggaaatgcttttttattgcctaccttctacagctggagaactgccacaactttgtggcagtacccttcctcagtgccatgggtactggaatcccactgcatgattcatgagtctaggcacgtggatgggctcatggatgagcatggtctaggcacatggatggcctgtggtcatactgcctgagccctagaaaaactgaagttggcaggatttatattcaagatctgtttcccctatagatgtcttcgtcctctgttcctgtgtcctgtgtcctttgtcttgtttcccctatagatgtctttgtcctctttcccctcttgtgactcaagccaggtcaagcccatctggagaaaatagttggtgaactaattcataatatgctaatgactgaatgtactgagcaattggtggggtaggggttcgttttacaaaagaggcaaccagatatagtgatgctgacctaaaagagtgacatgttagtgatggaattttaggcatttagccacctaataatggagagaggtgctgttgggaagggataaggaccttcttgtccttcaaatcaggtgaccgcatagtctccatacacctaaagacatgtgtgggctcccagatgtcctgcaactccaagtacatcctggggacctttagatttccctagagggtcaacttgcatcaatcaggataattcttatgaatacctggatagcatctggcttcccagggggcctaaagactagcttgagacacttggtgttggtaaaatgggaagtctgaacctggaactcactcaggcagtcctttgaggccatagcacattcctgggacccagcatcacactgggattcccagttctgaggcattatcctaagatactggaggggagcagtggggcccttacagcatagcaccgatgtgcaactgcaccttgctattgtgggcactgcatcccatggaagggtagcagaccacaacaacagctgtggggctcttgctcctaagctgcccatattccacactggagtcgtgcatttcagaaccctttcaattatgcagaatttgacacttgctttgtaggatgttcttgccttccccaaataaatactcaatatgtcttccgtcagtttcatagtagaagaacactgaagaacccagaacacacagagctttcagcataaaatagacatgcccctgcatcatttatttctttattcatgaattcaagaattaaacaaaaatatattggctcctgcttggagccagacattaaactatgtgctaagagtttggtggtgaaatatgaacatagtccctctgcttatggagttcacagtctaatggaggaagacaggccttacataatgtattagtcggtgagggttcccataacaaaatacgacggactgggtggcttaaacaacacaaatttattttttcacagttctgtgggccagaagttcaagatcaatgtgtcaggaggtttgatttctcctgagacccccctctccttggcttgcagatggccgccttcttgcagtatcctcacatggcctttctctgtgcatgcacatccctgatgtctctctctgtgtgtcctcatctcctcttcttaaaggacacagtcagattgaattagagtccaccctgatgggctccttttttacttaaatttaactacttctttaaagaccctatcttcaaataaattcactgaggtactaatggctagggcttcacatatgaattttggagggaca

SEQ ID NO: 913522 - DNA, 4001 bp, Homo sapiens
cttgtttcacaccaacactctccattcatacctgcaagtgaaaagtgcctcagcttgacaccttatacagtacctaccttcccagtaggatttctagggaattcttattattctggagagaaaaaagaaagcaagaaagaaagaaaaaaaaacatctttacaaacaaagtaaaagaaaaatagtactgttaattaaaaattttaaagtaagtaacctgatattccgtgcaaaacagttctattcgctctctgtcaaatttacagtcttctagataagtgctagaagaaagaaaaaaaaagccaaagttctgtctccatttttaaaactgaaattgaaatcattaaggtagtatttgaaaataaatggatatttaaataaatcctgtaccttagagttgacttgtcagctcggtgctttcctgcctctagtatgtaagttgcagctgctgcatgacaatgttttaaaaccactgggtcgatatgtttcaagtctggatgatctaaaataaattaacttccagtgatgcctatgataataaattctttacagtcatgttccaaaaaggatattttaatttgggtttaaaaaccctttaacaagattaaaaacatcaactataaggacagtcaattataagtaaatgagatgagcaacaagatcaagtgaaaaacaataaaaagaacacaacaagaactctactattactagcttcaattaacttattttgccttaatatttttactattaaaaaatattatagcccccaaagaaaatataacaatgcaatggtcattctaacactggagtaaattcaaaggaaaaacaagataaatattttacattgtgtcaattttagaataaacttccatcctaaaaatgatgagtttagggtaaccggctccatgaacaaatacatcaagggggtagaaggtagggcatgagttcagaatataagatacaaatttcaaaattatattagtactttcagggtttgacagtcattttttttttgagattaacccaggtggtggttactattttcgtttaagaacttccactttcatactttttgtacaagtgtttagttcatgaaactacagaaaaaaaacaaaaatttgaattgttgggatatttatatttaagaaaatcatctaaaagcgatcggtcttaaaatatgtcttcaatccatactgacactgcacctccgcagtcactgaccggatcgcttaaaagacactcgcatcctggtaactggggcggaacaaagtattgtgcatcatagtttaaggttctaggcgtagaacctgtgtaaacatgctgaactagagcgctggagtgatcatagcaacttgaggtatgctctaagttggcaaatgtcaacactgtctgacctagtaattacttcggaaacagacccttaaacctttgctagcctagccctggaagcttgaattgcagggagctccccagatgaagtccaactgtcaaaacagccgcagcctcagacaaggctaaacaccttagatgtttaggccacaaacaagacttgaacaccggctttacaaaagaacaaagagactgggagggaaaccgggccaggaacgtggagttggctctatgcaggtgccaagtggggccaaaacaatgctcagagtctgctccgagtcctggcagagccacgtccccaacactccgtccggagcgaagggcaaagcccggagacttcctcttcccggggctttccccttctcgctccgccggctcctcttctccgagcgcccctccaccccggcggatccagctccgagccgagccgagcggcttacctaacacggcctcgtccgcctgggcgtccagcagactctggaatgccgcccggaggagaagcgtgaaggcgttggagtcgaaggagcggggatccgccagcatctggaagcctttctgcacagactccgagagctccattgtgagcgcgccgtgaccttcgacacgcacaccacgtgacacgcgccgcgcgctcagctgatgcggccgcgcgcgcacgcggctcggggcggctggcggcggcgcgggctgcggggcctccccgcccgcctccgcgcccgcgcgcgggtcccgcgcccccagccgccgcctacggcctcccaccgtttccgtccagctctcgcttgtccagcgcaggccgcgggagctgccgagccttggcgagaagggcggcctcgggcgttttgtggacgcgctcggcgctttctccttggttcggcgcttacctcggacggccaccagctcggttccctgagagaccccggggagactgcggacggtgtcgggatcccggcccccgcctcccgcaaacggcgtcctccccgctcctcgctctgcgcgaatcctgcgggaagctccgatctcaggcaactggattttgcttttgtggttttttgtttgttttgtttgttttttagctcaccagcttaacctcgcagcactgcccttttatgagactgtaagacatctaattatgtgattcttgcttatttttacttttttttttttgtcatttctggaatacggcagtagtgtccttcctgcatggggggtgtgtacacatgcacgcatacatagagttcctgtatgcactgcactccagcaatcggattaataaattattcatgaacagatttgacaggattattaacaattttatatgccgctgcaaataaagccaactgccatacacattttgtgctactcaccacatctatgggtcccgttttagttgctctatagaatctgcataaatacgtttttattaaacagctaccttagtaaagtacagttaggaatggcaagatctttattagaagtgagttactgtttaggatgctcatacctttaaagattcaaatactgtataaagtttaacttcctctctatttctacgaagttggtttagagaacaagaatgattctttaaaaaacccgtgaagcaaagtagattaggtatttttaatcaaaagcacttgaaaagttaaaaaatgcaagttcttgaagggtggagggaagggatgcggaacaacaaagatgttttagtcttcaggagcgattatttgcaacattagacccaaagtgaaacattattttctttttctaacttagatgtctgttttaaaaatttttgatggatacagttgacatttaccttggcaccaatacataaagtgtacctcatttcacaacaggatgcaaatggagtaagcatcagtaacagattgagtaactactcagccctcctttgaaagctttaaaaggcacgtgcagtggctcctcactcggtgagaatatagtagcagtgaaggatttaaaagtctccctagagtctttatgaaacaagcacctattaatcatgttcatcttttcttcccatcactcatcttcctaatttgtttctcattagtagtaaaatgtcagttgaaaaacttcatgatacctgattacatagagaatagtcaggacagagttgtgtaaatgttcaacaatattaacaacacccaagcttattatgtttattacacatgtattttatgacctagtgtaacgttgattattaatactctaatagaatttgagttgataactctaatactcaatttagtgtcaaaaaagagagtattaatcatggacatagattttaaaatattattttaaaagaaaaataaacacaagtggttgtcaatttgtgggcatgaaagttaggaaattcagaaggattgtttccataatagctgtcatattactttgttgcccatgtataagtactttctcttagaatgtttcctcctcttaggcctaagtatattcatgtgttaggcctaagtgatgggcacattttaagctcacaaaaattttcaccataatgtgttctaatgctagaaaaacggaattttcctactacaggtatatttatttaaacttcctttgaaggaggcacaggatcgagtgt

SEQ ID NO: 913523 - DNA, 4001 bp, Homo sapiens; identical to SEQ ID NO: 913522

SEQ ID NO: 913524 - DNA, 4001 bp, Homo sapiens
gggtcaattcctggggttcccaggcaaccctccctcgagcccactcactaggggccagccctagatcttgaaggccaaggtgagtccatcgcccaggggcaggaggctgatgtagaccctgacgtcccgccggatgcgttcgtttaggtttcgcacacactcggccgccacgtcccctttcggaggttgcagcaccttcccgcgccacaggacctgcgggagggcggggccaaccgggccgtgggaggcggggcttcggagggaggtgctcgggcggaaggcgggggactgggagggaggtgcccgggcgggaggcggggtcttggagggaggtgcccagacggaaggcggggtctcggagggaggtgtctgggcgggaggcggggcctcggagggaggtgcccgggcaggaggtgaccagagctggagacagaaccaaagcggaggaaagcctgggtaccggggccggagccccggagggggtgtagcctacgtgactggactgggtggggctttggggtataagaggagtcaagggaaaagatggggacccggcccgacagggtgctttctcctcccccgcagtggatcccttactctgaggacggcgaggatgcctccgggtcgcagcagctgcaggcagcgctcgtagtaggcggagcagttctccttgtccgcatccaccacggccacgtcgaaggtgccggcctcgcccgccgccagcagctcgtcttgcggggggagggagggcaggtgcggctgagtccgcggccccggcggccctgaggcccctcccaggccggcccgggctctgtgacaaccggccctgcccttaacctgcccggcaggcccagtcacagctcggccacacagcagcctcgtttgcaatgaatggcttcaaagcccttcccgcttcggtgctcacccagggtctccaaggcgggcttcagccggaggtcgatcttgtgctccgcctcggcctgcggagggagcgggtcagccgttgcgcccccgcctggggctgcagagctaggcgcgggcgctcacctgcctccacaggggccgtcccagctccgggggctgcgcgtccacctcgcaggtcaccacgcgcccgtccgcgggcagcgccagggccagggccagggcggagtagcccgtgaaggtgcctgggaccaggacacagacgggctcagcccagagtgggggtcggcccggaaacctcggccctccgggatcccggccgcgtgcccctacccaggtccagcgccttcttggcctggatgagccgcgccaggttggccaagagctgggcctgctcgcaggtcatcatagaatccccctgcggctgctccagggtcagctgcgtgaaaggagagggtggcaccagccatgcaggtcacccaccttcgccctgggggtcccaagccccaggggcgcggttctgggcgtggcctgggggactggcccttcggaacgcccaccgcacccggcccagggaagccggaagcccagggagggccagggcccagcccaaggtcacacagccacgtgggacccgcaggggtcgagagggacgcccgtttccgtcccgcgccctgctgaccagcctcaggcttcgcagcgccgggtgctcccgcatggagcggctcagaagatactgccacaggcggctgtcctcggggggaagcaggcactgctctcgccggcctcgccatggggggcaccgcctccctgacggggagagggtgttggattaacctgagccacgccgcgccctactctgcgcccgcccacccgcccgccgggaccaggtcctgctcacccaggaagaggccagtggcgaaggcggcgcccagtgcggctgagcccagggccagcgcggcgggcacggagagccggggcaccggctgggtcatggcgcgggcaggaggcggcgggaggcagtgacaggtcacgtgagctggagctcctgggacaggtctcggactcgcgggcccgccgggctccaccttgtcggggcactacccgcggagccgcggtctcgggcatcatctggcggccacacagccttactgcaagccccgcccgagagagccgggcgcgatctggtggccgcgccgggaactgcgcccctgcggggagcaggccaagcgcctagatctgaattttcccgcctgtgcccgcagtccaggtgcctgcctccattcccctcctgccaatgcttttttctcctcgccaccatttattctgaggccccttgggggcatatgtgaattgtgtatggagggcgccagtgtaagttacaagatagtcacaagtacaagagatagagattaaagggggaaggcctcctggacaagatgccccaaagcatcaggctgaaggagtgagggaactggtttgagggcatgcagcctcgaattggggttcaggagccctggggtgggcctgtggaactgagaccatattcttagctgttaaaatcctgcttttgggggccagatggatacgagtgtctaatcttggtcctgccagtctctctgagcctcagtttccttcctgtaaaatgaggcctacaatcttaccataaaaggcaccagatcccacagcttcgcacacagtagcacaatacataagtggcagctgctgttatgttggtaggttggaatgaagacatcttggggagaaagccggtgaagctcccttgcaaggttgttctgttgaaacactgtccagagaacactgattgaacccctaccatgcgccaaactccggaggaggtgaaagacgctgacgctgtcctttttttttttttttttgagactgagtctcgctctgtcacccaggctggagtgcagtggcacaatctggtctcactgcaacctccacctcctgattcaagcgattctcctgcctcagactctggagtagctgggactacaggcacgcacccctacacccaactaatttttgtattttttgtagagacgggttttgctattttggccaggctggtgtcagactcctggcctcaagtgatctgtttgcctcgtccttccaaagtgctgggattacaggcctgagccattgtgcctggcgttggtgttcttttttttttttttggcaaggtctctggcaaggctgaagtgcagtggcaagattactgcttattgcagcatcgagctcccaggctcagcaatcctcttgcctcagcctcccaagtagctgggaccacaggcggtcaccactgtgcccagctaatttaaaaaaaaaaattttttttttaaagagaaggggtcttactatgttgtccaggctggtctcgaactcctggctttaagtgatcctcctgcctcagcctcccaaagtgctgggattacaggtgtgagcccccgtgcctggcctctggttggtattcttagtgaagctggtttcagagatgcaggtcacacacagctggcgggtggcctaagcttcacgacttctgcctctgtgaaatggcgttatgaatagtcccaacctcctaggggaccaaatgagaaaatccaggctgaggacttacacaggggaccaaatgagaaaatcctggcacttagtgagctgtcatgttacctttaaaaggagtcaaagtccgaagggcagccggttatcttcctgctgcactgcagatgtcccctggggtggaggctgtaagagcctttttttttttttttttttttttttgagatggagtcttgctctgtcgtccaggctggagcccagtggcgcgatctcagctcactgcaacctccgcctcccaggttcaagcgattctcctgcctcagcctcctgagtagctgggactacaagcgccagccaccatgcctggctaatttttgtacttttagtagagacggggtttcaccatattggccaggctgttctcgaactcctgaccatgtgatccgcccgcctcggcctcccaaagtgctgggattacaggcgtgagccaccgcacccgg

SEQ ID NO: 913525 - DNA, 4001 bp, Homo sapiens
gctataaatctgtatggcatattatgtaccgaatactgtaacacaatggtatttgtttatctaaacatagaaaaattacagtaaaaatatggtataaaagatttaaaaatggggccaggtgcaacggctcaagcctataatcccaaggctttgggaggccaaggtgagaggatcacttgaggccagtagttcgagaccagcctgggcaatgtagcgagaccccctatctctattttttcaaaaattaggcacagtggcacacacttgtagtcttagctacttaagtgactgaggtaagaggatgcttgaggccaggatttccaagctggaggctgcagtgagttataatcatgccacagcactccagcctgggtgacaaagtaaaacgctgtctctaaaaaagaaatttagagaaaaagatttttttttaaaaaaaaggtacacttggaaaggcagctccattataatcttatgggaccatgactgtatctgtggcctgttgttgaccaaaatgttgttatgcagcacatcactctaccttcaggttcatctgtttgtatctcccactaaactatgagctttggggtggcagtgtccggtcagtcttgctctctcccttctgctagctttgtttctaacactgttcctttatataatgagaccatgataaggatttcgcaaatgaataaactgacttcctccagggcaggagtcttgtaatatttatctttctttttccagttcctaatatataataaccactcaataattactagttaagcaaatgcatgccctcttcttactatatccctgtgagtccaaagatccatgctcggtttcctatttctgattaactgagtcacctttagaaaagtaactttaagcctcaatttccttctctgtaggatgcagtaatacttcctcatctgactacttggaactttttaagcaaaaataaactatatgggtaaaaattactcagcttttaccatgtgctaaaggcctgatgtatattaaagaatgtaatcctcataacaaaccttaaagtaggtattgttatccccattttacagataaggaaactgaagaacagaaagtttaattaacttggccaataccacacagcaggtcaatgttccagatctgaacctaggggctctgatctgaacctatgcgttgtgagtgcactgtaaggagctccggaaacgtgatgtggggctctacattatctttatcccggccctttcactccatccccgctcccgcgactcggagtccgctgcagtgcggtacctgtgctctaggcgctgccctaggagccaggagcggcagatactgcctccccttcaaggccctcaacggcggaaagagcaatcgctgcatactgatgacagggaacagccacctcttccacaacccagggctctgtggtctccctcctccgccaaggaaaagagaagcacttccgggtcgggcagcgggagccccgccttctctggggaccggagcgaacagaagtgcgcctgcgttgcgactccgctttcgcgggggctgctggggcgtaggtgtcggggacgcgcgcacgggcgcgcgcagctgttgacgcgcttcttagctggtgcgcgccggagcccaaattccaagtggaaactgcaggcgcacgagggaggaacgcgtggagcatgaaaaggcagggggcctcctctgagcgaaaacgagcgcggataccgtccgggaaggccggtgcggaaggtggcgggggaggggacggtcggccgaaggctccccggggcgggccggcgggagtcgtagtcagtggtgatttcttctggagtcgtttcctcagctccttccagccccttgggcggcaccttctatctttgaggcgttaaaggtgtggaaacggagggcgtgacgaggggcaggtagcgagaatggctcagctgtggagccaaggttcgagtcccggggtcccctcataacggccctgcgaccttgtgcaagttggttaacttcagcttcacgttttttccgtcgccacacgaggatgccagtaccgcccgcaccagcagccagtactccgctgggatagttaattgtcgagcgcggagcccagttcctaacctgcagttacctgtagctgccacggcggggacggggcttggtccccaaagtcacgcagctaccaagtggccgagcttgtggctgctccaagacccgagttcttcctgagtgccagggtagcatggcatggcaggtgccagagaatttggcaagtccctcttcctccgtgaagaggaaccttcctaaaagttatcaagaatcctcaaagattttttctttatgtggattacatctatctattttgactgtattagaaattaaaacaaatttttttttgggaggccgagggggacagatcatctgagctcaggagttcgagaccagcctggccagcatggtgaaaccccgtctctactaaaaatacaaaaattagctgggcatggtggcaggcgcctgtaataccagttactcgggaggctgaggcaggagaatcacttgaacccgggaggcggaggttgcagtaagccgagatcgcgccactgcactccaccctgggcgacagagcgagactccgtctcaaaaaaataaaaataaaattaaaacaaaattttaaaatattgattagaaaataaccatagtaaacccattacatattgacataatatttttttgaaaaagaaatattcctaaacaacaacaacaaaaaaagcaaaagagtggaaatatatttttgcaagtttcttcagtatatcttaatggaagacagctggattctcatgcccgctgcttcattcagtctaacatgtcaagtagcctcttgaaaacgcctcttcacggaggttgcagtaagccgagatcgcgccaatgcactccatcttgggtgacagagtgagactctgcctcaaaaaagaaaacgcctctcacttgtgagagaattaaagtgaaaaagtcaaataaagtgttagaattattaagaaaacggttgtagccctgcagactctgaaaagtctcagaggctcccaaagctctctggactactacactttgagaactgctgctgcttctcctttgatcctataactttgttgcttgggacaactgccttgctctgccttctgtcatagccttttttatacatctctccatcttctcctgcctagggtcctttcttgtgtgaggcaaatagtcccccggcagcatcagcatcggccagtgccactgatctgacagctggtctggtagctaccaggaaactcatggagttaataatgcagagctgttggttaagagcatagattgacacttaaccctttcacagtttgggactgatagtattttttttttttttttttttttgagacggagtctggctcttgtcgcccaggctggagtgcagtggcctgatctcagctcactgcaacctccacctcccaggttcaagcaattctcctgcctcagcctcctgaatagctgggattacaggcgcccgccaccacgcccggctaatttatatacttttagtagagatggggtttcgccatgttggccaggctggtctcaaaatcctgacctcagatccgcccaccttggcctcccaaagtactgggattacaggcgtgagccaccgcgccggacagggactgatagtcttaaataagtaaggcaattgcagtttgatgttagcagatgataggtttttgttttatttgtttttcaaagtaaaaattgcttttttaaattataaaagcaatattgggtagaaaaaataaagcaataaagaaaagtaaaaagaagaaaataaaaataatttcaaatcacaccccaccagaagtgaccattaccagtatgtgaggaacattctagtaagtgtcattacatgaagtgtgcattgtttcgttcatttttttaaattatgtgctcccggaaaaaaactcaaa

SEQ ID NO: 913526 - DNA, 4001 bp, Homo sapiens
gagagtgcgcgcgagcgagcgagcgcctgtgagatagggtgggggtggggctttaaaaaaaaccctcagagatttaagtagacagtcaagataattctggggttgtcagattttcaattttgaatcctcctgctgctgtcttggtcacaagactttggcaaatttagaatccattctcttatcactagtattagcagcgaaacactatggtttgaagaccctgaattaccatatgctagcaaaagtgttaaaaatagaggagtacaaagtctcaaattttcatacattgtaattatagtgcattgccatcactgcttcatttagccatataaggagtgtatggtattttccatctcacagagaagggctatattcacctctaccatacagcctgttttcttattcaaggatgaaaattactaatcactcaaaacccggagactgccatacatgtagttagcttgtccttagaacatgttaattgctttaaatatataaatattacagtgctgagaccctaaaaacaaatattttgaaatgttaaaggggcatatgaccaaacatataattatttttagatgatgattcagtacaattgcaacaaagttattaataaatttaatgcagttacttaattaacccagatacttggagaggaatctttctcaggacacttgtgaaaaggcattcagatacacacagaagctctgcctctagacatcctcatgataataattattgttaaaatcaacatatcagaaaatgaaaatattaactattatgcaaaatatatcagacaaatgggattaaaagtagttctattattttattagagactatcattaaaatggttcattagtatcttttatttcaaagtttcatacacaaaatagtggtgggctaaaggaaatgcttcgcagccaccttgctctcccttctattcctcattcccctgcctttcctcccttcaacccccccagggaaaaaaacccaactcaatataatatacaacacagattgccggctactaccaataaaatctatttaagattgcttttatgttcctcagttcccttggtctaaaacaatggctttgatcagtattgcaaaatacaatacaaagaggcaaatgaagctttgatttagacagcacaaagttctattgctgccacagaagatggtcacagaaagagacattttcatacttggtttaaacggtgctgcagtaaaccattataatctgagatttgagtcacttccagtgagctagaattgtctttataatagccatatcatcatggctgaaataggcatttgattataattttaatatcactctgcttttccggttgcttgtatcaatgcttgctgttaatgccttcagtttaaactacatgctcttcatggaaaaattaatgctgtacctcagcaaaaaagccaaaaagtaagctggactcagaacattttatagtagctgtaatcaatgttaacatattcattgaattttaaaaattttataccaggaacacccatttctcttctcaacactccttaaaaatataaattttgctttctgcataaattcactctgtcaaggtcaagacccacctttaataaataagaccttttcaaacaaaaggtaagcaatagattaacataaaatttgcaaaggtagtattcaacgtctctcagcaactgcctgtatagtttgttttgtgttcttggggttgttttttgtttttttgggttttttgtttttgtttttgtttttgcttatttacagcaaagtgagaaatagatacctccttcccctcccccaccacacacaatagatattcttttacatgcaataacccaatttcaagtaacaaaatcttagtagcagttacctttgagtgtccagtttttaagaatcgataaaatttaaaagtatacagtatttattttcttctttcaggttgattatgtgaccgctctggcaaaagcactttgacaactgtaagatgagagggcatgcgcacacagggaactgtgggggctgaagtccttcacaaggtactcgatctgacttcagcacgttcagccgggaaaggaggaagtctcacaaatacagattctgaggggaaaaggttgtgtcctgattacattatatcctcctaaccaatctaaatcacgagttgttgaaataaaagggaaaaaaataaactggtttgtcaacttgccataggaagccaggataaagggaaactgaattgtagtattcagaataaataaaccaagcagagctaccttaaatggttagaatggtaatgactgggtagctagcaataggaatcctactagaaagagactggggtggagaggaataggcaagggagggggaactactggagaatgttagatacttaaaatctgaccatacttaaacacttaaataattttttaaatttttcagcagagatggcataaaagaatcacttttagtttagaataaaaaacaccttaatgttaaatgtgatatcaaccttagaggtcaggtaaaaatagattttagtcataaatttttgacatccaccagatttcttgtattttagttttcaatgcaggaacaaatcacttattttaagattgtacctgataagctctgaaccaactcacctccttatttttacttgtcaaaataaaagttcaccttgcattattcatacaaaggattactcaaataaaattcaactcttatactaaaataatatttggtgaattatttaaaaacaattgtatatgttgccgggcagggtggctcatgcctgtaatcccagcgctttgggaggccgaggagggcagatcacctgaggtcaggagttcgagaccagcctggcccacatggtgaaaccccatctctactaaaaatacaaaaattagctgagcatggtggcaggagcctgtaatcccagctactcgggaggctgaggcaggagaatcgcttgaacctgggaggtagaggttgcagtgagctgagattaggccactgcactccagcctgggtgacagagtaagaccctgtctcaaaaaaaaaaactaataataataacaattgtacatgtttagtgttacattgcataagacaatgacttctttctttaagacaaacagtagatacagttttctttttttttgagatggagtctctctctgttgcctaggctggagtacagtggtgcgatctcagctcattgcaacctctgcctcctgggttcaagcgattctcctgcctcagcctcccaagtagctgggactacaggggcatgccaccacgcccggctcattttttgtatttttagtagaaaagggttttcactgtgttagccaggatggtctcgatctcctgacctcgtgatccgcccgcctctgcctcccaaagtactgggattacaggcatgagccaccgcacctggccaagtttctattaaaaactgttttttggtatggtttttcctattttaacctcatgattccaaggctggaatctcacaacatattaaaatcaactgctattatctatagcttctgaaagcaatagttcaagaaccggtttgttcacgtaggcagaagatatttcttgtgggatttggttcagtgctactcacccaaggggttagcaataaatgtcagttgatgactatgctgattgaacttgtaactgaaaatgtcatcatttaaaattgtcttaattttctatttcccttcttcaccaatcagaactgaagtattaccagaaaccactgatttgcagcatactgtaatctttgtttctagttatttcttaaaacaaacaaaaacctaagaaaagagtcttttttttttttttttttttttgagactgagtctcgctctgtcacccaggctggagtgcagtggtgtgatctcggctcactgcaacctccacctcccaggttcaagtgattctcctacctcagcctcttgagtagctgggattacag

SEQ ID NO: 913527 - DNA, 4001 bp, Homo sapiens
tgtaatcccagctactccggaggctgaggcacgataatcacctgaacccggaggaggagactgcagtgagccaagatagtgccactgcactccatcctgagcaacacagcgagactccgtctcaaaaaaataaaatagaccaggcgcggtggctcgcccctgtaatcccagcactttgggaggccgagacgggctgatcgcctgaggtcagaagttcgagaccagcctggtcaacatatagtgaaaccccatctctactaaaaaacacaaaaattagctgggtgtggtggcacacacctgtagtcccagctacttgggaagctgaggctagaaggatcacttgaagtcaggaagtggagcttgcagtgagtcaagacagcgccactgcactccagcctgggcaacagagcaagactccatctctcaaaatcaatgaattaattaaataaatgaattaattaaataaaatattagacactggtcacatgcggtgactcacatctgtaatcccaacactttgggagaccaatgcgggtggctcgcttgagcccaggagttgcaagaccagcctgggcaacatggcgagaccgcgtctctaccaaaaaaaaaaaaaaatatatatatatatatatatatatatgtattatatattataaatgtatatatgtattatatattataaatgtattatatattatataatacatatatattatatataatacaaatatatataaaatattagacaccccgattaaactaaatactcattttctttccctaggaggagtgtgtgtgtatgtgtgtggtgggggggggtgggtgctgtttctcaaaaacatatttcaaaaattggaggccaagtaagcttctggtcacattttttgggtttgttgttttttcccagcaatgaacactctagttcaaatatacttcgcaaattttgaacagataatgaaaagttgattgtaaaattctacatataaaaagagctttaaaaacacattttcattttttaaaaaatcaaacaccttgtagcagatattagacataatcaagggaaaactaccagcgtcctaccaatcacagccctagagaaaacgccacaggtcgtccaaaaaacgcattcgtttgagccgacagctctttcctcccgccaaagctatccctcgaacgtcagaagctgacccaaggagtgactgatgatttctcctttttgattccccacccccgccactcccaatccacctgcttgaaggtgtcaacgcgactagaaacggttaacagtgaccagcagcagagagagaaacaaacatccctgacaacccacagctgagtaagcaagagctgtttattcaccaacgtgttccatttggagactgtcggcgagccctggaaagcccaggcacatttgagaaggttcctggagagggagagaatcatctttccttcccccaactccccagccccaaacacacagagagactcgggtggaagctgtctggtccaggcagtccctatttgcccgccccctcaagaagaacctcacgcaccaaaccaaccgacccctcgcggaggtggtgtaattcccccaaaatgggctctgccgcaggagaggctggctccagcgccgggggcttcggaaggagtttctgccacccccactgccgccactgaccgccccgacgccacggccggggccggggaccctgataagaaatggcccttcagccccctcccctcacctggctcggtcccacctgagggcaagagcggaggcaaaaacaaacaggcagggagggctgaccttgttgctaccgacagtggagcggcgcatcctgctgcttcctggaaagcggcccgaaagacattttttccccctggaggaaggaaacgggagggcgccggccagacggcggcaggcgcggaggcgttggtccgggcgggctgtgcagcctctagtggagacggtccgaagactacatctcccaggctgctctgggccgccctgcgtcgtaaccctggcgcgcacggaggcggcgactcttacctcacaaaggtagctcctccgccggcagcaactcggcgcccgcggtccatggaccggaacctcgggccgacggacgggaacccgggccgcgatcgccgcctccccgcctcaggctcctcctcctcgctctccgccgcctccgccggactcccgcaggccctgcaccgccgccgccaggctagcggagctgccccgggaagctgggtgacgggttcgcggctgccgccggactgcggcctactccgccgcctctcagtgctattgtccctgggcctggccttgagcgggtccactggggaaggccgtgtgcgccggctccgcggaagatgccggaccaagccctacagcagatgctggacaggtacgggcagctgtgggggggaccgggagccgccgaccctcgctctggccctgcccgcgcccgccctcgaggctcttggtgagcagaacccggcgtgccgggaggagttccacggccagggggccgtgagaggggcaaaaagtttggagtctagacctgggggaggacagagcgagcggcctgggtcgtagactttgggtgaaacttagctaaggagtggcgtctggtttccttggaaccccgttttgacctgagagggactcctgttaatccacaaaattagttttccttaccctcttcccctcccccttccccctccccaacttgtgaagtgtttgtcagcgatgtcactggcaagaaccgggttatctttcaggggaatgacccccttataattttaagtctctgtctgagaaccaatgataagcattcttttggaaagcctgataggctgatttcattctcccactttccctgaacccgcaccccccgtcccccccgccccatcccgtccccacctccgaactgtaaggtcagagtatccgcaagggagatttaacggtcagaccagagtagaggttatggaaaacagccaaatgagtccaacgctgaacatttagtgtacttgacgatcgttgagttcattgaagacgtttcagctcgtacaggagtccagttgcccattcttggggggccccagtcggtaaaactctttgtgaagtcgggtgcaccgccctctgctgttgaaattctggtccgtgggtcctaccatgagtttttggagactctagatccacatttcccccgagccaagtcttacttcctggcatagcaagttgtacaagctaattcatgatgtttgtggttgcttacaattctcaatagacaccacttgccacccatttcagcaggtggtaccaactctttgtactcagtaaaattccaactgtaaggtgttaaatgaaggccctcccttaattgagtttatacccagttaaatgcttttgggcctgccacacccagaacacaaatgacccaagggtacacatccttccagagtgacagacatttttttggagcttagaattttgagccatctcagttaataggaattatgtcactgatttttttcagttgagataactggtgattcatccagcccttgtttcaggtcaacatcctgacaattgtattgactgctttatatatatatgtgtgtgatatgtgtgtggtttataagctcttggaagcagaaacttactattgtttatcttgaatcccagaacagagcctggtactcagtaggtaatcagtaagtatttgttgtatgaactaatgcacaaacttatttgtcagtttccccagttgtctagggggtctgataatttaccaggttttcctttcattgtaaattggcaaattgtggcaaattaaaatatgcccagaggaaaccacctgccactgccagttctattctgttgagaccctgttctgatgtggggtattttgtagttaatttttttcctttgagggcctcctgcttttcatttttacatagtgactttttttcttctttttttgagacagggt

SEQ ID NO: 913528 - DNA, 4001 bp, Homo sapiens
accagcctggccaacacggtgaaaccccgtctctactaaaaataaaaaaaattagccaggcatggtagtgcacgcctgtaatcccagctacttgggaggctgaggcaggagaattgcttgaacccgggaggtggaggtttcagtgagctgagattgcaccactgcattccagcctgggcaacagagtgagactccatctcaaaaaaaaaaaaaaatgaagttagaaaccagttgggagttcagtgcaatcatgtaggcagcttgtgatggagtctggacttgggcaggggatgtggaagcgaagaggtaaagggagatttgaagttgagtttgaaggaggaactggtaaggaaagaagtgagaaattagaaacaacttaaatgtccatcaatatatggacagttaaacatagtcatgcaatgagctattacacagccaaaaccacagtgatgtagatctgcacttatagacatggatgctatccataacagattgtgaaatgagaagggcagttataatacaatttcatttttatagaaacaattacatgtgtttgagtcagggtttaaatatgcatagaaaaaagtctggaaggatatacatcaatacattaacagtggtgggatttggggtgagttttattattttttttccttatctaatctctaaattttaatccaaacatggattgcttttacagtagaaacaaactaaaaaaaggaatccaggctaagtgcggtggctcacgcctgtaatcccaacactgggaggccaaggtgggtggatcgcctgagcccaggagtttgagattagcctggttaacatgatgaaaccctgtctctactaaaaatacaaaaattagccgggcgtattggtgcatgcctgtggtcccagctacctaggaggctgaggggaaaggatcacctgagcccaggaggtggaggctgcagtgagctgagatcatgccactgcattccagcctgggcaacagagccagaccccgtctcaaaaaaataaaaaataaaaaagaatccagtaaataaaactgacacccaagtccccaaactctctctggaataccacactgtcactccccgaagagattcccctatacccttctaagtttcctggcagaactagaagggctcattgtttttgcctatgtctcctgagccattgggtggggaaagacagaacaatagtaaggggaaaagaaaggaaatgggggaaatgaagggatatgggacatgagcagggaagaagactcatcttttaccattaaagttttgagcaaacagaacccaaaaaggaggaaagatctgaaggctgaaggagggttatagctccccagaggcagtggcagtttgagggctaagagggaaatagcacaggctgagaaagagataataccttgtaggcggaggcgtccacggaccaccccagaaaccactccaattactggatttgcaagggaaaggccctgccccacacaccctcaagagctgttcagaacttacagggctcgtggattccagggtggtcgctgaactccagcacgtagaggtgtctcccctccacgctgcgcccaatgctgtagacccgcgtgatgccggggcattcgttttgcaccttgtacagcgtccgcacaagatcatcatagcggtggtggcgaaaggtcaccggggcaaccaacttgaagagaaggaggaggtggaggaagactgagagcaggtctgacatcttgctgggctttttcaaagagagccactgaaacgcgccccacctccttaaacaacctagcctcttcacccgccaaaatccaaggtccacctagcttcccgcttgtaaacaccagtccaaattggaagacgttcccagctgtccgtccaaggctggaaattctttatgtcgttctggaatagccactcatctctcctccctcactccctttctttctctaatccaggaaagccttttgaaaggttttttgcacttccccagatgggtagtttcactgattctggtttactggttaactggactgtaaacaggcttcaataaatagctgcttataaccctttgattcctggagaattttttaaaacttggcctgtgcctgttccttttattacaactttcaaaaagagttctctgtcccttttgatccatcccacgtactgctgcctgcctatctttctgaagcatggctgtattttgtcctttttttcctcaaaaatctttcaacagatgccattaagaaaaggaaaagattagcctcggactgggagaaaacaattgtaaatcatgtatccgataatacccccataatacgtaaagaatccttacaatacaataagaaaacaaacaacccaattaaaacatgggcaaaacatttgaccaaaatagatatacaaatggctaataagcacatttaaagatgttcagtgtcattagtcattaaggaaatacaaattaaaaccacatgagatccagtcatggtggctcatgcctataatctcagcactttgggaggccaaattgggaggatcacttgagcccaggagtttgagatcagcctgggcaacatagcaagaccccacctctacaaatatttttaaaattagctgggtgtgatggcatgcctgtagttccagctactagggaggctgaggcagagaatcacttgaacctgggtggtggggcctgaagtgagccatgatcatgccactacactccagcctgggcaacagagtgagacctcatctcaaaaaacaaacaaacaaaaatcacacatgaaatatactttacctccactagaatggctacaataaaaaagacagacaataacaaatgttggtgagaatagggagaaactggaaccctcataaatagtgcagccagaccaggtgcagtggctcatgcctgtagcccaggactttgagaggccgaggcaggtggatcacgaggtcaagagatcgagatcatcctggcaaacatggcaaaaccccctctctactaaaaatacaaaaattagctgggcatggtggcacacgcctgtagtcccagctactcaggagtctgaggcaggagaattgcttgaacctgagaggaggaggttgcagtgagctgagatcacgccactgcactccagcttggtgacagagcgagactccatctcaaaaaaaataaaaaataaagataaacaaataaatagtacagccagtttggaaaacagtttagcagtttcttacaaggttaaatatatacttactatataatacaacagtttcactcctaggtacctatgcaagagaaatgaaaacacacatccacacaaaaacttgtacataaatgtccatagcagtattgttcacaagagacaaaaagtggaaacaacccaaatgtccattaaccactgagcggataaacaaaatatggcatatccatacaatgaaatagtatttgacaataaaaaggagtggagtgctaatatattgtacaatgtgaatgaatcttacacatgcctggtaaaagaagccagacccaaaacaccacaagtggacacaaaatttctttttagagtgatagaaatgttctaaaattagattgtggtgatggtgatgtctatacaactcgataaatatactaaaattcattgaattgcatacttaaaacagatgaattctatgatatgcaaattgtatctcaataaagctgtttttaaaagggaataaaaaataagtacagccctctgaaagaattaaatataaatttaccatacaactcaacaattccattcctgggtatgtacccaatagaacaaacttgcccacagaatgttcacagcagcattattcataataggcaaaaagtagaaactacctaaatgtctatcaactggtgaataaataaaatatgatataaccatacaattgaacactattcagcaaaaaaaagaataaaatgcgactacatgctacaatgtggatgaacttcaaaaa

SEQ ID NO: 913529 - DNA, 4001 bp, Homo sapiens
taaaaaggacagaagaaaggctttcaaatatcccaagccagcaagtgacgctgagcaagttacttaaactgtctgagcctcacccacccttcggagccactgaaaggatgaaatgaaactggcacataaagtttctaatggagtcacagtcgacattctacaaatataagtctcttcccactcctaatcctgttattaagccactgtagctcttaaacatctgaattcccataactctccctgaaacactggaaattctggatgtgttcagggttgtcacacaactcagaaatctccgcccattcaaagttgtccacaaatggaagcatgccagggcctctgcaaaggggggtgctcatataggtccaccctttcaggagttctgtgtcctcacccctcctccactttcccactgccctggctgctgactttcgtgagcagtttaaccaaacaaagacgatgccttccatacccggagccctgtaacggtggcacccgcacgtatctcctttcaggaaaggccattgcgaggccagagaatttggccacattcctgctcatgccccactcttgaaataccaggcctgcagcccctgcaatttaagcaaagaacatttggaactagagaaagccccacttcacaaggtggttaataaactacgtcatttagtggaagtcattttcctaagaaaatgaggttggcagaaactgaagatggatttgagaagggtatgagacttggatgaaagacggagcactgcaggcagccagggagcccccaagccggagtccaggctgcagcagactccaggcacagactccccagtggaggctgtgccatcctgccccagccgggcagaggacccaagagacccgctgagagtgggaaggagggagctgagaagggacacgactgggtaaaggcctactggcagagctttccctagaaggccatctgccaaaacagccagccatccacatccccaaagcggaaattcagccgcatttgaggattgaagaagtaggcagagaagtaagaggcatccagcagaaagacccttagctcaggggatttcaagcttgaaacaagaactttgactctcataggcagcctcccaattgcacagctccctctttacctaagggcataagccagagctgaaatgcatgtcagggtcaaggacaagttctgggaagctgggcgggccggcaggaagcgcagatacagtccctagggaggcagaggcggcaacagggagattcccgggactggcccatcccagacacacacaatgggagaagccagttgtcccctggaggcgcgcaaccaccggcgccccctcgggctgcccagcgcagaaagttccttacctggtggaggcggctccggagccgacttctccctcttgggagctttcttgggcttggtggccctcttgggcggcctgggctcctgcgggcgccgctcccactcctccccgggccccgcaggcagcggcggagagaaggtctcgagctcgggctccgggcgcgcgtagtagggctcccggctccagatctcctgcccgtaataatcagggtcctcgagggctgcgccctgggctccgaccccggccagggtcactgccaggagcaccagggccagcgctggggtagcggtccccgggcgggacatgcctgctccgccccgcgcccagggcagggtcacggtcaccgggggcgccgggcgggctgcgggcgcagaagctggcgcggggcaagggcgcagggcacagcagagcggcgcgcttgggcgcgggaggcggccggctggctgcgcgtgtgaccggcccgcggggctgggctgggctgggccggggcggacaggggcgcgcagaggcgcggggcgggcgcaggggggccggccccgcccttccttcttccctccctttcccggcgacccctccgaggccggtccttggaggcaggtgttccaagcagccaagcccaagaaagcccccttcccctcccccgcaggccagccagcgtggggcctgcttccccagagacgctaatgagtttcaatcttagaagaaaacactgaggcccgctgttccattcctgttttacaggtggagaaacgtgacctgagagaagaaaagattggcccagggtcctaaagtaaatcagagcccaagcagcctccagctctcaaaccgtgccccgtgtgctgaccattccgcagacgtggacttcccactagccatgctactgtttcaggaactgggaatgaggaattcctgaggttcccggggtttctgggagtaaagttccctgggagcagggcctagggaccctggaggagccctctcccatctgagactgtgattctgttgggtcttgggaaagacagtgacgttaccccaaggtggccatccaggggtcacaagagggtttgtggttcatccaagagcaggctcttgcccagagggtcctttgagaaagggcctcctgctttggacaactctgcatgggttctttatgcggagcccaggcccatggccctgcggcttctgctctccaggcggggatgtggggaaccagggactgcatcgtttcccttgctgctgtaacaaacgatgacaaacttagtggcttcaaacaacacctatctcacagctctgcaggtgagaaggctgatgcgagtgtcaccaggccaaaatcaaggggtcagcaggactggtttcttaggggagcctctggcgaaaagtccacttccgggctcactcaggtattggctgaattcagctccttgcggtagtaggactgacgtgcagttcactcgctggctgtgggctgaggcgcctttcctcctgctggctgcctgtgttcctcctcatgtcttctgcaggctcctccaggcctctccctggtcctcgcacgtgggcccggcatctcagagccagagctggcacagcttcaaatcgcttcccttcctgccacatctttccgccttccagctagagaaaattctgtgcttttaagagagtgtgaatagatgggcccacccaaaaaattcagtatagtcatcctatcttgagtggtgaccttaaccacatcggcaaagtccattttgccatgttccctaactttttgccaggttccgtaactatctcttgttctaggtattcaggtgtagatgtctttgggaacccatggagtgcgctacagggacagactgaccctcaagcctgcattggcctgtcaccttcccagttcctctgggtctgtgatgtgatcctacgatgccactgagctgagtcagggcaccagggcaaggcctcaccattgccctggagtgaggacttccctagagtgggggctcctgagaccccacagtgggcagggcttggaccaggaaggttgtcattctctttctgcgcaggccactccaccaggccatcttttagggccagtcttccaggcttccagtttgaaggccaaagcagaatgaccagagggagaggaggaggctgctggttgaggcagggcctgtctgcagggaccaggaggccttggtcctgcctgtcaaacccccaggacgctctggaatccagagccagcagaagtcctcagggtgagagggcaggagggtccccttccccacccaccactctttgctccccaacccttcctggatccccacccaccctcctccatggcctatccccagggctcactcctggggactgttttatctgaagccaggcactccagacgacaacacagtctttagtggtgaaacagaaagcggctccagcagcaagcaacacacccagcgttccagcgagctgtgtgaagcgctaacaagaggctggcctggcatcctggccagagggactgcagaggcagcccaggccaggacggtgccctgcaccacctccatcagaacccccagagcttgctcaacagcagaccgacacccaggcggcaccccagaccttcagaatctcctaaagagt

SEQ ID NO: 913530 - DNA, 4001 bp, Homo sapiens
caagactaggaaaaaaaggccgggagcggtggctcatgcctgtaatcccagcactttgggaggccgacgcgggcggatcacgaggtcaggagatcgagaccatcctggctaacactgtgaaaccccgtttctactaaaaatacaaaaaattagccaggcgtggtggcgggcgcctgtagtcccagctactcaggaggctgaggcaggagaatggcgtgaacccaggaggcggagcttgcagtgagctgagagcggaccactgcactccagcctgggcgacagagcgagaccccgtctcaaaaaaaaaaaaaaaaagactaggaaaaaaacgtggcgctcaaagcaaaaaacaaaaaaacaacaaataaaaaacagcgtggtttattcatgtaatctgatgcaatgttcacagcggacctctcactgttcaatctagatctttgtttcaagggaaaggtacaccctcatctgcccggcaaattaagtagaaaggaaactgagtcacgtacgtaagccacagtgttaaaggagctctttcaatttcagtgacactttgagactggccctgtaagtcccaatttcttaaaatgtgattacaaactcaccgctgcttcactgagcagcatgcaggaaacccctaagtgatttcaaactcaggtatctgatatacaaataaaacgcaacaggatcaagaaacatgctgaggccaggcgcggcggctcacgcctgtaatcccagcactttgggaggccgaggtgggtggaaggtcaggagttcgagaccagcctgaccaacatggtaaaaccccatctctactaaaaatacaaaaattagcaggcgtggtggcgcatgcctgtaatcccagctactcgggaggctgaggcaagagaatcgcttgaacccaggaggcagaggctgcagtgagccgagatcatgcccctgcattccagcctgggtaacagcaagactccgtctcaaaaaaaaaaagtatgtttaataatgtgtttattccccagattcaacaggctctggaaaccttaccagatggccctaaaaaggcaagactcaggcagaagggaaaatgcgccttccgagagcggtcgcggctctgcccttcccactccggagactgcccgcgcccgggaccgaatgactcagctgcgaggccctccggcccaggttttgggggaaaacgggctgcgtccgctttcgtctaaactgcgctcgtaaagtggggcagaggcgctgggggcactcaaatccgaggtccttacttctggattccttttccttttccgagttaaaccgctcccctgagccgcacggctctctcagggaggattttccaactcgtcccaagttcgcgaggaggcaggcgggtcccggggcagctgagcgcacgaagcgggcgtggggcggcgagccggcggcctcgggggcgccgagcgaggggccgcgtcaggtgaactcgcggctgccccgccagtccttggcccggccccggggtcccggcccgccgcccacggctccgctcggcctctgctgctccaccgcacccggctccgctccgcctcctgcctccacctccacctcctgcgccgcgtcgcccgctgctgggtctcggggccggagccgacgcaccacttacccgccgcaaagggatttacgtagcggacctcgtcactgattacggacgcgaggaggtggagacggcgagcccgaccgccgctcagcagcggcgccgccgcccagcaacccggagccggcagcggccccacgtagtcctcacgtcagctgtgatgcggtagccgcggcctccctgccgaccccggaccaaaagtagcgctgcagccgaccgaaccgcgtcctcccgccccgtcctcccctcccccacgccgggacggcctcccgggggaggccccgaggaaaaaaatccaggctcgaactccgccccctgccggccgccagcaggagtgaagcgccacaatccaacaatgaaatggaaccggggaggggcggcgggaaggtgcgggtcagggggcggggcctagggatagggagaaggaaggtcagggggcggggccaagaggaggaactagcctggaggtggggcggaaggtaggggcgggggcaaggctggaaaccggaagctgcccgtgccgcgccgcgcgtgcgccagaaatccaatgacttgtcagccagagtaacggctgttgtcaggtcttcagggtctcgaggtcggtttcttcctaacgccgccaaccccaagctaaggtccgcgagcgtctcacctctgtccaggctgggctgcagtggcgtggtctcggctctctgcaacctctatctccccaggctcaagcgatcctccggcctcagcctcctgagtagctgggactgcaggcgtgcttcttctgacttctaaaagctatctacataccttgactagtggcccttttcctccatattcacagccagtcacagctggttgagtccttctccaaaagaagcttgagctcctgagacaattcacctgcttcttagggtcatttattgcagtttatcccagtatttgactggaaatggtccgcatgctgggcccgctggctcgggcctgtaatcccaacacttcgggaggccaaggtgggaggatcgcttgagcccaggagaccagcctagggaacacagtgagacttcatctctttttttttttttagattagaaaggtcggccgggggctcacgcctgtaatcccagcattttgggaggcagacatgggcagatcacctgaggtcaggagcagcctggccaacatggtgaaaccccatctctactaaaaatacaaaaattagctaggagtggtggcagacgcctgtagtcccagctagttgggaggctgaggcaggagaatcgcttgaacctgggaggtcaaggctgcagtgagctgagatcgttccactgcactccagtctgggtgacagagcgaggctccatctcaaaaataaaaaaagtaatgggatatcaggaataaagaatagcagcatggttatagagtacagtaggtcctcacttaacgataggttcttagaaatcatggctttaagccaaacaacttacagcaggtccacaaaaaaattttcattcagtgttgttttcatttcgttataatattgatgataacaaaaatcggtttcattgtacgttgtttcactgaaaaccagtttctaagaagctattgacaatgttaagtgaggatttattatttcatatcagttactgtagtgtcagagtgttttcataattttcactgagcaggacttaatctaaatccaatctgaacctttgttcaaatctaattttcgtaggtcaaagggaatgtatccacaacaattgtctctgtaacaggagttcatatgaatcaaaaagaatcaaaggaatggcaatttcttatttgcaaagtatttgctctacggtttcctttcttgccagtattttactcccatatgtatgtagtcttaattataaagttcagaaagcacaaaccatatttttttgttcatctgtttttttacaaagatcaatactggaggtgagatacacatacttacaagcccatcagttcatggcctctgctatacccttgctgtaagatgtaatagacttaaaaaccatgcagttggatctgggtttaaatgtatgcttgttagctgtgggcaagtgtcatatcctcttaggggaagcataaggtttttaaatgggaagaaaaatagtacctacctgttaggattattgtagattttaaaaaatatctgccataagataaatacttaaaaacctactcatgtttacgttagtccagtgtctagcttttggggctcctcacctaggtgatagttaattctctgttggggagggacaactaggtcacctacttttctgagaaaatacgggctgtcagtcacacccttatattccctcctcacttcaaaatatcttaaactttc

SEQ ID NO: 913531 - DNA, 4001 bp, Homo sapiens
ttgcagatgacatgattgtatatttagaaaaccccatcgtctcagctcaaaatctccttaagctgataagcaacttcagcaaagtctcaggatacaaaatcaatgtgcaaaaatcacaagcattcttatacaccagtaacagacaaacagccaaatcatgagtgaactcccattcacaattgcttcaaagagaataaaatacctaggaatccaacttacaagggatgtgaaggacctcttcaaggagaactacaaaccactgctcaatgaaataaaagaggacacaaacaaatggaagaacattccatgctcatgaacaggaagaatcaatatggtgaaaacggccatactgcccaaggtaatttatagattcaatgccatcccaatcaggctaccaatgactttcttcagagaaatggaaaaaacgactttaaagttcatatggaacccaaaaagagcccacattgccaagataatcctaaaccaaaagaacaaagctggaggcatcacgttacctgacttcaaactatactacaaggccacagtaaccaaaacagcatggtactggtaccaaaacaaagatacagaccgatggaacagaacagagccctcagaagtaataccacacatctacaaccatctgatctttgacaaacctgacaaaaacaagaaatggggaaaggattccctatttaattaatggtgctgggaaaactggtttgccatatgtaaaaagctgaaaccagatctcttccttacaccttgtacaaaaattaattcaagacggattaaagacttaaatgttagacctaaaaccataaaaaccctagaagaaaacctaggcaataccattcaggacataggcatgggcaaggacttcatgtctaaaatacaaaaagcaatggcaacaaagccaaaattgacaaatgggatctaattaaactaaagagcttctgcacagcaaaagaaactacgatcaaagtgaagaggcaacctacagaatgggaaaaaatttttgcaatctactcatctgacaatgggctaatatccagaatctacaatgaactcaaacaaatttacaaggaaaaaaccaaaccaccccatcaaaaagtgggcgaaggatatgaacagacacttctcaaaagaagacatttatgcagccaacagacacatgaaaaaatgctcatcactggccatcagagaaatgcaaatctaaaccacaataagataccatctcacaccagttagaatggcgatcattaaaaagtcaggaaacaacaggtgctggagaggatgtggagaaataggaacacttttacactgttggtgggactgtaaactagttcaaccattgtggaagacagtgtggcgattcctcaaggatctagaactagaaataccatttgacccagccatcccattactgggtatatacccaaaggattataaatcatgctgctacaacttggaaccaacccaaatgtccaacaatgacagactggattaagaaaatgtggcacatatacaccatggaatactatgcagccataaaaaaaggatgagttcatgtcctttgtagggacatggatgaaattggaaatcatcattctcagtaaactatcgcaagaacaaaaaactaaaacataaaatggatgttattttatatttcacaatttttacccctcttttcacaaggctttaaaagtgtgaaggtacttatagcagacatcatttaccttttcttccacatcccctgaagaataatcctcttctataggacgcctgaaacatagattatgctgatgccaccacatccaccaaaaatcccactataaacagtacttaatctgaagaaataaggtaagatgatgcaattgacagccttatttggctttgcaattaaaaaaaaccctaatagtgacacttataactgggaaaacctcacagtgttgtaacacagcatttgattagcacctagtggactagctctgacccgtagctaggttccctcacgatggggtttatgatgtcatagtatagctgcacatgtcacaaagctactaggcctgcattcaagacaataaaggattttaaaatgtgaattcacaatatagcagactgctctatcaactctgctcctgaaaaatcaaatctctgtactacctagtttaaggactacaataaaaatacactaacaagctaagcaagaagttgaaaactatcttgatatttatgtattaagacaggattctcaaaagtctgttctataggggaaaaagcatttaagagaatattagaatatttcaaatgttttaaagctgaaaataataagaatattataaatcaaatacctgaataaagatgtaaaatattccactttaattttttttccccccactgagacggagtcttgctctgtcacccaggatggagtgcagtggtgcgatctcggctcactgcaacctccacctcctgggttcaagcaattctcctgccttagccacccaaatagctaggattataggcatgtgccaccacgtctggctgatttttgtatttttagtaaagacagggtttaccatctctgccaggctggtcttgaactcctgacctcaggtgatccatccaccttggcctctcaaagtgctgggattacaggtgtgagccaccgtgcccggcccactttaatttttaaaagtcatatttgattgtgctgagtaagacaaacacaaaatgaaaaatgtagttggtcttcatttcggttatcttgagtgacttccttcccatgaaggtgttttttgttttgagttggagacagagttcagctctgttgctcaggctgcggttcagtggcacaatgttggctcactgcaacctccaccttccaggctcaagcaatcctccagcctcaaactcccgagtggctgggattacaggtgcccgccaccacaccctggtaatttttttttttttttgatacagactcttgttctgtcgcccaggctggagggaagtggcgtgatctgggctcaccgcaacctccatccacctcctgggttgaatcgattctcctgcctcagcctcccaagtagctgggattacaggtgcctgtcaccacacccagttaatttttgtaattttagtagagacggagtttcaccatgttgtcaggctgatctcgactcctggcctcaggtaatctacccgccttggcctcccaaagtgctgagataacaggtgtgagccactgtgtctggcctagctgttttttttgttttgtttttaagatagtgtggctaacaaattgcaaattcaatgcatttaaattttaccttaagaatatatgttgaaaatatttgttacaaagagataagccaagtatgattattatttctatatttactatccattatcttctaaagagatgttgttgttgcctccaatccttttttttatgtatagcgcataagctgaaatccataatctgaattgaaaagggggaaaaggatcattgtttctgatactgtaaacgtaaatggtcaaatttcatgtttctaaaaaattcacttcttgaaagcaaagcaagtgttataattcagtcattcttaattatccagaagggtttaaataatctattttgataatgcttccagtaagcacttaaattaaaattagggttctttatcctttgagaacagtgccctagctaaacttttttttttctagctaatctgtacagtatcttggatttcctatttatagtatttggggcatcattttatattctaaccaatatgagatatgtttcacttattataataatatatatattaaagtactataaaaatggacatgacctttatagaagtcaaactcttttagctctggaaggaacttttgaaagccaatctcgtatttggtttcagtaagactgaaactgatcataatttactagccaaatgtatttcaaaataataaatacacataaagaatttgcagta

SEQ ID NO: 913532 - DNA, 4001 bp, Homo sapiens
gtggctcacatctgtaatcccagcactttgaaagactgaggcaagaggatcacttgaggccagggcctcaacacaaacctgggtaacatactgagaattctgtctctattaaataataaataataataatagacaatactttcttccaataccagccaggttaaaactaagtagaaatatgtggacctcaataaaagtcataaaacaaagaagaggttggaaagactttcttgttttataattagtgtcagaaagaattagaaactcttggaatcaggggccatcacaggaaaaaaagataatgatgagaattattcttacacttctgggaaacacaggagaaaatacccatgccacaaagataatcaagcttttaatgtatgtgaatttgtcacatcaggtatcttgtcgccactcttatcattctactgtgataaactacttgaacacgcaagaaaaggactatactatgtatacgtgtctccattttcctcacagatttttttttttgtcatcaattaggttcaaataatttcagcatttaaaggataataactgaccttaaaaatgaacaaaaataaattcagtaattaagatgcatactttaaaaaatgcatatttaataatttacatctattgatggaaaaaatgttttaacttcaagaaatgttaagggtaaaatacatctctggatcacaaccacaataataatcatatctacaaaagccaaggtttaatcgagagggatacattaataatatcatcttaccaagaattatgtataccgaatttaaaataaatttatatctacctactaaggtgattataaatttatatctacctactaaggtgattattcatgaaaacagcatcagcactggctgggcgcagtggctcacgcctgtaatcccagcactttgggaagccgagacaggcggatcacgaggtcaggagatcaagaccatcctggctaacacggtgaaaccccatctctactaaaaatacaaaaaaaattagccacgcatggtggcgggcgcctgtagtcccagctactcgggaggctgaggcaggagaatggcgtgaacccgggaggtggagcttgcaatggcccgagatcatgccactgccctccagcctgggcgacaaagcgagactctgtctcaaaaaaaaaaaaaaaagaagaaaaaaaaagaaaacagcatcagcactataatctttatattactgtgtttatcacacatcttctctgatgcaccctcaaaatatttttcagcacccttggggagcattgctaaataaatctgagtttgaacacagaacaacaaagtgaagaagacatgaactgctcatctgcaattactcagtccccaaatgaaaagttggcaacaaagctgcagctctgaagtgaaacctacgtacctagcaggacacagagcaccttacgcaaggagaagagattcctccaaatatctaataaaaagatttgcgtataagcacttcataaagaaaaatgataaatgaattagtgaaagaggaaaaaaatggctcaagaaagtcaaagacaaaaccattcaggaaggaagctaacctgaacggtgtgtatttctgatgactgaataacccatggctgtggtgtctgaattactccctggacatgtatagtttggcccgaaggtaactgcactagagttacagctggggagcctcttctggtgcctgatccagccacagaaacctgccaaaatgatcaccattgaggattaaagctggaccttttttgttattgtttttgctatttttaagtaataccactcactaatatgactggcctacttctctttttcctgctgctgagaaatgacaaactatctaggatacttaccatcgggaggtggttactgtcctggaacagtcattttctgatgtgacatttattaaggaacacatgctccttatcgcttttggtgcccatacttcggtggctaagaatgttccaagcacaaagttctaaagcagttaaactacctcactacgacctcacgcctactaacagtgaagcctttcttaggccagagtataaactaccctctaacttcttcagagaaattggagatagaacttaactatggttcttttttttttgagacggagtcttgctctgctgcccaggctggagtgcagtggcgtgatcttggctccctgcaagctctacctcccaggttcaagccattctcctgcctcagcctcctgagtagctgggactacaggtgcccgccaccacgctcagctaattgtttgtatttttagtagagacggggtttcacccattagccaggatggtctcgatctcctgaccttgtgatctgcccaccttggcctcccaaagtgctgggattacaggcgtgagccactgtacctggccagtgaattatttttattaaatgtgtgacatatgatattctagtgttactctggatgtgagctgatgctttgtctctagactgataaaaatcacagtcactgttatgccctcataataactaaaaaggcataggccgaagaaattccaggacctttcaagcccctggtgtctctgacccagagaaagctcatgccttgaaggctgatgaggcctctggacacttttcctctccctagctaaagcatccagagaggccagaactatcacttaactttgggcagagatcagcacaacagccatctcctcactacttccctgagttccttcaacagagatccctaccagaaaaacacgatactaaccactcctctggactcaaaacctgccaggttttctaattagtaaacaactctgtcctataggctagcataattgcagaaactttgcctcattttactaagattcaccattcattatgacttactcaagagtcaaagaccttggaaataagtcaccagtgtctatcatgagtggtagtagaaccacagcatctaaaacaattttttcaaggaagactttgtgtgtgacttcactttgaggaacaccaatgatttccaacttatattaatatctgaaaagaattattaaaaactgggtttataacaaataactaagatttatttacatcatcattcccttggaaaactaacttctctggcaatccaaaagttaaaacatgttttatccgtgtaagagaacctaggtgttgagccttgtactaggtgcactattagaaaatagaattaataaaactagcacctaagaaacaatggcacaccaaatagtacagaacgaattgctccattttagaggccatgaatatcacaggagtacagaatagaaagatcagtatgggcccaaacagtaagtgagggctttatgtagatgccagagcttgagtgaaggcttgatctaaacctagataacagttggacagatagtgtgaaaccaggacagaggcaaccaatatgtagcccacagggaaaattcagctcacctacccccagagtattatcatctagtttagattccagggaaaagaaaaacatcctcccattatggaaccagtagatttaacaactgcaagttttaaaacattggatttattctacaaatgtttccggcacaaaaggcaactctgtatgaattatacacctctatagtgactaactctcaaaagataactctttctcctcacaactaattctcaaatattttagtctcagggcatctttacactcttaaaaattactgatgacctcaaagagcttttgtttctgtgattgatattcagtagagggctggtaaacacttaactagatcttaagaaggaggaacactgacttgtagcgtttgctcacttctgtgatgtaagtactcctactatggctgatttcaagctgccaatggatgacattgaacacaaagccggataaagattatacaattggttttcactggtacaagccagctgtgcacaccactggttatatatgttgatatttaacatactggaaat

SEQ ID NO: 913533 - DNA, 4001 bp, Homo sapiens
aaaagtatacagcattgccaaggagggcggatcacgaggtcaggaaatcgagaccatcctggctaacacggtgaaaccccgcctctattaaaaatacaaaaaattaggcgggcgcctgtagtcccagctacttaggaggctgaggcaggagaatggcgtgaacctgggaggcggagcttgcagtgagccaagatcgcgccactgcactccagcctgggcgacagagcgagaccccgtctcaaaaaaaaaaaaaaaaaaaaaagtacacagcgttttcacatcattttatttattttttgttatgagtcttatgcttagacaagtcaaaggggtaataggaatgaaaggcttggtaaagaaagatattaaccaataatttttagaaaatatatgtacaaaagtgccttctggttctaagaatcatatgacatgcagtgtttgagatgattttaagttcatctatgtcttataataaattcatcatttgagttctgcagtctatagcatctctagaacttcacaaaacttcgagaaaaaaatagttcctcaagacagttttaaaaacaatgtaatacaggttttacttactcaagacaatccaatgttcctatccacaaagagggctgagacccattaacttcgaagagctaaattgtagtgaagttgtttaaaactcttaattcaactgcaaattcagtactgtattacaaacaagaccactgaataaacaacactgcaagcacacaaaggttattagtaactaagtcttccaaaatcactctttgttactgagaaaagcaaacctagtgaaaaattaccgattacaaatttaaataccagaggctgggagaacaagtaaaagacaagcacttccctgactgaacactagaggagctctgaatcgcaagttcctatagatggagtaagaggatggagtaagagtaaagaacccgccagcttatacaatacataatccatttctcaccaggcgcatgcagggacggcctcagtaggaggctcgatcttaccactaagctggccagacaactcctgagttctgttcatgcattacagtttcatgacgtgtttccctcttcaagcagacaaccacttcaaaagaaatgttaaagtagggctaacaagaaaagctattcagtctaaaaggcagcttggaggcagaggcagtggtgagctagttaactctaaatctgtcagcagcattttacaaagcggaaaggaactgactaaatcacaacatgactcggagctgacgtcaatgtgcagctcgcttggagttttaacttttccacttcccctgctgaaatacgattccaggaaatgtaatgacatcagccttttgaactcaattagctgaacagaccattttaaatacaggaggaaagaaacaagtaggcacacaaacatccataacacgcgggtttttcctattctgtttggagctgcatttgtccacagtaatgaaatcagaacatgaacggtatatactgtatgtttaatctgcggctagattgaatttgcaacaggttgcctatgaagtaacagcttattttagtagggcagaatggtatgcatatgaaagagagacacagagatggaggagaggggaagagaagaggaggggaagagtggggaggaggggagggaggatagagggaggaagagaggattagtgcctcagtcaagcaagcaatagaatattgagcaaagaaacaatcacactaagatgccctaacaaagtgagctgaatatatagatgtatatttcaaaaaaagtcttacacctaagtgactaggagagtaacactttctgaaacactcagatgttcctgaatacttcctaaacttcaaaacaatctgcacaattaactgaaaacccctctttaacattcttacctgtgtcatctccagttacagccataatgggcttctgcagacagaactgtcttgtttcctctaccacagttcaacataaagtgttccaaattagcaagcatgtgcaggataagcaggaggactgacatcacaatgacatcactagcctatcactgccatcaatttgctttgtcacaggcgagctcactgaaacccaagccctataaaaactcttcctgtaataaaccatcttaatgctcttgtttctcatttttacatagaaatctgtttgaggtgggctctagcaaataataataataataataataataatgtctcttttagcattaaaagttacatgattgtatcttacagggctacttctttattattgttgtgtccaaggcttctaggtaaactaagggagaataaacccaacataatttcctaactcataagagaaaaaacacttggagatttaaaaaaaaaaaaaacacattgactatcagcaaagaaataccatatttcatagtcacttctaaactcaccaagaaatatccagccacctgtgttcacttaacatttttatttgctgagccatttgctacaccatcaaaaaatccaactcttcctaaggtgatacagaatttgctactttcacttaaagggagtagataattaaattttaaaaattcactgtgccaatggagcaagtattatgtagtattctcccataactactagattgaatcacatgaacttgctgatatttgaactttctggcctacaaaaatagcagtttcatgtgattcaatctaataccttattttcccagattaaaaccccctgaaaagacatttgggatttttaaaattcataaataaatcaaaattactatttgtacattttttttaaatgtcaaattttatttggatcacttaatgaaggcttggcacatagagagctggatcattataggaaattcagtgattataaggttagacacaaaaatgggcgaatgttcaaccatagaacagaccatagcctggaaaaaaattattggcatttccactgcaaaaaaataagtgacatgccactgagaccttttgtctttttttttttttttttttttttttttgagatgaagtctcgctattctcccccaggctggagtacaaaggtgcaatcttggctcactgcaacctccgcctcctgggttcaaatgattctcctgcctcagcttcccaagtagctgggattacaggtgcccaccatgcctggctaatttttgtatttttagtagagacggggtttcaccatgttggccaggctggtctcgaactcctgatctcaggtgatccacccacctcagcctcccaaagtgctgggattacaggtgtgagccaccgcacccaaagccctttcccttgtatgattagaattcaacccaaccttatgtcaatgaaaggacatcccaccacattttagctgtatttaatttaatcatcttccagtaaaggtaaggactttacacctcagatgctcaggaggtaaagtttcagggagtgtccatgtttctagtaattctccaggatacctgacaatggggttagggtttcaattcagctgaagatatcttggctgagtaaggaaccctggatggtcacctagacatcaacctcaatctggggctccagcagggactctttgctgtcccagtcacacctgagggtttgggtccaagaatgctattagtaaattttatttcaaatttcagaaaatcaataagaaattgatttttatgtcagcatttctttaaattggcacatagatgctcaataaatattggtgtgaaaaaaaaggcaaggaaggaaagaaagaagggaaatgggttgcttagttgattactgctcttagtagttttaatgtattccctggaccagttaatctcaagtcaatcagcacacagaacaaatcacattttcagaggaagaacagttcactttcatttggtaaatgcttactgaacatttatcacatgccagggtctgtgctaggtatttgtccaaatagaacttaccatctagcaagacagagagccacaacaca

SEQ ID NO: 913534 - DNA, 4001 bp, Homo sapiens
atctagatctacttggtctgccgatccatagggttacctcagaactgagagcccagaggtctggttcctaaagctactctactacaccttcaaaaaagtcccttaaccctgtgctcttctggctttaaaaaaataaagtaaaatgaggccgagcgcggtggctcacgcctgtaatcccagcactttgggacgccgaggcaggcggatcacgaggtcaggagatcgagaccattctggctaacacggtgaaaccccgtctctactaaaatacaaaaaaacaaaattagccgggcgtggtggtgggcacctgtagtcccagctactcgggaggctgaggcaggagaatggcgtgaacccgggaggccgagcttgcagtgagccaagatccagccactgcactccagcctgggcgacagagcgagactccgtctcataaaataaataaataaataaataaataaataaataaataaataaataaataaagtaaaatgaaataaaatttattactcatttttcaaatagcactgattctgtaagaaatgaccagatttttaaaaatatgatttccaaaggcaaaatcaggtcttgtgaaaaagtgttttaagttgtttgacattttaaagtttcagcattttgaaaagtttaaattggaaaaggaaaatcaatcatgtgtagcattattggtaaaactgtgaaaaaaactttcaaggatgttatgttcattctgtaaaaacaaatgtcaaaaatgtttgtttatttatatgtagtggttaaaagtatacagcattgccaaggagggcggatcacgaggtcaggaaatcgagaccatcctggctaacacggtgaaaccccgcctctattaaaaatacaaaaaattaggcgggcgcctgtagtcccagctacttaggaggctgaggcaggagaatggcgtgaacctgggaggcggagcttgcagtgagccaagatcgcgccactgcactccagcctgggcgacagagcgagaccccgtctcaaaaaaaaaaaaaaaaaaaaaagtacacagcgttttcacatcattttatttattttttgttatgagtcttatgcttagacaagtcaaaggggtaataggaatgaaaggcttggtaaagaaagatattaaccaataatttttagaaaatatatgtacaaaagtgccttctggttctaagaatcatatgacatgcagtgtttgagatgattttaagttcatctatgtcttataataaattcatcatttgagttctgcagtctatagcatctctagaacttcacaaaacttcgagaaaaaaatagttcctcaagacagttttaaaaacaatgtaatacaggttttacttactcaagacaatccaatgttcctatccacaaagagggctgagacccattaacttcgaagagctaaattgtagtgaagttgtttaaaactcttaattcaactgcaaattcagtactgtattacaaacaagaccactgaataaacaacactgcaagcacacaaaggttattagtaactaagtcttccaaaatcactctttgttactgagaaaagcaaacctagtgaaaaattaccgattacaaatttaaataccagaggctgggagaacaagtaaaagacaagcacttccctgactgaacactagaggagctctgaatcgcaagttcctatagatggagtaagaggatggagtaagagtaaagaacccgccagcttatacaatacataatccatttctcaccaggcgcatgcagggacggcctcagtaggaggctcgatcttaccactaagctggccagacaactcctgagttctgttcatgcattacagtttcatgacgtgtttccctcttcaagcagacaaccacttcaaaagaaatgttaaagtagggctaacaagaaaagctattcagtctaaaaggcagcttggaggcagaggcagtggtgagctagttaactctaaatctgtcagcagcattttacaaagcggaaaggaactgactaaatcacaacatgactcggagctgacgtcaatgtgcagctcgcttggagttttaacttttccacttcccctgctgaaatacgattccaggaaatgtaatgacatcagccttttgaactcaattagctgaacagaccattttaaatacaggaggaaagaaacaagtaggcacacaaacatccataacacgcgggtttttcctattctgtttggagctgcatttgtccacagtaatgaaatcagaacatgaacggtatatactgtatgtttaatctgcggctagattgaatttgcaacaggttgcctatgaagtaacagcttattttagtagggcagaatggtatgcatatgaaagagagacacagagatggaggagaggggaagagaagaggaggggaagagtggggaggaggggagggaggatagagggaggaagagaggattagtgcctcagtcaagcaagcaatagaatattgagcaaagaaacaatcacactaagatgccctaacaaagtgagctgaatatatagatgtatatttcaaaaaaagtcttacacctaagtgactaggagagtaacactttctgaaacactcagatgttcctgaatacttcctaaacttcaaaacaatctgcacaattaactgaaaacccctctttaacattcttacctgtgtcatctccagttacagccataatgggcttctgcagacagaactgtcttgtttcctctaccacagttcaacataaagtgttccaaattagcaagcatgtgcaggataagcaggaggactgacatcacaatgacatcactagcctatcactgccatcaatttgctttgtcacaggcgagctcactgaaacccaagccctataaaaactcttcctgtaataaaccatcttaatgctcttgtttctcatttttacatagaaatctgtttgaggtgggctctagcaaataataataataataataataataatgtctcttttagcattaaaagttacatgattgtatcttacagggctacttctttattattgttgtgtccaaggcttctaggtaaactaagggagaataaacccaacataatttcctaactcataagagaaaaaacacttggagatttaaaaaaaaaaaaaacacattgactatcagcaaagaaataccatatttcatagtcacttctaaactcaccaagaaatatccagccacctgtgttcacttaacatttttatttgctgagccatttgctacaccatcaaaaaatccaactcttcctaaggtgatacagaatttgctactttcacttaaagggagtagataattaaattttaaaaattcactgtgccaatggagcaagtattatgtagtattctcccataactactagattgaatcacatgaacttgctgatatttgaactttctggcctacaaaaatagcagtttcatgtgattcaatctaataccttattttcccagattaaaaccccctgaaaagacatttgggatttttaaaattcataaataaatcaaaattactatttgtacattttttttaaatgtcaaattttatttggatcacttaatgaaggcttggcacatagagagctggatcattataggaaattcagtgattataaggttagacacaaaaatgggcgaatgttcaaccatagaacagaccatagcctggaaaaaaattattggcatttccactgcaaaaaaataagtgacatgccactgagaccttttgtctttttttttttttttttttttttttttgagatgaagtctcgctattctcccccaggctggagtacaaaggtgcaatcttggctcactgcaacctccgcctcctgggttcaaatgattctcctgcctcagcttcccaagtagctgggattacaggtgcccaccatgcctggctaatttttgtatttttagtagagacggggtttcaccatgttggccaggctgg

SEQ ID NO: 913535 - DNA, 4001 bp, Homo sapiens
ttcaaaactcttccctacttttcatgaaatggtcataaccctaagcaagattttgtattttgattaggcagtgactcacctgagtaggaaactggaatacagcctattaactatggattccagagtttaaaattcaggaagaagaagtaaatttcattaactttcagggacaatgcaaaaacaaaaagactaaaaataaaaatgtcctatgtttacgcattcaataaaaatttattcatatactgtcaccaaaatatgtacacaaaacatcaccgtaattacaacttcgcaatcaccaaaatgattccatatccatcaccaattcactgggaaagtaagtgttatattcatctatttacagattcgccaaagttgtgtgaatactgacaatgctttaagtgtttactcattcaggatcaaaaccattttaatatatttgttaaagctgtgttgggatcaatacatagttctttaaacatcagttttaatacttagcatttattggccaaaacatattgtgtgcaatttgccttcctttgggaaaaaaattactttagattgaaagactttaagactactatgacttaggaagggaaagtttatccaaaaaaagaatcaagactaggaaaaaaaggccgggagcggtggctcatgcctgtaatcccagcactttgggaggccgacgcgggcggatcacgaggtcaggagatcgagaccatcctggctaacactgtgaaaccccgtttctactaaaaatacaaaaaattagccaggcgtggtggcgggcgcctgtagtcccagctactcaggaggctgaggcaggagaatggcgtgaacccaggaggcggagcttgcagtgagctgagagcggaccactgcactccagcctgggcgacagagcgagaccccgtctcaaaaaaaaaaaaaaaaagactaggaaaaaaacgtggcgctcaaagcaaaaaacaaaaaaacaacaaataaaaaacagcgtggtttattcatgtaatctgatgcaatgttcacagcggacctctcactgttcaatctagatctttgtttcaagggaaaggtacaccctcatctgcccggcaaattaagtagaaaggaaactgagtcacgtacgtaagccacagtgttaaaggagctctttcaatttcagtgacactttgagactggccctgtaagtcccaatttcttaaaatgtgattacaaactcaccgctgcttcactgagcagcatgcaggaaacccctaagtgatttcaaactcaggtatctgatatacaaataaaacgcaacaggatcaagaaacatgctgaggccaggcgcggcggctcacgcctgtaatcccagcactttgggaggccgaggtgggtggaaggtcaggagttcgagaccagcctgaccaacatggtaaaaccccatctctactaaaaatacaaaaattagcaggcgtggtggcgcatgcctgtaatcccagctactcgggaggctgaggcaagagaatcgcttgaacccaggaggcagaggctgcagtgagccgagatcatgcccctgcattccagcctgggtaacagcaagactccgtctcaaaaaaaaaaagtatgtttaataatgtgtttattccccagattcaacaggctctggaaaccttaccagatggccctaaaaaggcaagactcaggcagaagggaaaatgcgccttccgagagcggtcgcggctctgcccttcccactccggagactgcccgcgcccgggaccgaatgactcagctgcgaggccctccggcccaggttttgggggaaaacgggctgcgtccgctttcgtctaaactgcgctcgtaaagtggggcagaggcgctgggggcactcaaatccgaggtccttacttctggattccttttccttttccgagttaaaccgctcccctgagccgcacggctctctcagggaggattttccaactcgtcccaagttcgcgaggaggcaggcgggtcccggggcagctgagcgcacgaagcgggcgtggggcggcgagccggcggcctcgggggcgccgagcgaggggccgcgtcaggtgaactcgcggctgccccgccagtccttggcccggccccggggtcccggcccgccgcccacggctccgctcggcctctgctgctccaccgcacccggctccgctccgcctcctgcctccacctccacctcctgcgccgcgtcgcccgctgctgggtctcggggccggagccgacgcaccacttacccgccgcaaagggatttacgtagcggacctcgtcactgattacggacgcgaggaggtggagacggcgagcccgaccgccgctcagcagcggcgccgccgcccagcaacccggagccggcagcggccccacgtagtcctcacgtcagctgtgatgcggtagccgcggcctccctgccgaccccggaccaaaagtagcgctgcagccgaccgaaccgcgtcctcccgccccgtcctcccctcccccacgccgggacggcctcccgggggaggccccgaggaaaaaaatccaggctcgaactccgccccctgccggccgccagcaggagtgaagcgccacaatccaacaatgaaatggaaccggggaggggcggcgggaaggtgcgggtcagggggcggggcctagggatagggagaaggaaggtcagggggcggggccaagaggaggaactagcctggaggtggggcggaaggtaggggcgggggcaaggctggaaaccggaagctgcccgtgccgcgccgcgcgtgcgccagaaatccaatgacttgtcagccagagtaacggctgttgtcaggtcttcagggtctcgaggtcggtttcttcctaacgccgccaaccccaagctaaggtccgcgagcgtctcacctctgtccaggctgggctgcagtggcgtggtctcggctctctgcaacctctatctccccaggctcaagcgatcctccggcctcagcctcctgagtagctgggactgcaggcgtgcttcttctgacttctaaaagctatctacataccttgactagtggcccttttcctccatattcacagccagtcacagctggttgagtccttctccaaaagaagcttgagctcctgagacaattcacctgcttcttagggtcatttattgcagtttatcccagtatttgactggaaatggtccgcatgctgggcccgctggctcgggcctgtaatcccaacacttcgggaggccaaggtgggaggatcgcttgagcccaggagaccagcctagggaacacagtgagacttcatctctttttttttttttagattagaaaggtcggccgggggctcacgcctgtaatcccagcattttgggaggcagacatgggcagatcacctgaggtcaggagcagcctggccaacatggtgaaaccccatctctactaaaaatacaaaaattagctaggagtggtggcagacgcctgtagtcccagctagttgggaggctgaggcaggagaatcgcttgaacctgggaggtcaaggctgcagtgagctgagatcgttccactgcactccagtctgggtgacagagcgaggctccatctcaaaaataaaaaaagtaatgggatatcaggaataaagaatagcagcatggttatagagtacagtaggtcctcacttaacgataggttcttagaaatcatggctttaagccaaacaacttacagcaggtccacaaaaaaattttcattcagtgttgttttcatttcgttataatattgatgataacaaaaatcggtttcattgtacgttgtttcactgaaaaccagtttctaagaagctattgacaatgttaagtgaggatttattatttcatatcagttactgtagtgtcagagtgttttcataattttcactgagcaggacttaatctaaatccaatctgaacctttgttcaaatctaattttcgtaggtcaaagggaatgtatccacaac

SEQ ID NO: 913536 - DNA, 4001 bp, Homo sapiens
tataatttatagctaaatacattaaaattgaagagatgtctcatagaacatattttcccaaatctcaccttctgtattaaacatagttgtgataatattaaataaacatagttgtactaaaactaatagtctttaattaactatgtagtattttaatcttaaacaataatcctttttagagagaaaagaaccaatgggcaattatgaattacaaaataattaaaaataaaaacatgtaaggataaaacaataaaaacgaaaacaaacaagtccactaagcactataaattaacaacaagcaaaatactggcaaatatttggttccacaattctaaaaaacaggtaaaaatttgctaaaatggtggctgggcatggtggctcatgcctgtaatcccagcactttgggagggctaggcaggtggatcacctgaggtcaggagtttgaggccagcttggtcaatatggtgaaactccatctctactaataatacaaaaattagctgggtgtggcggcacgcacctataatcccagctactcggaggctgaggcacaagaatcacttgaaccttggagacagaggttgcagtgagccaagattgtgccactacaatccagcctggacacagtgacactgtgtctcaaaaaaaaaaaaaattgctaaaatggagatatttaaatttacaaacaactaataatagcaggattattttcttttgaagttaaatatttctctgaaatctcctttatattatttagcaaactttgatagaaaagcaaatattatcccaacctgttttgaatatactgggatccaaattaataaaatattaatatatctattgtttttttaaaaaataggaccctccattaaaacaattttttttctaagagacaggatcttgctatgttacccaggctggtcttcttcccttttctctttttttttccccaggctggtctttaacacctggcctcaagcaattctcctaccttggcctctcaaagtgctgggattacagattaagccactgcacccggcctaaaaaaaattttttttagtaataaattgttttaatataaaattaaaaaaattagccgggtatggtggcaccctgtaatcccagctactcaggtggctgaggcaggagaatcccttgaacctgggaggcagaggttgcactgagccaagattgtgccattgcacaccagcctgggtaacagtgagactctgtctccaaaaaaaaaaaaaaaaaaattctaaaattttagttgtatccaattttcaaagacaaattacattgcagaggaagtgcactacccttgaaaaaatttttcatctcttctaaaaatagaatccaattggaaaaggaagttattaaagttgtttctattattttaaataactttacaaaaagtggaaaatcaattttctctttaggactacatccaactaacgaaacagaatgtctctgaaagtaatcaaaagaaaacttgaaaaattctatttggatatttttaaaacgttggtagagactttcttctgttttataaggttaagtacaagtatggccgaaaggccgggaggaagaataaaaccctggggattcttcgaattctacaattccacttaactatcgacatcctcatattggtctactttctaaacgaaaagactagtacttagcataagtcaactgacataccgacacatctcctacagtgcccagcatggtacacagtagatggtgccttaagtgaatggctgaataatttgagtatatattataatagaatatatatacatacatacatgtatgtgtacatctatatatcaatttattcatcatgaactttaagctaagtagaattttcaaaagaacagaaaaacgtacatctacctaccttggatttgtcttaatatattttttccttgcacatttgctcattgttaagatatttgtaatcaatgctttcctcctttcctgttttctttatttatcctgcagtaaaattataatgttgaattgggagatcgtaacatttcacttcaaaaactctcaaattaaattttatttaaattaaaacctctcaaaacaaggccaggaagaatattctaatttctataaaactaaaaataaaaaataactcccccccaccaaaaaaaaccaaaagactagaaagctaaaaacagccctgtacggttttttgtcaatcttacttctactgtatttttcttatcttcctagggaaaaaaattgacaaaacttaaatgataaactatttttctgattattttctactgaagagaaagcagtgctatctaaatcatctaatactaagtatagctcataggtatcagctctatttttaagaagttaatgatcacttaataaaattaatgaatttattatttccttatatttcactccaatgcaaaaaagttttcatttaccttaaattccaacttgggtttttgttaaaaaattaaactccaaacaaaataagtttattcaaaacgtccttctgatagccttcaatccattaaaaaacctagtttagacactgtagcaattaaactctctttattttttactaatatctttaaaaatatatatttgacatgtggaaagaagtaaaactggcaaagaaaaagacaaaagaacatttgagccagacatggtggctcacacctgtaatcccagcactgcgggaggctgaggtagcaggtttgcttgaatccaggagtttgagacaagccttggcaacacagtgagaccttgtctctacaagaaaactgaccaggtatggtggcacaggcctggactcccagctactcaggaggctgaggtgggagaatcacttgagcgcggaaagttgaggctgcaatgggccatgtttgcacctctgtactccagcctaggtgacagagcaagaccattcacagacctaaactcttttgagacagagtcccaaaaaaaaaaaaaaaaaaaactgagagtccttaatttcttttagagctggagaaaacaatcgtgctcatccctaagtaacctctagatacctctgccagcaacagcagtgcttagacagacacattgctttcagagttccctcctaagggttcttctaaatgatgtcatataatcctggtcaaatttggaactgtaggcagcaggcaggtttatcaaacctcactaagggcactaaggcgatggttactactgctaccatgtgcccccagcatagggacaagagacagtagggcatttgaacaggctcctcacaagaggaacaaaaagcagaactgatgccattctgacatcaaacctcattgtatgctacactagcattttacgtagggacatcttatgctccttaacaactgtataacccattagatgccaccccctcatactagacactggggcactgcaggagacagctctccaggagcctgcaatctaaaggcgggggcagatatgtcaacaaaataataatagcacttgaacaataatgataatcacagcactatatcatagaaaaaaggccaatttctgtatttcacttggaaatgttttatttgctgaataagtaatacattcttgtggttcaaaactttaaaactagaaaaaggtattcagagaagtccaggaacagccgcccgcttcctcttcctagaggtaactagcactgaagaaagcaccaacttccggccatgggagccacaagataccaaagagaaaaactagcctcatacccgaataatgacaagataaacttgaccctgactcaggatgatcagagacttacttcattccaactattctccacaaggtcaccaatgaacgcttgcctgcttgccaaatctaaaaggatgctttctagtccccatcttcctcaatacccctacagcatttccccctctatttgaaactttgtcctctttgaattctttatgacattactttcatgcttttcttccaaattatctagccttttg

SEQ ID NO: 913537 - DNA, 4001 bp, Homo sapiens
ggagtttgaacatccacctacattcagggatgggataaggtggaggattcaggctcaaatgagcagccacagagcaggttccccagactccctacacaccgtttcgaccttttccagagtccattagtacccaccggaaatggaaatgttctaattgtggtcctctgtgccatcatcaagaccctcaactcccttcattacctcttaaattgactttaggacctactgccagaaggatgttcttaaccaagtcagagagagagagagaacattttctcaagaaccatgctggaacagccaccatgttcccacttttccagcctccacctctcccccatggctgagggtgaggtactctgtgactctcaatgagctctaattcagtcttggacatctccagccccaagtcgtctgggttccaaatctccgtcaatcgcttatctcttcccacatgagttctcccctgactcaagaaaacactatagaactgtcccctgtcctgggaccctcttcccttcttttccacttggcttcacgtggaaagtcctgcacccatcccagaagacacctcaagtgcaactcaagaatgtgtcctgtcaggagaacggaagcatctcctgggatgtgcagaagccacactgggtgcacccaccagcagcagcagcggcggcggcggcggcggcggcggcggcggcggcggcagcagcagcaatattcattagtcattcctggaggaagcccccccagctctcaaccctaggagaatttccccgccactctgggaggcttccatccaggctgggatgactttggattcttgagttgctttctgcagaagcgggactaaccagggctcccaactactgtactgcaaagaagcgcgctgcattgctgggcatgcccccaagcccggcctggctgccccatcaaagcctccaagtgcccccacggggtcgaggaggactcagggttcccctggaatgcctgaagccggcttgcctcaggcagcctgaagggaagaccacacctcgtccagcataaggcggctagcagctacgccgcgcgcggggctggctcccggagctctctgccacccagcgctgtgcccgggaactcggcttcccaggggaggaagagccagcccgcggggctcttccccagcctggaagcgtaggcactcggccgaggccagtggcttcccaggcccgggtctcagcctggctgactgggagactctcccgatagcccggcacatccctcctcacccgctccgccccctccaggccccagaggccccctcccctgacagctgacctccagtgcgcccccaacactttctctgccagctgctggctgtcgcccccacacatcagctcccacctctccgccacctccaacccggccgccgcctcacccccagcccgcgggggaggctccgcgcgccaatcgagtccagcgcctcccagcaagttaggagcgaagccgccgccttcgcgatcccagtcttcccgggttcccgggcggcgtccccgccacccttgcgggcggatccgggggggcgcgcagagctggagaaactttctccgccttagggtggggggcaccggtgcagatactcacgccggggtcagcgctcggagccatcctcccgctctcggccccgccgcctaggggcgtgggaagcgggcgctcgctgccgcctctgccgccggcgccgccgcctgcttgctcccagccccggtcccgggctggcctcgagcctcccgccccgacgccgcgcgctcgctttatacaactccactcgagcgcgcccggtcttatgtaaaggctggcggaggcccgcagccaatggcgcggcagctggagccgggggcccggggtggggggcgccggcgcggccaatcgcggccccgagagcccggagagccgggcgtggggagggagcgcctccccgcgctgatttaggagccgggattgcggtggcagcagccggcagccaggctggcccggcgcggcgcggcggccactggggtgggcggcggcgaaggcggcggcgagggcgggcgccccccgcgccccgccactgcgtcgcgtaaccttcaggcggcagcgaggcctggcgaggaggggagagggcgcctggctgggcgctgggggccccaggccggagggaagcgagggtccctcgggaggcagcgcagggaaggaacgcgaagggggaggggagggcggcgagccccaggaccccgcggccacccctgcgcgcaggaccgagggtggaggcgggagcggctgcactgccttcccatttccccccaggatagcgatctggcgtcgccgggccgggccaaagcggccgagcgagccgcgctgatggcgagatttcgactacggagctagagccgagccgatctttatccagcctggggacgtgtccgagcacctcccggggactgctcagtatggagagcagggctccgcgacggcccccgcaggcggggagcgggcgagcgcagctcggagatcaggcgcgcagaggcccaggcggctgcgggcagcgccgcttctaccccaccccgtccccaccagcagtgcccccaccccatcccacctagtccctaccccagcagtggccgagtcgggcctggcccacccgctcctgccgcctgcgtcctactagcctccctcaccgctttgatcacaggtactgcccgcctctcctcgcccccaacccgctgccttggtggtggtggggggatggtttctgcctctctggaccaggggaatgggggtgctaagcgccagaaaaacacacttgatcagcaatgctcaaaatacccctgttcaggcaggaaactggccttggtgggtcacactctgaaggcaaatcctttattttacgcctagaatagagcctggcacatagtaggcgctcagtgtttattgaatgaattctgagcttccatgagtgaggtctttgggtttctgaaagccaggtaaaggggccacagaagagaaagacttgggaatccaccatcggagagggaaggagctaggactgttttcccatccgttgacgcttttgtgaccatcacccactagtctggcttctgggcccttgactcttagaatgatttgaatgtgttcttttatagagggccacacatccagcctctggcccctgttatccacagattttgagcagaactaccaggacctagtctgggctctgttttcaggtctctgtgatcttcctctgaaaagaaatagctaggcacagacaaactttctggctttttgagcccccatcaagcctgtaaggttgtgggcccctttgaaaatctggcaaaaattactgaatcatttttctagaaaaatatacaaacacacacatttacacacacacacacacacacacacacacacacacacacacacaccttgagtatactttcaggatcattaggaaccctgagtctcttggggctcggtccaatgtcaacctgtttcttcaggggtctaggacagtagtttataatcaccctccttttggggatcacagaccctttagaacctttcaagaatctcataaatgttatggatctgttgcttataaaaatgctcactcacatacacacatgttgacatgcaactttaggagggttcgtggatcattaaaacttaatctagggccctgattaagaaccttcatctatcggcaaatagactctgcccccaaggccatatctgatccccagctctctgcataaggagtccagttggctctgcaccctgctggaacatgccaccaccttgttctgagggcatctgagtcatctggccaaggctctggcacctgagagactgtctccacactttctctgcatcttggtccccgccaccctcttaatgtggaaataagttgcaggttgtcatattatgtctgatctatgagcattccttagccagaaactccaactcagggagacagcaagtgactg

SEQ ID NO: 913538 - DNA, 4001 bp, Homo sapiens
ataatagttatgcttttttaaaaccaaccttgaatgttatattagttaaaataacaaattctattacattaaaaaaaagatgactccatgttggttaaattttctgcctttggttggtaatggtatggttggtaatgactccatgttggtaattttctgcttatgccatgactcagtcattctatagctgacagaaatgcatacagatgctcaccaagacatttaatttacaagaatgtccacagtactcttttttttttcttttctttttgagaccgagtcaggctctgtcgtccaggctggagtgcagtggcacgatctcggctcactgcaacctccacctcccgcctcagcctcccaagtagctgggcttacaggcgcccgccaccacgcctggctaatttttgtatttttagtagagatgcggtttcaccatgtttgccaggctggtctcgaactcctgaccaagtgatccacctgcctcggcctccccaagcgctgggataaaaggcctgagccaccacgccaggcccacagtattcttaatatccaaaacacatcatatacaaaaattgggaacataaatgtccatcaactgaagagtagtcacatattattcaatagactattacacagtaataatacaataccatgaaatagcatgggtgtgtcccacaaacaatatgctgagaatactacgtgattccattaacatgaagctcaaaacagagaaaactaaaagcagataagagaagttagaatacagatgggaaaacaaggatataactgacttggaagaagcacaggaaaataggatgatggaaatgttctatggttataatttgatatatctggtggttccacagggtaataagtatgtaaaaattcattgagctgtacaattaagattcgtgctcttattgatttcatatgtattttatgcctcgacaaaaacaaagagaaaaatgcagcttctaaactggttggaactgtgtttatttaggccaaaatcctctgagccacaaatactggaaatccatcttttttcattcttttagttacatgacaactttaaacaaatggtacaagaacaataatacaaaatgaacgctaacactcagtcctaaaatacttggcttcttacttccaagatcgaagctactattttaatacaacattcaaaaaacaacattaattaccagacatgaaggccctgctcccgcgagccttgaatgacggtgaaacgtcacgacatcccatatctatctcaaaagcacgctagaaaatacctccaagtttaacaagccaaggactcaggaagagaagcttcagatgtataatcaaactatcataccgccaataccatcatcacaaacagaagtatcactgtcgtgcttcctgcgttgctcaagggtagagtcatttttaaggtgcattctccgacaacgccagaggctccccatctcctccgccccactgagccctccacgacagagcatctttaccggcgctcgctctgccatctacagataaagaggggctgagggcagaactattttaacgcgatgacgaggtcaccactgattaaaaagtttatccactgagaggagcagagatggtgatgaataggtaaaaacaaaacgaaacaaaacaaaacccaacactgacaagcgaaccaatcgtctctggccgcgctttccctaaaaccggtgccgactccggcaggctcatccctgagagacagggccccccgcaggaccggtccgctaggcgaccccacccgaccacacaggagcccgcagccccggcgcccgcaccgcccgggccggagccggcgggagtcgcggaccggcgggcgaggccgggccaggtactcaccgcgctcgcccgctctgcgctccaccgcctcctgcgccgcggggacacccgggcggcgcctcacgccttgggcccgccgccgcctcagccacccacccccgggcgcgccgccgcgcctgagaggccacttccggcgcgcgcgaggaaatgaagccgccgcgcgcccgcggccccgcccaggaagctccgccactggcagctgggtaccgattcatcaccgacgtgtttaaagtatccgtgtgtgtgcctccaaaaaccgtttgtggagacagcagagtgcccgaggcaggaaaccgctccggcctggaggcgcccctgcccggactcgtggactgcagcgctgtcccgctcggaagccgatcctgggagtccgagcggggccgcggggcctgcgtggcagccgagtcgagggcttcgggccgcggggctgtggagcgccccttggcgctgggccgccggcagccgtgagcgcatcactgcatttccctggaggaattcctcatctgttgaatgagggagttgaggcggacacgctgggaaatggcttcgagctcacacactgattttcgtgagtggaaagagaagccctttcttaggcgtcttccataccactgcatgttccagggtcctccctgggctctctgtctcccacgccaccgcgagcacggcctaagcgggcgagcgaaggcgcgacggcgccgagagccggctgtggtgggtgccgggcgcgtcaccgcgggctggcgggggaggggacgctgggaagctctccagaaagaggagccgccaccgagcaaattcccatctgccacgcaccgcagagcctcgccctccgccgccagcattttctttctttgttctcctagccctacaaacgctgggtttcctttctcattcgtggacttttttccctggatccttcttactgctcctaccctgtggccgcacgtctggcagatgcgcggcgggcgctgcctgaacccccgaatcctcacaagcctctgtgcagcggccacggccctcagctagcggcggggagactgaagccgcagggtcagggttagttgccacatgttttaaattcctatccaaacttccattataattgtttttatttatttattcatctattttttgagacagggtcccgctctgtcgcccaggctggagtgcagtggagcgatcacggttcactgcagcctccccacctccgactccagcgatcctctcgcctcagcctcccgagtagctgggaccacaggtgcatgccaccatgcccggctaattgttaatattttttttggtagagatggggcctccctctgttgcctaggctggccttgaactcctgggctcaagcgatcttccagcttcggcctcccaaagtgctggcattacaggcgtgagtcaccccgcctggcaagaattgttgttttgaaactaactgaggttctcccatcaatggatttaaattgttactttttaatgatttttttttaagtagccaaatactaaatgtatgtaatttgaatgtggagagaagataatgcatgattcaaattatgtggctgatcatgggtgatacactgggatatagttgtaaaataagtagttctcctagggaaaatattaaagtacaactgtgttgggtttaatatcagaaaaatgtaattaaaaacatttcctgccaataatttccaatctgatacttaaacaaaacaaaacaataaaagtttcccatctctttcgggccttttaaatttctaccaaaagtaagtgatgctggctgattcccctgctatagcaagttgtgaataaatagcctttgctggtttccacagttttcctggtgatcccatggtaagtctgtactgcttgtccctgaggtccccaggcttccacccattgtgccacccagaggcccctcatgcctccatgttctcggcctatcaggtgcgccgatgtggtcagcactagggctcacctcactctgcgtggaggtctctggctatttattctcagtttggtactctggttttgttattgattctcatttgtctggcatctctagtggaatcaggccattctttttatcccttttcactgtattttgtgttagtgtt

SEQ ID NO: 913539 - DNA, 4001 bp, Homo sapiens
aaccctaatccaagtgtggggatacagaagtcagctttttgcacccattctccatgctacagaataaaatttgagactacagccaaatattttctaaaacctttcaagacgctccagtggatttctggatttgttcctttaaaatcaggatactctgcctttgctcagggggcagcatggcaatctgatctgcagtcagttgaagaacctgcatgatcaaagctgccttctcctgatcctgtggagtgacctggctctgcccaggactaaaactgctaggctggcttccaccttgcttgcttgccccctgtatacctcctccttgtatacctcctccttgtatactgactccttgtatgcctgccccctgcatccctcctccttgtatgcctgctccctgcatgcctgttccttgtatgcctgtaccctgcataccagctccaggattccccacccctgaaatgcctgggacctgtctgggtccctgaggagggccacctgcccctatattaatgggaccaggaccctgaattccaccagtcatagggcctcttgaactggggacagggcccctcatctccaatcctcttgcatccatgccccttgcttccatccctctggtttccatcgcacaggtctccattcctctcctctccattacacgtgtctctaagacctcagtttccatggcacgagtctccatcgctcgagaatctctaccacctctaccatccataggtagacccctttgatctatcatggggcctctgggctctccaattagcagtctgggatctcctaatggccctcccctcatctcatgtgaggaagggccacgagtgtcatgaccagaggcatgatgcatggggggaccctgatggggtggacccagataacctctgggctccacttctccagtgactgaaagcaaagtccctccacgtgggtcatttggagcatctcctaacagtcctcgaggaggcagaccaccaggagtcacgggtccgcgaggtataggagctctaggatctgacatctgcacttgtccccgctctaaaggcactgggccaacccctggcattccaagttggggctgcattgctcctccaggagttaaggaaccaggaccagctccgggaactgcagctggtattggccctggagctggaattccaccctggataggagtctgcatcagaggaggaatgtccttcacaggtcttctagccaaatgctgaggctgaggagctggaggattctgctggttcagcagaacattaggtcctgggcagagcccagggccagggccagggccagggccagagacagacacagactgagatttgcctgggatcagtggtgtgacatgtatcttccgatgcagaattttcagagcaatctctggatccatgattctcatcactacttgtgcctgcaacagtgcataagccagttgtggattttgaagtaacatgtttcgagcttcctggtggctgttttggacacagagcttcatctgcttcatcagctcaaacatctgctccggggggagactggctactgctctggtaatcgattcaggggcatcttctggatcgatgggatccccatagggtgagtcaataatgggcgctgcaggcccaaggctctttaactcctccttattcttttcactggcagcattgtccacccgaagcgctctcccactgaactcccgcccattgaggttccgcatggcactaagcgcggtctcctggtcttggtattcgcagaagccatagcccttgggttttcccgtctctctatcgtataccagccggaaactgacaacagaaccaacctccgagaaaatgtcctttaactgctcctcagttgcctcatatggaatgttccccacgaacacggaacgcagtgatcgatccattgccgggtctctcaccgccaaactcgacatgattccggttgtgcagacagccgatagcggattcttcgaggcgtctgtcctcttgcgaccgacacttccgctgagcaacggaagcggctttcaagatccgggcagaaactttactaattcgcttgaatcgttccgcttgcctgtggaacctgcatcccactaacaacttatctaatgctttcagtccctgatccttcatggttctgtcagcttcttattacagagtcgcatgattcctttcccatttcacgttccgctgactttctgtggggccccaacagccccactacgacacgcttggtacgagatgaccacagtaaagatggccgcatagacttcaccgtagtaactgggaggggactcttcccttgacgtcaaaggcggttttgcttccgttccgctggcgggaaaccgccaaccgaaagcggatttaaggcggcgtgtttttcgttctgacaaagtattttcatgtggccttttattatagtatagttaagctagatttaaaatcacattccagactgagggaaaagcgtagtcgtttcagcacatttgagatttgccccttaaactaaaacagtattatatctcctttttagaacaacgtttttggaaattaactgacaagaaatataaactgaagcgtgtgccggctgggccctgcccccattctgttgcttcctataaccgctgttaatggatgggtggcagacccttctaggtttttcctgagcacacgggcagccgtcgtgctattcctaatattacggttttcttccttaataacaaccgatttcaatattaattggtgattaaataaattagtgattaattagttattagtattttatggcttcagagtatggaataaagaaatttacttaactatccctacgttgattggttctgatttttattatatcatgcagtgagtccaccacttccatgaagggagaaacaaatagcgggtgtttgtcttctgctgttagctttgcaggtaggagttaaaacatattcagtgtggtgtttccccgcctgcaattcgaagctagaactgaagcttggagagggctaggtaaattcccaaggacaagcagctggaaagaggccaagtcaggattctaacccagcttggtctcgcatagctccaattctacactgccttacgtgtattgaatatatgaaatgaagctagtgtgattgaagaaatgaattttaaatctcattttttatttaaatataaaaactaatgttcagtaagctattggaaaacttttttagtatttagaacaacttggatatagaatctacttttgcaataataaattgtgttctaaataaaaatcattttgaagaacactaagacaaaaaataaaaacaaataaaaagaaagtatttccagtcaaaatttaacatactggttgaggtgtgccatacatgtaacatacatgaaagattttaatgatcaaatacaaaaaaagtaaaaatagcccatcaattttatattttttataagtcgaaatgtaatatttttatatatttgagtaaaaaattattttgaagttaatgttattcatttcattttacttttttaaatgtggctattagaaaatttaaaattatatggatagattgcattatacttctgtggactggactgctccaagcctgtgctttaattccaaaacagagaattattttattctgaaatatgcctcttaagtggattatgaaacttttaaatttcagcaaaaaaattgtattatgtatcttcagtatcctattccaatgaatagatttgacatgagtatgatggtttagctgcaaataagacatccatttaccttcaagtttttgaaacagttctgcacttagctgttcacccaagatgcgcgacagtttatatttgcaagtgacaaggttcatttacatcacctaataagattttcctgctatgtcaaagaaacggaatagtcacctgctagcaatgtttccccagtgtgattcttttattggggacgaaaggggaggggttaaggatagtatc

SEQ ID NO: 913540 - DNA, 4001 bp, Homo sapiens
cggctcccgcgcgcctctgcccaactcgcccggggcgctgggggcagcgcgagggagagaaagaaaggcgcttcccctcggccgcgcggggccgtccggcgccgcggagggctgggaggaggaggaaccgcggcggcccggctgtccctgcgccgcaccgggtccctgccgcccggggcgcgccctagccagcccctcctgctaaactttttctttttgattcgccccacccgaaaagtgcggcccgggcggggaaggtgggggaggcgggcgggccgggctcccggcggcggcgggcgaggaggaagtggtgcccgcgggagcgcggccgggcagaggaaatgcccggcccgcccggcccccgcccgcgcccgccgcccggcccgcccaggccccccgccccgccgcgactttggcgggccgagccccgcgcggcagtggcggcggcggcagcggcagcagatgtggcccggctgcccggaggagccaacaatgcggggccggcaaaacaaaagggttccacttcgcctcctttcccgtctttcacttgcgctcccggggagccgcgcgggatcccccgccggcaggggcagcgcccctggggaccgagagccgctcacgccccgacttccccacggaacccctcttctccgcgccccccccaccctcgcctcgtaggcgcaaggcccgccgcaccccggcgcgctcggactcctgttccccggagatccggccgtattgtccccgcggcgcgtcgcgcgctcggcctgggtcgccggcggcccccgggcgcgcacccaccgggctcagggagcaggagccgggggcgcccagggaaccgtcgccgagacgccgccgccgccgccgccgctgccctccggacgccgccgcgctcggggtttctttttttttttttttcaaccctgatgggaaggaaggtgaccgcctacttcgcattcatcaactctcatcacaacaacaaaaatcctggcgcaaacggcggccagcgggcgcaatcggtggcgggggcgggcggggacccccgagccagcgtccacccccgggcgccgaggggggacacgaggccgggggcacggaccaaagatgtcctcggatgccggctccgcgtccttcgccctcttcctcctcctcctcctcctccctgagtggcgcagtgaggcgcgggcgcggcgcccccagcccgcggccgcaggtgaggcgggggcggcggcggccccagccctcccccggggccccccttacctcgtcccggacggtcggcgtccacggcgaaaggcgcccaccctggaggcggcggcggcggcgtctcccgcccctcccaccccacccggcggcggtggcggtggcggcggctgtgcggccccccctcagcgcggcatggctcccggttcggtccctcgctcctcgggccgccgccggctcctccgggccgctcccgagccaccttaaaatgacacacgcacacagggacacacacacaaaaacttaatctctccagctccccgcccctccccctcccgccctccccaccctccctccgctcccctcccctccccaccctacccctcccttcccttccacctcctcccctcgccgccgagcctcttcctacttccccacccaccccacccccttcctccgcccacccggttcccaattccccccgcgtcccggccccgcgccctcccgcccgccgagagggggctgcgctgggggtccccggcccgggcccgccccgcgccgcgctcacccccgagaggatgctaattccaacttggatcgggggagggaacgtcctggatgccgagcgcctcccggctatttgctcttctttatttgttttctcctccggggaaggagaaggaaaacggagagaaaaggaaaggaaagaagcggcgctggccgcagctcccggtacccgctggctgcgcaggagctaggcgggaggcgaggtgagggtcgccgctcgctcactcctcgctcctgtttttggggggggggggcaaaggcggggtctctttttgcaaaccaatgacacaaccccacatgggccggcctcgcccccttcagatactcctcactacaaatcggctctctcgggggattagtggctccgcgaaagtgcacacaagcgcggcgggcgggagggccaggggccgggcgcggcgggcactccctagcccggccccgcccgggaggccctcgggaggcgcgggggcctcggtggcaggggccgaggtcctgtcgcggtggctcggggtccgctgctcccctggcccttcatcctcctccgccccttccacgtggggtaccgggcagccggccacgtgggggaacgcgagccccgggtggccccggtcccatggggccccgcccagccagcggcgccaaccagcccccttcccggcccccgggctccaacttcctcctggtgccccgcaccggccgcttctgccttctcaggcccgcggggtcaggcgcgggccggccacagggggcacttgcgctccccaaatccagatccgggagaccgtgccggagaggcggcgaccgctgtgggtgcgcagggaagggccctctgtgctgcaagttgcagcagtgctgtgccctaaaagaagcaaaacattcttacacattgaaaaaaaaaaaaaaggttccctcttgctgcctggatctcgccggggcatttgagaagccctgtgttgggtcggagccccgggtctcgaggagggaggcgcgctgcggcgtgggggcccgcgactcggggtcctgggcttgcgcggcggcccggagcccacgccgtcctgacgtctcaaggttggagtctgcacagcgagcctgggaatccaggcccagcggccgctcgcggcccaacgagcacctgggctaaattccccgcccgtgacccgcgacgtccgagcgccgtctccggaagggagctggtggccgtggagtgtggggtcttctccctgcgccccagggccccccaaactcttctcactaccctgagttcggcgtgcgtcctccaagaatccctgggtgggctgaactgagcccttaggatcgatttgtttaaaaaccctattgagatattaggagctggattgagatgtcgagcaggaaaggagtgggaggggtctgaggtcccgcctttggaggccgcagggaccgccattccgcgaacccagccgcgcggtgtggtctcctccatccctgagtgccccgcgccctgcagagccgaggaaacttacagccagggccagggggccggaggagaggccaccgagctgcacgacccttttctgcatcccaaagagcgttgctccaggcctcccagtcttcattaaacatttcttaaatcctgccccagcccgccgcggggcttgtttgccaaagcgcaccaggtgcgttgcggcctgagcggcctgcagtggaggggccgggactatcgaagattgcttaatcactcaacaagattttaaaacgtgattgaagaccgcctacctgtgagggcagcgccgaccaggcttttcttgcccgctagtccacgtaatgcggtcgctaagaagcccgcagcagggttttcgcgtgaccttcatagggcctggccaggccagctgaggggcgcgccgggctgcgcttccatcgaggaacctccgcacatgcaatcacggttgtctcgtcttctggcaaccctggatctccacaaactgatcttcagggtgcttctctcttcagcagttttgcctcaagggcatggcgcctcagctagtttttggctgtaaacaaaccgcggccaccgccaggctaccgggttaccagtacctgttcttcggagtttcttaggcataaactataagaactacaaataaagattttctgcttccttatttcacagaagtctttggttctgagtggtcttcttttctcaggaagaaaccacaaaaagcctgattttccatatcactccttcactttca

SEQ ID NO: 913541 - DNA, 4001 bp, Homo sapiens
gtctatccttccagccactcgcatcagactctctaagaacttaacccgatctccaatctttaaagaaaaaagggggtaaatacacagaaggattgtttaccccggacagggcaaggaagcccggtatgacgacgtaggccattgccagcagcctccaccacgagcacgcagagcggggatttctacgaaaaattcctcctcttccctataaaatcctaaacgtggggtcctctgcagccaactgccgcttgggccgcctccggaaaaagtaccgggcggggggaggggggacaaccacaaacactcgcgcgcacacgctcactccgtgtccgcgaccgtcgtcgccggcggaaagcgagccacgggagggagtgtgtgcgcgcgtgtgtgtctcggcgcggcccgcggtgaccgagctgagctcttgggcccgcggcctccgagccccagggcgcggcgtgggctgcaggcgacccgccacgccgctgggcctcccgcgggagaaaggcccaggcacgccccggctcccgcgcgcctctgcccaactcgcccggggcgctgggggcagcgcgagggagagaaagaaaggcgcttcccctcggccgcgcggggccgtccggcgccgcggagggctgggaggaggaggaaccgcggcggcccggctgtccctgcgccgcaccgggtccctgccgcccggggcgcgccctagccagcccctcctgctaaactttttctttttgattcgccccacccgaaaagtgcggcccgggcggggaaggtgggggaggcgggcgggccgggctcccggcggcggcgggcgaggaggaagtggtgcccgcgggagcgcggccgggcagaggaaatgcccggcccgcccggcccccgcccgcgcccgccgcccggcccgcccaggccccccgccccgccgcgactttggcgggccgagccccgcgcggcagtggcggcggcggcagcggcagcagatgtggcccggctgcccggaggagccaacaatgcggggccggcaaaacaaaagggttccacttcgcctcctttcccgtctttcacttgcgctcccggggagccgcgcgggatcccccgccggcaggggcagcgcccctggggaccgagagccgctcacgccccgacttccccacggaacccctcttctccgcgccccccccaccctcgcctcgtaggcgcaaggcccgccgcaccccggcgcgctcggactcctgttccccggagatccggccgtattgtccccgcggcgcgtcgcgcgctcggcctgggtcgccggcggcccccgggcgcgcacccaccgggctcagggagcaggagccgggggcgcccagggaaccgtcgccgagacgccgccgccgccgccgccgctgccctccggacgccgccgcgctcggggtttctttttttttttttttcaaccctgatgggaaggaaggtgaccgcctacttcgcattcatcaactctcatcacaacaacaaaaatcctggcgcaaacggcggccagcgggcgcaatcggtggcgggggcgggcggggacccccgagccagcgtccacccccgggcgccgaggggggacacgaggccgggggcacggaccaaagatgtcctcggatgccggctccgcgtccttcgccctcttcctcctcctcctcctcctccctgagtggcgcagtgaggcgcgggcgcggcgcccccagcccgcggccgcaggtgaggcgggggcggcggcggccccagccctcccccggggccccccttacctcgtcccggacggtcggcgtccacggcgaaaggcgcccaccctggaggcggcggcggcggcgtctcccgcccctcccaccccacccggcggcggtggcggtggcggcggctgtgcggccccccctcagcgcggcatggctcccggttcggtccctcgctcctcgggccgccgccggctcctccgggccgctcccgagccaccttaaaatgacacacgcacacagggacacacacacaaaaacttaatctctccagctccccgcccctccccctcccgccctccccaccctccctccgctcccctcccctccccaccctacccctcccttcccttccacctcctcccctcgccgccgagcctcttcctacttccccacccaccccacccccttcctccgcccacccggttcccaattccccccgcgtcccggccccgcgccctcccgcccgccgagagggggctgcgctgggggtccccggcccgggcccgccccgcgccgcgctcacccccgagaggatgctaattccaacttggatcgggggagggaacgtcctggatgccgagcgcctcccggctatttgctcttctttatttgttttctcctccggggaaggagaaggaaaacggagagaaaaggaaaggaaagaagcggcgctggccgcagctcccggtacccgctggctgcgcaggagctaggcgggaggcgaggtgagggtcgccgctcgctcactcctcgctcctgtttttggggggggggggcaaaggcggggtctctttttgcaaaccaatgacacaaccccacatgggccggcctcgcccccttcagatactcctcactacaaatcggctctctcgggggattagtggctccgcgaaagtgcacacaagcgcggcgggcgggagggccaggggccgggcgcggcgggcactccctagcccggccccgcccgggaggccctcgggaggcgcgggggcctcggtggcaggggccgaggtcctgtcgcggtggctcggggtccgctgctcccctggcccttcatcctcctccgccccttccacgtggggtaccgggcagccggccacgtgggggaacgcgagccccgggtggccccggtcccatggggccccgcccagccagcggcgccaaccagcccccttcccggcccccgggctccaacttcctcctggtgccccgcaccggccgcttctgccttctcaggcccgcggggtcaggcgcgggccggccacagggggcacttgcgctccccaaatccagatccgggagaccgtgccggagaggcggcgaccgctgtgggtgcgcagggaagggccctctgtgctgcaagttgcagcagtgctgtgccctaaaagaagcaaaacattcttacacattgaaaaaaaaaaaaaaggttccctcttgctgcctggatctcgccggggcatttgagaagccctgtgttgggtcggagccccgggtctcgaggagggaggcgcgctgcggcgtgggggcccgcgactcggggtcctgggcttgcgcggcggcccggagcccacgccgtcctgacgtctcaaggttggagtctgcacagcgagcctgggaatccaggcccagcggccgctcgcggcccaacgagcacctgggctaaattccccgcccgtgacccgcgacgtccgagcgccgtctccggaagggagctggtggccgtggagtgtggggtcttctccctgcgccccagggccccccaaactcttctcactaccctgagttcggcgtgcgtcctccaagaatccctgggtgggctgaactgagcccttaggatcgatttgtttaaaaaccctattgagatattaggagctggattgagatgtcgagcaggaaaggagtgggaggggtctgaggtcccgcctttggaggccgcagggaccgccattccgcgaacccagccgcgcggtgtggtctcctccatccctgagtgccccgcgccctgcagagccgaggaaacttacagccagggccagggggccggaggagaggccaccgagctgcacgacccttttctgcatcccaaagagcgttgctccaggcctcccagtcttcattaaacatttcttaaatcctgccccagcccgccgcggggcttgtttgccaaagcgcaccaggtgcgttgcggcctgagcggcctgcagtggaggggccgggactatcgaagattgc

SEQ ID NO: 913542 - DNA, 4001 bp, Homo sapiens
agtaaaatttctggagttttaaaagttaagactgaagttattgattattctctgaaagggtaactgacaaactagttaataattatacagatagcaagttttaccgtttcatcttgtgtacacgaccagattaacaatggcagggaaagcacacacaacttggcagggacaggaacaggtgtgccccgactctcaaaaggccaaaatatctcaccaagtatgtcactggcgtgttttttacaatggcagtagtgtttgtttttaactagccaaacgttcttactttcttaactttagagagatgtactttacgaatatctttctcttcacggaattgatgattcagttccacacataaattgcaactcgtgcaaggaaatgatttttagggacaatgaggctttttaaaatcagttaagaaaaggtaattcaccctgcccctccccgcaggagaacacccattcaagggtcagtttcaaagctcccaggcgaaaccgtaaataactcacagggttctgcattcaacctgcagactcttattaaggtacaattagagagggggttgtcaggtgggggttaaaaaaaaaaaaagagcgggggggagtcggtattctttaccttatctttctgaacaggaaaaagaattaaacccaaaccacctagtcaggttcaaaacaagctccaaacccaagatcttttaattccctctaataactgctttccacagggatgtaactggggtcccctacccctggggcacaaaaaaccaatcagcgccataaattccctttgccttcaaccctctctcccttttacaggggggcagggtagggggagggggtgacccaacatcaacacttacactctacagaaatatgctggcttatttcctttgtttgctcatgttatacttgatcaagtgtgaacgattaaactggtttcattaaaggcaagtgcattcacggctaacatccaacttcaatggcaactgtaagcatattttgcaagaaagagggcctgtttttttgcttgaaatctaccatctcattaacttttcttttgggggcaataaaaagggcactaggggtttttcaggagaatgtcagagcagttcagagatctgatgccagacaaaagaatatttagcgtttcaactctacgatacagtctctgctaaagaaaaaaattctgtttcaacattaaagcagctatgactgaaaatgtctaattagcattttgactattactttataattgctgtaagaagtatcctttgaaatcaagtgattacaaaaacaagatcctttaaagtctcattacttcaaaatagaaaagatttatatttaaaaaaaaaggggggggttaaaaacctcagaattctcaaagtacatgaaaactacccacttctacttggaaaaccctcgaggcaaaacagcaatcttaggtactgaacacgaggtaatttttaaactgtcttcgaacccaaacacctagtagagaaagctatcttttttgaaagggtggtatgagtcgatatatttcgcccaagttagaaaggcagaaagaatcactttgtaaacttccccaaaatataacgtcccctcaaaattatccatgtcagataaaaatataccagtctctagaatatccaacagaattgcaaataaggcgtttagcattttaaattcccaatgcatatttatagaatagaattctcttgtctatccttccagccactcgcatcagactctctaagaacttaacccgatctccaatctttaaagaaaaaagggggtaaatacacagaaggattgtttaccccggacagggcaaggaagcccggtatgacgacgtaggccattgccagcagcctccaccacgagcacgcagagcggggatttctacgaaaaattcctcctcttccctataaaatcctaaacgtggggtcctctgcagccaactgccgcttgggccgcctccggaaaaagtaccgggcggggggaggggggacaaccacaaacactcgcgcgcacacgctcactccgtgtccgcgaccgtcgtcgccggcggaaagcgagccacgggagggagtgtgtgcgcgcgtgtgtgtctcggcgcggcccgcggtgaccgagctgagctcttgggcccgcggcctccgagccccagggcgcggcgtgggctgcaggcgacccgccacgccgctgggcctcccgcgggagaaaggcccaggcacgccccggctcccgcgcgcctctgcccaactcgcccggggcgctgggggcagcgcgagggagagaaagaaaggcgcttcccctcggccgcgcggggccgtccggcgccgcggagggctgggaggaggaggaaccgcggcggcccggctgtccctgcgccgcaccgggtccctgccgcccggggcgcgccctagccagcccctcctgctaaactttttctttttgattcgccccacccgaaaagtgcggcccgggcggggaaggtgggggaggcgggcgggccgggctcccggcggcggcgggcgaggaggaagtggtgcccgcgggagcgcggccgggcagaggaaatgcccggcccgcccggcccccgcccgcgcccgccgcccggcccgcccaggccccccgccccgccgcgactttggcgggccgagccccgcgcggcagtggcggcggcggcagcggcagcagatgtggcccggctgcccggaggagccaacaatgcggggccggcaaaacaaaagggttccacttcgcctcctttcccgtctttcacttgcgctcccggggagccgcgcgggatcccccgccggcaggggcagcgcccctggggaccgagagccgctcacgccccgacttccccacggaacccctcttctccgcgccccccccaccctcgcctcgtaggcgcaaggcccgccgcaccccggcgcgctcggactcctgttccccggagatccggccgtattgtccccgcggcgcgtcgcgcgctcggcctgggtcgccggcggcccccgggcgcgcacccaccgggctcagggagcaggagccgggggcgcccagggaaccgtcgccgagacgccgccgccgccgccgccgctgccctccggacgccgccgcgctcggggtttctttttttttttttttcaaccctgatgggaaggaaggtgaccgcctacttcgcattcatcaactctcatcacaacaacaaaaatcctggcgcaaacggcggccagcgggcgcaatcggtggcgggggcgggcggggacccccgagccagcgtccacccccgggcgccgaggggggacacgaggccgggggcacggaccaaagatgtcctcggatgccggctccgcgtccttcgccctcttcctcctcctcctcctcctccctgagtggcgcagtgaggcgcgggcgcggcgcccccagcccgcggccgcaggtgaggcgggggcggcggcggccccagccctcccccggggccccccttacctcgtcccggacggtcggcgtccacggcgaaaggcgcccaccctggaggcggcggcggcggcgtctcccgcccctcccaccccacccggcggcggtggcggtggcggcggctgtgcggccccccctcagcgcggcatggctcccggttcggtccctcgctcctcgggccgccgccggctcctccgggccgctcccgagccaccttaaaatgacacacgcacacagggacacacacacaaaaacttaatctctccagctccccgcccctccccctcccgccctccccaccctccctccgctcccctcccctccccaccctacccctcccttcccttccacctcctcccctcgccgccgagcctcttcctacttccccacccaccccacccccttcctccgcccacccggttcccaattccccccgcgtcccggccccgcgccctcccgcccgccgagagggggctgcgctgggggtccccggcccgggcccgccccgcg

SEQ ID NO: 913543 - DNA, 4001 bp, Homo sapiens
ggcctgacacacaaatctgattaacttaagagaagccgtgtcaactggccacagtgctgcgtccttcttgtttggtggtgtgtgtgtgtgtggcctggtgagtgaggacttgccatcctatgttcaaacttctacaaccccgcacccccctgctccccccaggtccccaggcagggcaggcggggaggatgtattacttggttctggtgcaagcatggtggacacgatgatgggtgcccctgtgcgccgggccaccttctggtacggtgagtgaggcgtgtggaggctctggctggccggcggcagggtggatggccccaggggtgcacctggcttccgcaagacctgggggctgccgtgagggctgggcagcggagaggcggccacgttgcgctccctctttagcagctccatgggcaccgtgtatgccgtggagtaggctgttctggggcctgggtgaagggggtttgaggggcccgggttagtcaaggccacccctgcctgcagggggtacgtggggctcagacgcgctgtcagggcgcaaggggtgggagagctgtacccggagttggaggggaagtgtggggcatgggtgcccacgccaggggcagaataggtggctgccgtctccaggaggtgctgagatggtgcgctggagggacggcgagccgggtctccagctcggggggatgctgtctgcagaggagccgcagcgcccagagaagccaagtcaccatggagcagttcgcttcggtggctgaagctgctggaccgcgcccggggcagcgggcccccccggtcctgcctccgcagctgcatttcggtcctgcagctattggccaggcggctcagaacacgggcctggcccaggttgggtgcgacagacttgatatccgcgtcctccagggtagccaggacggccggggagtcaaagccctgctgcagtagggctcccagcgtggcctctgccagcccctccgcccgcagaaaggccaggaactcagggagcacggtcctcttgccaccaggaccctggaaggtggacaggtcagcttcgtaagtctcgtaagccatcttggatgggatgctttcccgggcaggcccgtagccacgattcagggcccctggggccacccctgtgctgccttcgggggcagcagctgaactggggtccacaaccaggcacgtcggggccacctgtctggcaggggcagggtcaatgggtctttcgctgatgtcgctgaagacctggctgagggggtaggcaggcacctccgccccatacctggtgtcgggctgctcccgtccataccgcccgggagatgcagccctgctctgtgtctgccgcccctgagggatcattttacctccaggatcccggtacaggtgaccggcgtcctgcagggcaggtgaccggccttgcattggatcccatgacgttctgctgccaagcactccgtagctggggaccggccggctgactcctgggtcccgatagaggggaggctctttgggtaccctagcagctccagacggatcactgtagtactcccgtggcagcagggggctgcgaccagacatcactgcctgtctgctgtcgtagaaggtgaagtcaggagtagacccctttcttgcagccactgagttataaacggcctcccggtacaggtagggctcggcggccacgggcagggcagcgtcctgtggtcggtggtttggctcaaaccaagtcccctctgctgtgccatacgtcagggagcttctcctccccagaggccgcagggactcggcgttctcccaggggccctcgtaccacccagcagcatcccagctctgagaacgaccaatatttatatgcctgctgggaactggcattggaaaaaaaatgactgcggatgaggcagaggagaagcttttctttataaatcttcaattacatacatcaaaaacagacctggctgtgtgctaacccttccgagacggcagggacaaccaactgggggttttctgtttcaaagcatggcctgaattattaatcctccgaaaccttagcagacaaaacataagactcacggtaactttgcctcactccccaacgatagccagagaggtctgttccttacagctcagtcccggagaggaggctgtccccagcctgccaggtcccccttcctggctggtgtgctcacatggaccagggctctctcagcatgcggattaggagctaaataaaaccctaaagctttgttccatgtgacatctcgttagactgatgaagccggtggcttgctctatccagccctcccaagctgcaactgggatttacttccacactgacgctcaggtttatactccctcttccaagcaccagggtacttttaggatgaaccctgcctccccctctggaaggggctgttcccacccctgccactgattcctgagaggtaacagaagcaaaataaggctgcttcaatgtcagtccactcttaatccaccgtgatgaaacgttaatccatggcacagctaaacacaaattaaacatggataaacagaaaaaggtccacacgtgatcctaggccatggatgcctagcccaaaaaagggccagctctgaaacctgatgctttgataatactgagatctggctttgagacgactctttggttgtgaatcaaacaggtttccgagctcaagcccaaatgcattctttaccttattactgtgaaacacagatgggctcatgctgccggggggccggggagtgccagggaagggcgtgtgtaatctgggatttaaagtgactgcaacagaggtcacaggaacaggaggatgggtgactaaaccttacactgcaaagcagaactgggaagcggctgcatctgaatatctcatcttcctttaggtatgtcaggatgaaaagcctaattccagcaggcttagatcctgcagatgcttttccatattcacatggattaagctttcagagtccacaaaggacttcaggcgcaataatgcaaagaacagcagttatttagataaaggagtgccccgaagtattaagacatttccttaaacatatggaacagtaccagagaagcaacatcccagactaacacggtaggttcctgccctgcaactgcaggattcccatgacaaagaattcatagcaaaaataaaagccggtgattaggaagctacaaaggctgtatacattgaaagcactttaaaatgagacaacatgcatacctgcaagcattaaacccgagtgctgttcctcactcacatctctctcaatctagcactctactagaatcttctaaagagaaataccagtctttaaattttttttttttgagacacagtttttttttttttttgagaccgagttttgctcgtttctcaggctggagtgcaatggcgcgatctcggctcactgcagtctccgcctcctgggttcaagcaattctcctgcctcagcctcacaagtagctgggattacaggtgtgcaccaccacacccagctaatttttatatttttagtagagcctaccatgtctctactctatctacttcaccatgttggccagactggtctcaaactcctgacctcaggtgatccacccacctcagcctcccaaggtgctgggattacaggcatgagccactgcgcctggccagcgcctcaggattaagccaccttgccaatttctttcctccccttgttgtaatgaacaacatgaccttatgtggtgttagtactatgctaccccactcatggtgcatgcacacccctcaaagatgggtggataaacttggagcattccgggaaaatcccccatgccaagtcttttttgtagcagggtgaggtagctctgttgactcaccagcttctttgctatctggttttcagctcagcaagttctcaaatgtaaacagggctctatagaagaatgtttacccggtagcgcctaagaaaccagtaatgattcttcagagaggtta

SEQ ID NO: 913544 - DNA, 4001 bp, Homo sapiens
tgaccttacttttaacaacgaataaaaaagagccaaatgactgtccctggctcatcatgttaatatcagaagacaacactgaaaatccttcgcaaattttaactactaccctcttgtcttttttcaattctgctctctgacagcagcgagtttctaagctagttcacttagacaagcccagtttagtgagtacaaggcccagagtccagaatcttcaacatagtaggtgtcctgcgagtatgtgaagatgaaagtacattataaagtcctgtctctggtttccttctttctacccaacaactttttttacaagttagatcaatccagttaattttgaccttactgaagttgaaattcaagttaaatttactgctagattaaaagtgtgaaaagaaggaaagtagctaatcccatttacaacaatttattttttaaaattgtaggactagtattcatacatttatacaaaattgctaaatatattttattttaaacattgtcttgatcatgtctgttctattatgtagatattttatcttatttagatcactctggtgtttccaaaaaactaagcttctttaatctctcttctgaactaaccaaatttttttctgaacatttggggccacatttactttcacataagttagtgtgtgggttaaaagggcagcatttcttcactatttttcaccaaaacacgagtgacatttaaagcatatttaatatttataatctaatatactctcctcattccagactgccaccaaggtaagagaaggcaactggtttgtatgaaactccaccataagatttctgaaaccctatattttctctctcatctatccataatacaccagagttatcattgagaattgctgcatttattttattgttttttttcttactcctggctctgttttatatcccacacttgttttctttcttctttcactccacatttaatttatcctatcttgaatttcatgtagccttataagtcaccttaaatcctttctagaacaagacaaggaataaataaagagtcattctaggtatctgaaaaagcaatcttttctcatttaccttagataaagccttacaactttaacttcttgctgcctcttagctatgctctaccgtattgaatacacaagtatcaaaaatcatgagtttctccttttttgctttaccaattctctgtttaaaaatatttaagtctgcgcacaaaaactacagggaaaaatccatgcacaatttaagtttaaaagcccataacttttaattaaaagcaattaaattatttgcacaaataacctactcgctgtacaatttttgtgtctaaagtatgtaaagtttctagtgccttgcatacagttactcaatcattatagtaatagctcagttacagagtaggagtttttaaatgagctgatgtaagactactatagcttgggtattggcacatgagaatctgttttagtgctatttttaaaaccactaataaacagcagactcgagcctctgctcaattgaatctgcctgagttgtgaaagaaaaaatgtgtaagagaaccacatttttatctaaatctgaaatgcctgctaatatactcggaaaagtagacatttaaaattggagctttcataaaatagtctagagtttagtgttactaaaacgaaaattagttataaaagtaaaaattgcacaacataatagtttctattcatcccattttatagaaataatgtcctttcatttcccccaaagttatctaaccgagcaacagataatctataattactaggatttgccttatagcaaagtttgatttttaaaagtttgacactccactcacctactgcaggacagagtattgcccatatacagatactaaaccaattgtctaagcaatttcttgtatttagaaattcagtgccactatcatggctcacaatttggcttatgatgcatctgtaagcaaacagcctgacaagcaccctagtgtatttcaggatgactgacaggacacagtggcccaagcaagaaggggggatgggtgctcttaaagcaacatgccagtgaagggtaacatcaaacagcagaatcagacctgaaattctatttttcagatttacaatgaaataataatacattacccactatcaacttctaaatacaacttgcatggtcattatgtacccaaaacactgtaaatcccaaagtagaatttttgagaatttgtaaaagtagaaagaaaaaatataaaacaggcatgttatatgatacttccctgaagcgatcaagctttcaggttacttaagaatatgcctgttatttttaacagaaattaaatcaggctatccacagaaaagccattctttcttttccttataatatcaacttttattttagattcaggaagtacttgtacaggtttgttatatgggtatactacatgatgctgacatttagggtataattgatcccgttacccaggtagtgtccagtggtggggtgagaaaagcagttcttatctcaccttcatatatttgtcaatagctcttacaacagtaatttaggaataactaatgaaggtaatttaaatatcttgaattaatctgaattgttattgaggataggggccagagattcacgtattttccccctactgcattccttccctatgacctacttcatgattaaaatatagaccaaaagattcagaaattctacttatagatatttctacattaatttcactttagaaaacattttagtaacatattggcttcattcttcacatttacaattttttcctatattatttcacaatactctgcactgctcaatccttttataatagagcaatcatccatattttaaaaacaaacaaacaaaaaagccaagtcactcatttttaaacacaattcctcatttagccagcagagggtattattagattctgaaagcccacatattgcacccaatgacatgtatttttatacttcagctaggaactgggacacatcatctcaactttccttagtaaatgtgcttagaaatatcccattttattttgcccatataaatttgacttttagagcccagattaatgcttctcatctgtatcacactaccattatttcctcctctatctgctccaacagctgcatcctctgaaaaaaagcactagaagaccaagaagtggcagaattaccaagaagaagcagaattgggttcaatcatcagaaagacttcccacaatcctaaatttttctgggacaaacaaatgaacaacaatcttacataaagattctaagctccattagaaaatcgaaaacaaatcctgaagaaaacagaactaaattacaggataaaatctctcttcaaaattatatgacatttgtaacctctttaactccctgtttaatatttgctaaattttcattatatattagaagccacagactaattttaaagatatacttcctgttattacagcattaatatatttctcataaacatgcggtattatgactaacaaagttcccttacaatttataggttctttatttcacaacttaacactcacttagtgtggaaagacatggacagcaatttgcctgatttattctaaaaataaaaattttactatctaattagctaaaatcattaacttccacaaatttatcttggctgaagataaaaaattttctgtttctttgatgcaattatatcacaaacatcaagttaactaagttaactatggcaaaagtgaaaaagcaatttcaaagagcaatctctttttcctgctctcagatttgccactaatggcacatcctctatgctaaagtactaaattttccaaagagaaaataaatgttaattctcttcctcaattgtcattcaaaataaaaaattataggttattttcctttaaaggggaattctatttctaataataaaaacaagcattgggttcttcattgaaagaaactgct

SEQ ID NO: 913545 - DNA, 4001 bp, Homo sapiens
ggcagagctgaagtattttcaactctgacatgtagctttgttgatatctgtaaaagtttattgagtggaaattttgtaggtaggagagattccatccttctaaacactaagtattttggtatctatgtgcctgataacaatgttttgcacatcatagacaataaatatatcatttggtagactaggaattttacaatgctttaaaagaataacagtaaaaacacatcttaaatatcacaacttttaccttcaaacatagtgttctctaatccaacacttctacagttagaaacagagattaaggaaattatcttaaacatatctacaacatacatatacacataagtaaataaatacacaaagatgtttaccatagcatctagatgttcagcaatgattaataaaattatattcattcacttgaacaaatgttacacaaatttaaaataacaccactgtagaataggtaatattctgtggaaaatgttttggtatatggttaaatgaaaaagcaaggttccaaattttatctatactattattgcaattatttttaaagccatctagaaaaaaaaagactagaaggaaacacatcaatgaaattacaggaaatatttttctgtgctttcaaaattcctacgatgaacatttaatgcttttataatgaaaaaaagttttaccaatctttactcaaataggaagatttagactatgtgtaggaggtaacaaatgggaataactttgtctatactgtctgtattttaggtttctccatttaacaaacttgtcctatggttctactgagataattttttataatggacaatgaaattttaatagcacactcaaatatgccattcaaatctgaccatggataatctgaatcttcaaatcacaactattctcaatatgttgagctttcaatctgtctaaaaagctagccacaaacccagaaccaatgcaaacttgaaatcctgctttttccactttgttttaagcaaatcattgcattctcacgttatctccagagatcttagtaggcacatatcagtgactcaaaacctctacagtaaatgaactttctgatgtctaaccccaatttcttcttgtttccatttgaactcatttcttttatttgtcttccgtgtaactgacagcagctgctcacaatcattcagatcccattagatagtgaccttttctttacatgattgatcattacatctcatgatcattccatacagtgattttcatttgactataactggtcatcaaacagttctgagagcattcctcaacctcttaatattccttccaattataaaacaaatagacattaaattcagaaattaatgctttttgccattatctcacttgaaacatcttccatttactatgaattagcttttggttgaaagtaaaatcccttcaaacatattccatctttgcttccttttccccactcccatgccaaagcacaagcatccaggccatatcttatcttttcctgcacagtatccaatcggctttttatagccagaaactctctgaatgcaaagcacgaccttggctaccagcttcccctggcaatagttcgaaagttatttataactttaaaattagcgtgaaagcctacgtttctcataactagtcaaaacattcctatttcatacaataatgtgatcttcctcagttcagaagaaaaccccaaattttaaacctatgattataactaagacacaggaattcaatgcagaaatgagaattcgctgaagttcagctcttctctttacaaacttgattcttacctttctgtttcttcctataaagtaaatgggcttaaaattcagctcccgtagggaattttccaaaaagagctttgtgggggacggaaaaaggcttcttggtggtcacagagttacagagtaccaaattgagaggcagatgacagtggggcagtcaatttcgctgagcgttgttcacccaggataagaaagaaaggggaggttacaagccagggtgggtggtatctaatcctgaaccgctagtcactgacctcactgacaacttgttactgaaaatacttcgttgaaaaaggccagacacatactttgcctagagacctacaaacatagctctgaataagtttagatttgcatttctctagttcctttccaaaagaagaacctcttctatctaattaaagccaaaggctggaattattgaaagtgaaaaatgataaagcagggaaaacaagagtccaggaaatcctcacatcaaaagatcaattatgtaaaattcaatgtcttcagaaccctagagatgatggcatcaaggccatgtgtcacatctgagatcgtatttttcttcttctgaaatattacctgtctcatcccttgtaccaagcatcacactctctccttccagtatttatgaggaaccacatcattatcagtaaagaatctaaactgaagatttaccaaaaactcaataggttaacccattattaaatttaagccaccaaaaaaaaaagtcttctccaccaaaatttattttttctctctatgactattctttttcacatttccttttcccttttttttgatatcttctccctcaatatcttcacatccactgaaacaatctttatcatttcatcaattccttgacatcccactcgaacttctgtggcatttccttggacattaccatttttccgactttcttctaatagcttctaaaacaagaggtgctaactaaaatatgaactacttgtttgagttttggcagtcctgttcttaaaaggctgaattcaaaataaaaagaaagcatttatttattggctctccagatactcttagcacaaatttcagggagccaagaggaaaggcagggtctgggaactgtcagagaatcaactatgaaaggagttcattttatatgattttcaggatagccttcaaaacaactgtatttttatgtagctacctttaaaatgggcataattgacaatatatttatctaaagattcttagttgctaacatgctatcctccccagatttttttaaagcagctttttccccctggagaatctaggaatagcatcttttcacagtgaaacaaagagtaagttttatgtctctcaatccatcttttcttgaataaagaaatcacttgacacttgcaaaatagcaggttttgttttagagctttaataatgaatgttttccaaaccaggactgttgaattgagcccaagatgagatatccaaattctatcataagcctagcttgtcctgctgtgaaaccacaataagttacttacctgccctgtacctctcctttccacctacaaaatgtagatgagaactcttattcttttcatttgcttttcagaggatatgtgaattaaatggataaaagctgaagagctttaaattacactgaactcttcagagatgcaatacagataaaaccttcttacagaatttggtgttatcaaaacaattaaatattataaatatctgaaatgtaattttaaagagcttttatagtgggtttttttttaattccttcataaaaatatctgcagcctccaaggtagtatttagctgaagtatttcccactatagccacaagaggtcccctcctagcaattcaaatcacgttggatttgttgatcacaggccccatggtcctctgtatttgtatcagtttgctgacagaaaacatatatcacctatgtcaaatttccatagctaactatagggtaggagacaaaagcagagaaatctgcctttctctgtgtgatcgctgaggcatgctggaggctaaatagttcctgtaaactacacagcccctgcattttgcatcctggccctcttccagattttcacagtagttctttcttgtcaccttgcccagtcttgttcagtatttattctccttccctatttacttgtttcctttctttatactttgcaaactttaaaattttggct

SEQ ID NO: 913546 - DNA, 4001 bp, Homo sapiens
gtcagacttaccttggaattaagctgatagatttgactagatatattttgaggcagaccaattgcactcccttttaactctataatatcttctttgtttttctggatctaattttagaaaaagaagaagaaatgaagagcactagtgaaaatatcatatttatctttacagtaacataattaaaaacttgagtagtattctactttaagcactaagatcttgcctattattataaaaaccaaaacaacaccatgcgtaataaacactgggctaaaatagccacagcataattccacttatccttttcagtaacaatagatcaaggtattttccatttgtatgttttcctataataccagtttagggtgcttattaagaaacctggcttggaagcagactgtttaggttttaagtcctggctcagctatttattgctgtcctgggcaagttacctaactgcttcagggtttctttacctcttgtaaaactagggtgacaataaaggccacctcataggacagctgtgaaggtcaaatgagataacatccatacggtgctaagcacagtggatggcccacagtaagctctgaataatgctgacttctaacattatgactgaaatatgcagtgattattgggaaatgaaaacacccagtaaggcaggagaataactggccaattctgttctgtggcaaaagcaaactggtcacatgtccacatatccttggtcccctacttcctcgcatcccctgtggaggagtttcagttccaccctccgtgccttctctggactagggtgcattgtctggcacaatgagcttctatcttttagcatactccctctacccactattaaccccaggccatcgtcctttacaagaacatgtctgatgcccaattatgttctctatgctaaagattcaaggtacactaggaagggggagggaggctgaagacaggttgattaatgaatacaatatatagttagatagaagaaataagacctagtgtttgatagaccagtagggtgactatagttaacattaatctattgtacatttcaaaataactagaagagaacaattcatatgttcttagcatgaagaaaaggtaaatatttaaggtgatggatatcccaattaccctgatttgaactttacacattataggaatgtatcaaattatgtattaataaaaaataataattaaaaaagattcaaggtacagattaatctagacttgttcaattaagtcaccgtatatggatatacaaaatgacttcaatatatttccagtgtattacctgatgtaaacactcactgagatcttcatcatttaatttaatttttcccagggatccggttctaaactcaatgttttgagcagaccccgtaagaaacaccaaatttcctctctctgtagccattcgaggcctatataattcaaacgagagaatgcatcagtaattagcaagtacaatttttaaaccaaaataacaaagtttcttactgaataactacaggccaaatacatcttcactttttgatcatctcaacccaactgcccctgctcatctgccacttttttctctgcacatttctcagagatacctcctggcaattgcaaacagattatttgcaaaatgacagataataatttgtgcataggaaagtaatttcatacctcagtctaaatgtttttccctgtttgcttctcaacataattttcctcaagaaaaattgcacctttgtttatctggctatttgggaaaactggtgaggaattagcctagtccctgagcaggaatgacccatgtgtttacttactgttggagattgatgcttcttttttgtctctgcagctcaagttctccagcttcgccatttacttcagcaaatattaataaggtaagcaaactccaaagaaaaggtaaagacatgttcatcatcaacctcccaggttggcaggtaagagtgaggccactccaaccaactgagcatgggattttggagaacagcaaaccaggcaggtgtactttgaaccatggaatatcctgtaactgttgagttttttcttctttgccctagaaggctatgttattttttcttccagagggatgtaaatgatcttagatcttcagtactcttcaacttgtgagaggtcaaaatctaccttaagtgatgcgcaacttaatcattatctatttgacctttgaaacagtaacaagcagctttgaaaacatccacttaaacaatctttgcttaagaagtaactaggtttcaacaaaagtaaactggtcattatctacacctttctctgttcccctccttcctcacctcccttgcagaggagttccacctttacccagcgctaggaaaactagatatccacatgcaaaagaagttggaggcttacctcataccatatgcaaaaattaactcaaaaaagttcaaagatctaaatctaagagctaaaactataaaattaactcacaatggttcaaaaaatctgaaactataacataaaactcagaagaataggacaaaaattcatgaccttggattttggatttggcaatgatttcttgagtatgataccaaaagcatgggcaaaaaaagaaaaacacacagacaaccaaaagatataaattggaatacatcaaaattaaaaacgtttgtgcatcaaaaaatacatcaacagagtgaaaaagcaactcccagaatggaagaaaatatttgcaaatcatatatatatgaaaatgggttaatatccagaatgtacaaagaatttgtactttttactttttatcatccctgtgggacctatggacggctgtggaatccattcccactttccacactgcgctatacacccttccagctggatatatggtttgaggacatggagcactgatgtccccactcactctgtgctgggactacagaaaccactgagagtgatgaaaatattctacatttcgattgtaaaatcaactattgatgcactcagactttccatgagcacacagacaaaactgaatttgagggagagctgtaaaaatttcacttctaagaaaaatctctaggtaattaccattgcattggttaatacccatgcaggctctttcaggacaagcctgtttgtgttttacttattttgtgtcttacttatgtaggctctttgaggagaggatcattatgtaccatagcttataattctttacttatgccgggcgcggtggctcacgcctgtaatcccagcactttgggaggccgaggcgggcggatcacgaggtcaggagatcgagaacatcctggctaacgtggtgaaaccccgtctctactacaaatacaaaaaattagccgggcttagtggcgggcgcctgtagtcccagctactcgggaggctgaggcaggagaatggcgtgaacccgggaggcggagcttgcagtgagctgagatcatgccactgcactccagcctgggggacagagcgagatgccgtctcaaaaacaaaacaaaacaaaaaaaaactttacttgtgatactcaaatagtcactgcttttaaaaattttttttaaaccttcccaatttcttctatatgtctcttgtatctgcttctttcactcaacataatgcttttgtaattcatctgtgctgtagtgtatatcattaattggttcccttttattattgagtagtatttcatcatatggctatcccacagtttgcttctctactcatcagttgataaacacttgagttatttccagtttgggactattataaataaagctgttatgaacatttgtgaacaggtctttgtgtcaacataggtatctcattacaattttaatttatatttccctaatgaccaaagatgttgggcatctttttatgtatatttgccatttgtttatcttcttcggtgaactgtctgtttagatattttgcctattttttaaaattttgttgtttgtcttttattgattgtaagagct

SEQ ID NO: 913547 - DNA, 4001 bp, Homo sapiens
caaacttcacccaggcttctaagctcttttacccttccccatccccggtagccttcctaagtacatccttcctgctcaggggctcctaatacttctccccgcatagcccctgagttggggaagatctggtctgccagactggtttcctaagtagcacctaagcagccacccttctccagggtaagaacatgatttccatgagacatttcaaattccagatgtagcccacagaaccccattgcttcttgggggccgcaaattagagatcattggttgatggtgtctaccaaatgtgactgtcatcctgtcatgagtcctgcctaaatgcctccgatgatggtaatattagcatttattgcctctgcttacgaggcattgtcctaagcacttttacatgtattaacttacctaatccttacaataactctaaaatgtagatactgttattctccccattttattttatttattttatttatttatgtatttttgagacggagtctcgctctgccatccaggctggagtgcagtggtgcgatctcagctcactgcaacctccacctccctggttcaagcaattcccctgcctcagcctcctgagtagctgggattacagtcgcatgccaccatgcctggcaaatttattttgtattttttagtagagacggggtttcaccatgttggccagactggtctcgaactcctgacctcaggcaatccacccgcctcggtctcccaaagtgctgggattacaggcatgaaccaccgcgcccggccgtattatccacattttacctgaaaggaaatgaaggcactatgaggttaagtaacttgcccaaggtcacaaggcaagttaatggcagatttacacccaggctgtctggatccagaaccctcactgttaaccaccacactacatcacctctcacgatgcaaattgtgtggccccatcctatattctgaatctcctctcctgcctggctggctatattgtctatttcagaatctttgctcacaccactctcccagcccagagcatctgtccctctgcctctccaaatctcattctgcaggactccctttctgcagccaaccctaactgccccaccttcactgctcccagctagcctgggagcttcccaagggcagcacaggcctggaccctccagatgctagatagagacactgtggacaaatttaagtgagagtggggtaagaagtactatgctgctcccttggggtggggaggtgcttaaagtggagggagagcaggccatgtgggaggaggaatcctgggagctagtgtgaaaggagtcctagcgaacttctcagggaggcagcaaggggtctagcatggaaggtcttcactgcttctcccagcccctgtgaagcccggttcctgaggccctggacccataacgcaggccccagaggatatcattgtcctctgatacccaagtcagaccttagaggcaccaagggcattgaggggaacaagggatccctgcatccaaagtcaggcgggagcacaaacagggagggcgagcacaggaagtgggaccgcgatgatggacgacccctgaagcagcagctccctaaacccgctagcgggacacccgtaagcgtccagaatagtgggcccgaaggcacagggatgcggctgtggccttggaggacacatgacgaggcaggcctgagcaaactggatgtgccttgatacaggccacggcgagaatcagagatgggggtccgacgggccccggggggggtaccgtgggggaacacatcggacgggtaccctgggtcagcgctctccgcgactctcctagccctgggccgggggcaggaggggaaatcacctgctccgtcgggcgccgccggcgacttgtcccgcgcggtgcagctctcatcccccagccccaccaacgagatcaaaggcggggcccagagcggttcccttccagaggcgccgtggcggccatgtttgagaagggcaagttgcccacaacagggcggagctcctgctctaattctctaacgtcccagggctatggacgggctcccttggcggccagttttgttgcgcgtagggaggcgttaggcgtgaaggtcttgagagggggtggagtcgaagtgggtaggactgcatccccgtcttgttccttctcatccgtcagagacccgaaacctttctctttctttctctctctctttttctcgtctctctctctctctctctctcacttttttttccttttcttcttcttttttttttttgggagggagcctcgcactgtctcccgggctggagtgcagtggcgcgatctcggctcactgcaacctccgcctcccgggttcaagagattctcctgcctcagcctcccgagtagctgggattacaggcgcgcgccaccacgcccagataatttattgtatttttagtagaaacggggtttcaccatgttggccaggctggtctcaaactcctgacctcgtgattcgcctgcctcggcctcccaaagtgctgggattacaggcatgagccaccgcgcctggcctcttttcttttcttctttctttattttcctttctttccctccctcccttccttccttctctttctttttcttcttttcttgctgttacagccccaggctggagtgcaggttcacgagtgcgaacatggctcactgcagccccgacctcctgggttcaagtgatcctcccatctcagcctctggagtagctggaaccacaggcgcgtgccaccacgccgagctaatttttttttttttttttttttttgtagagacagggtttttgccacgtggcccaggctggtctcttaggtactgacttccccaccctgtctgtaccttttgcattcccttaacagcaatgtctcccctagattggggtgagctacaggtctgtgtctccggagggtggagcctgggattttggacgtggtctgggagaggtggagtggtagcaggtgccaggatgaggatccacctgagccctgtcatggacagcctgtagaccatgcctaccccccggggccttcatcccccatgttggcagggctgcttgtctaggacaggagagctgaactccagggcccaacaagacttcaacttcctctttttgttcctgctgccacagattcccggtgctgccctgtggggaagccccacagccctcccctcttgggaaccctgaaatgggtcacaaggggaagagtccccttcaaggataaaatttcccatcccccatcagcagggatgagccctttttagtgctagttccttcgtggggtgctggggacccggaagctgtccctgccctcagggagctcacagtccaagagagaagtcccatctttcctctctcctagggactaaggcagtgccaagatactatgctgcagtggctcacacctgtaattctagcactttgcaaggctgaggtgggaggatcgcttgagcccaggaatttgagaccagcctgggcaacatggcaaaacctcgtctctacaaaaaatttaaaaaataaaaaattatctgggcatggtgacacacgccagtagtcccagctactccagagactgaggtgggaggatcatttgagccccagaggtcaaggctgcagtaagccgtgattgtgctactgcactccagcctgagtgacaaagcaagaccctgtctcaaaaaaaaaaaaaaaaaaaaaaaagaagaagaaaagaaggagaaggaagaagaagaaactatggagaaaacgggatgactgcttattgctttctcttccacctctggtcctcacaacagcctccttcctcttctggcctcagagacagcaagatgttggctgcttgggggaggtagcagggaaggaaggggcacattcgcgtcgctttgcccataaaaacactgccactccagcctggtgatactagggttaatgaggggtggggtgacagcgactttgaactctggccgggc

SEQ ID NO: 913548 - DNA, 4001 bp, Homo sapiens
aggtccataacgtttaatctagtgacaaactggtgagggtaaaagacatggataatcttcacatttatagaacactgaaagccaccagcaaggatggagaatgaagagtatttcagatgcaggagaacatccaaatactcaaaaagcaattgaaaaggaatttttcccacgctatgtgcatgcacattgtagaaatgttcccccaactcataaacagcaattgaaaaaaacaagtaattcaaaacactgtgggctgggcgcagtagctcaggcctgtaatcccagcactttgggaggcctaagcaggcgaatcacctgaggtcaggagttcaagaccagcctggccaacatggtgaaaccccatctccactaaaaatacaaaattagccgggcatggtggcgcatgccagtaatcccagctacatggaaggctaaggcagaagaattgcttgaacccgggaggcggaggttgcagtgagccgagatcgcaccactgcactccagcctgggtgacaagagcaaaactccatctcaaaacaaaaaaactgtgtacttctcttatctcacgcgactcttttggaaggatcttccagatactgtataagggcaaaagaagcaaagtatagctcatttgttcatgtgtctgtcttgaaaaggaatgtaagattctaaagggtaggcaacagtgttttgaatgtttttaagcgattattatgtagtcagttgtcaatcagatcaaagtgattatttccgatactttactacgaaggtaggcttggccaggtctagttcaaagacgtttatgttgaacagtcacaatctatagcgaacgttaatattttgcatcttatcttcaaaatttaaacgcccagggtactggccttcaactgttaatattaatccatggggcaaagatgtggacttaacattaataacagtctgcaattcacagatgttttatttgcatgcacgtaatggtagggaatggtccagactctctagagggtaagcaagtgctagaaagcgtgtgaggatcttatttcaccagaccctaagggttgagacaagaagtctagcatgcacgtaggatactcctccccaaagctatcaatctttgcagtctgcggaaacaaaagtgaaaacactcggggtaaggatgcatgagatgcccccccccacacacacacacaaacacacagagttgtgtattcgtgtgagcacgtaaatatgtagaagaatacacgcactctcaccttccctccttcgaaggaaaatggggccgcgggagaggcggccaagatcgggttggggaggcccgggatccagtccagggggtggcagggcttacgggtcagcgctctggggagccgaggtcacttacaggataccatcttcccgggcctccccctttcatccctctccccacacctcgtcgcccccaactcctctcctccgccccagccccgccacccattaaccgggaagggaagtttcccggcgcctgcagcccggctccccgaccctcagcggggttaccttctgcagaagcagggcaaggggcaggggacaaggggagggggaggcagcccgaaggagtgaaagacgaagccccggcgaggaaggtgggcggaggcggcggcggcggcggctgtcagctcgcgttcccctgctcacagcgctgccattactgtgcgccgaggccgcctccccggccggccgccgccaccggccccggagacgcggggggtggggagcgaagcccggggagcccgcgcgccgacactcacctgtctccgcgaggaaagacagcaaagtccaaggccgccgccgctccccggcgggacaggggcggtagggagggggggaaaggggagaaggacgggccgatcacgggatccgtaaaacaatcgtcctcctctgcctccggctttgcccaacacacaccctccggtctccttcttccgctgctgccaaatcccccccgccacccggaaagcaatggtacaggccgcgttacggcaagcgcagggagccaagcttcgtgtgattgcgaaaggccacggaaattaatattccaagtgattccttgctgggcttgctgtcaatgaggcaattgcggttcgctgagctgatggacacagtacccacccactacccgttagttcagggactgctaataacaatatgttggaatggtgctttcaacagaagtatgttttccttgtttcagacctatgtgaatatcctaagacaccacaatcctcttgccacacacttccatgggctttgcaaatgatcaaaaataaattagcaaaactacttttcctctctgacaaactctttttcttgttagtttttatctacagagaatttcttggacatacatgtattttcgataaagaaacttcacatctttttcactaataccccaccttcaccaagccccaagcctatcagtttgaagggttttcctcccttggagttttaaacggtaaagctgataaaaatatagaattactcatcacctcctcatatatgcagggccacagaggaacaaaagcccggccttagtgctttttgcctttcatatcctcaagagctcaccatcagggtcttgttcatttatacgattcagcaagcttttccctcccatcccttccttccaaactgcacgaacccttcaaggcccatttaaaaccctgcctccagacctgatcagtccctagagccttcctcctcttctaatctgcttctcttggtacttgaagtctctactctttatttcagtaaagggtttttatatacgaaattcaatccaacagtatgtttccattatgtgacctttttttcctcccatgttttcccccttttaatctagtgattctcaaagtgtggtccccagacctctggaaatccctgagacctttacagaggtcataaggttaacaactagtttgttaacaatgcaatatgtctggtcctttttttttttggatacagagtcttgctctgtcacccaggctggaatgcagtggcggcacaatctcagctcactgcaacctgcacctcccgggttcaagtgattctcctgtctcagcttcccgagtagctggtattacagaagcccgccaccacacccggctaattttttgtattttgtagagacagggtttcaccatgtcaccacattgcccaggctggtcttgaactcctgagctcaggcaatccacccacctcagcctcccaaagtgctaggattacaggcctgagccaccgtgtcaggccccccctgctttttgttttgttttgtttttgtttttgacacagggtctccctctgtcgctgaggctggagtgcaggagtgcagtggcctgatcatagctcactgcggcctcaaactcctgggctcaagcgagtgtaccatctcagtttccgaagcagctgtgactacaggcgcgtgcgccaccacacccagctaatttttgtatttttggtagacatggggtctcactatgttgcccaggctcctctggaactcctgagctcaagcgatctgcccacctcagcctcccaaaagttctgggattacaggagtgagccaccatgcctggcctcctctgtctttttgactgagtttgtttttgtactgatggtgcaaaggaatacggacactattgatgccttagcagggatcaagacagtgccaccaacctgtccgggtggtcattggatcgctgtattcttcactgccatacattcccagtttttaaggctattgatttaggaatatcctggatgaagcggaagcattaattttattaaattttggcccttgaatacaagtctttctaatactctgtgtgaagaaatgggaagtacacatgcacttctgcatgccaaagtgggatggctgtcttgaagaaaagcacttgtgtggttgacttacaggctgaactacctgcatttttcatggtgaaactgcctttgcaaaacatgatagt

SEQ ID NO: 913549 - DNA, 4001 bp, Homo sapiens
ggctctagcatggaatccctggctccagtgaacttaatgggcttttttttttttttgagacagagtctcactctgttgcccaggctggagtgcagtggcgcaatctcggctcactgcaaccttcacctcccaggttcaggtgattctcctgcctgaacctcccgagtagctgggactacaggcgcccgccaccatgcccggctcattttttgtatttttagtagagacggggtttcaccatgttagccaggatggccttcatctcctgacctcgtgatccgcccacctcggcctcccaaagtgcagggattacaggcgtgagccactgcacctggcccagaatgggcttttaagggagttcaaagactcctgcctcagacaaactgcatttaggaattagctggtttctggaacaaaagggtcccaaattaaaagagaaactttctaagctaaatgtaattgctcaaaggaacatttttctggcaaatgttttaacagcctccctcatgtctccccttattagcaggactgtaagacaccaacctagtctgtagccaaggccaaaaaaggatgaaacatcttttctcgtctcccatcataggggaaaggggaggcagagaatggggaggagggaatgatgcataaagagaatgggcaaagggagcgggtaggatggcggccgcaccaccagccacggactgggagaggcccttctgtgtttccagatgagaagagagctcaaggaatcccaggaatagactccatggaaaagaatgaaaaaaatcagagaaaagccaaatatccaaaagagggtatgccttgttgaaccacatcctctttcctcaacattccaaagcctccacctcctggccttcaactcattcccgaactatctataacggattagcagcgattttactctgcaaaattgaggggaaggtgagagtggaggaggtgggagaacctactgagtttcctaagctctaaataagggaattaaccatgcctccttctcttccttgtttactacatcctatcatcaactgtgcacatgagtatttcctgaatccatccatacttgtatagccctacaaatgatccggaatcaggccctcagcagaaatagtaacagttaatatttacattgtgtatactgcaagccaagcactagtctaagtaccctgtacaaactcgtttaatcctcccaacattctgacaggtaggtccactgttgtccccattttcttttcttttctttttttttttctttttctttttctttttttttttgagatggagtctcgctgttgtcagcctgggctggggtgcaatggcgcaatctcggctcactgcaacctctgcttcctgggttgaagtgattctccagcctcagcctcccaagtagctgagattacaggcgtctgccaccacacccggctaattttttatttttagtagagacagggtttttcaccatgttggccaggctggtctcaaactcctgacctcaagtgatccacccaccttggcctcccaaagtgctagggttacaggcatgggccactgcgcctgacctgttctccccattttctgaataagaaaactgagtcacaagtgattcagaaacttgcttaaggtcacaaagctatgtaatggtggcatcaggattcagacccgtgctgcggccggtgctctaggctgctgtgtgcaaccatgctacctcactaacatgcttggtgaatacttactccttgccaggcaccattccaagctctgaggatacagtggacaaaacaaagttcttgacttcaagatcagaatctcagatcttgcccttatcaaagacacaaaaataacctacctaagccaaaaagttgaccatgttactctgtacataaagtacaaagtttgttgtttccttctacagacagcattcagtttgggctcaactgcaacatggcacccaagcttcctctcctcctggtactccctactgtgacatcataatctaggaacttctctctgcttagagatcactgaacacatcagcctgattcatacacttgcctttacccttactattttctctacctaaagtgcttatcttttccttagctgccccctccacccattccacctaactcccactgatagtctaaccttggtccactagctttttttttgtttgttcctgagacagagtctccctctgtcacccaggctcgagtgcactgcaacctccacctcccacgttcaagtgattcacctgccacagcctctcaaggagctgggggattacaggcgtgagccatcgcaccctaatttttgtattgttaatagagacagggtttcaccatgttggccaggctggtctcgaactcctgaggctcaagtgatccgcccgccttggcctcccaaagtgctgggattataggtgtgagccattgtgcccggccttcatctgcttttaagaaactttcttggaccatttaagctaggtaaggtgtcctatcataggtattacctgagaactccacactttcctctattagagtacttcatcgctctgaactgtaattacctgagtgtttctgagagtggggacaattctgtaactgcgtaccaaaaagctagcgatgctcccctcacattcgctttctcctcttataaaatggaatcatattatacacactgcttgtaaattagtttaacagttgcacagactttttttgctttatggaatcagactgacactgacttctctgttgagactgatagatttctggtaccataggaaaatacagttacaatccatgcttggatggatagcaaatctggaagccaacgtgcaagaagcaccagcctcgtgaaacacaccaaaaactgacaaaccaatagcaggaaggtatgctgagacagtctgtcaagattctctgcttgcccagcagaaagctcatataactaggaaaattaagtttcttaaaaatgtttaataataacattcagggaaagtttacacaaggatgtgaaagagacagggcaaagaagaaaaaggaccacagtcacactatttctaccccccaagctgtcaaacaactcataaatctatcagtcttgttcttcattcctgtgccttaacgagattcccacgcgcactcagattgtgtcccatcaagttaactgcaaaaatccaaatctcctgaaatcaccacagtcccttttagtttccttgtgagttccactcttgcaacaatggggttttagacacacaggtccagtggctagggccacttatgggccctaaaacacacacacacacacacacacacacacacacacacacacacacacacgcacgctccacatttttaaaaattgcaaaataaaaatttatatttaattacctgtttccagaaaacattatgtcaacattaatacaatatttgcaacatttttattacatttgaaaacacttgtagatttgatttcctcacagcataatttctaaatatgcatgattgtcaataataattacaaaagtgaattataaaacgcagctaccatatgacccagcaattccactccgaagtataaagagaaataaaactcccaagagaaatacaacatattcacataaaaactggtacacaaatgttcactgtagtattattcataaaggcccttgaaatagctcaagtgtctatcaactgataaatggttaaaatgcaatatagccatacaataaattattatttggcaatacgaggaaatgaagtactgatacacactatcacatggatgaccctcaaaaacattctactaagtgaatgaagagggccacaaaatagccacataacgtatgaatctatttatatagattatcaagaataggcaaatctagagacagaaagtatgtgagtggttgactagggaacttggggggaaaatgggaaatgactgccaacagggtgaggaaaatgctctaaagttgattgtcatga

SEQ ID NO: 913550 - DNA, 4001 bp, Homo sapiens
tgtagtgccagctactcaggaggctgaggcaggagaattgcttgaactgggaggttgcagtgagcccagatcgtgccaccgcacttcagcctggtgacagagcgagactccgcctcaaaaaaaaaaaaaaaaaaaaaagaaatgtaatgtgtcttgtttacccttgtaaccttaatgcctgcagccctgcttgacaaataaaccaggtgcttaataaatatctgtcaactgccagacaacgcaaaaatgactttaaagaaggtccataacgtttaatctagtgacaaactggtgagggtaaaagacatggataatcttcacatttatagaacactgaaagccaccagcaaggatggagaatgaagagtatttcagatgcaggagaacatccaaatactcaaaaagcaattgaaaaggaatttttcccacgctatgtgcatgcacattgtagaaatgttcccccaactcataaacagcaattgaaaaaaacaagtaattcaaaacactgtgggctgggcgcagtagctcaggcctgtaatcccagcactttgggaggcctaagcaggcgaatcacctgaggtcaggagttcaagaccagcctggccaacatggtgaaaccccatctccactaaaaatacaaaattagccgggcatggtggcgcatgccagtaatcccagctacatggaaggctaaggcagaagaattgcttgaacccgggaggcggaggttgcagtgagccgagatcgcaccactgcactccagcctgggtgacaagagcaaaactccatctcaaaacaaaaaaactgtgtacttctcttatctcacgcgactcttttggaaggatcttccagatactgtataagggcaaaagaagcaaagtatagctcatttgttcatgtgtctgtcttgaaaaggaatgtaagattctaaagggtaggcaacagtgttttgaatgtttttaagcgattattatgtagtcagttgtcaatcagatcaaagtgattatttccgatactttactacgaaggtaggcttggccaggtctagttcaaagacgtttatgttgaacagtcacaatctatagcgaacgttaatattttgcatcttatcttcaaaatttaaacgcccagggtactggccttcaactgttaatattaatccatggggcaaagatgtggacttaacattaataacagtctgcaattcacagatgttttatttgcatgcacgtaatggtagggaatggtccagactctctagagggtaagcaagtgctagaaagcgtgtgaggatcttatttcaccagaccctaagggttgagacaagaagtctagcatgcacgtaggatactcctccccaaagctatcaatctttgcagtctgcggaaacaaaagtgaaaacactcggggtaaggatgcatgagatgcccccccccacacacacacacaaacacacagagttgtgtattcgtgtgagcacgtaaatatgtagaagaatacacgcactctcaccttccctccttcgaaggaaaatggggccgcgggagaggcggccaagatcgggttggggaggcccgggatccagtccagggggtggcagggcttacgggtcagcgctctggggagccgaggtcacttacaggataccatcttcccgggcctccccctttcatccctctccccacacctcgtcgcccccaactcctctcctccgccccagccccgccacccattaaccgggaagggaagtttcccggcgcctgcagcccggctccccgaccctcagcggggttaccttctgcagaagcagggcaaggggcaggggacaaggggagggggaggcagcccgaaggagtgaaagacgaagccccggcgaggaaggtgggcggaggcggcggcggcggcggctgtcagctcgcgttcccctgctcacagcgctgccattactgtgcgccgaggccgcctccccggccggccgccgccaccggccccggagacgcggggggtggggagcgaagcccggggagcccgcgcgccgacactcacctgtctccgcgaggaaagacagcaaagtccaaggccgccgccgctccccggcgggacaggggcggtagggagggggggaaaggggagaaggacgggccgatcacgggatccgtaaaacaatcgtcctcctctgcctccggctttgcccaacacacaccctccggtctccttcttccgctgctgccaaatcccccccgccacccggaaagcaatggtacaggccgcgttacggcaagcgcagggagccaagcttcgtgtgattgcgaaaggccacggaaattaatattccaagtgattccttgctgggcttgctgtcaatgaggcaattgcggttcgctgagctgatggacacagtacccacccactacccgttagttcagggactgctaataacaatatgttggaatggtgctttcaacagaagtatgttttccttgtttcagacctatgtgaatatcctaagacaccacaatcctcttgccacacacttccatgggctttgcaaatgatcaaaaataaattagcaaaactacttttcctctctgacaaactctttttcttgttagtttttatctacagagaatttcttggacatacatgtattttcgataaagaaacttcacatctttttcactaataccccaccttcaccaagccccaagcctatcagtttgaagggttttcctcccttggagttttaaacggtaaagctgataaaaatatagaattactcatcacctcctcatatatgcagggccacagaggaacaaaagcccggccttagtgctttttgcctttcatatcctcaagagctcaccatcagggtcttgttcatttatacgattcagcaagcttttccctcccatcccttccttccaaactgcacgaacccttcaaggcccatttaaaaccctgcctccagacctgatcagtccctagagccttcctcctcttctaatctgcttctcttggtacttgaagtctctactctttatttcagtaaagggtttttatatacgaaattcaatccaacagtatgtttccattatgtgacctttttttcctcccatgttttcccccttttaatctagtgattctcaaagtgtggtccccagacctctggaaatccctgagacctttacagaggtcataaggttaacaactagtttgttaacaatgcaatatgtctggtcctttttttttttggatacagagtcttgctctgtcacccaggctggaatgcagtggcggcacaatctcagctcactgcaacctgcacctcccgggttcaagtgattctcctgtctcagcttcccgagtagctggtattacagaagcccgccaccacacccggctaattttttgtattttgtagagacagggtttcaccatgtcaccacattgcccaggctggtcttgaactcctgagctcaggcaatccacccacctcagcctcccaaagtgctaggattacaggcctgagccaccgtgtcaggccccccctgctttttgttttgttttgtttttgtttttgacacagggtctccctctgtcgctgaggctggagtgcaggagtgcagtggcctgatcatagctcactgcggcctcaaactcctgggctcaagcgagtgtaccatctcagtttccgaagcagctgtgactacaggcgcgtgcgccaccacacccagctaatttttgtatttttggtagacatggggtctcactatgttgcccaggctcctctggaactcctgagctcaagcgatctgcccacctcagcctcccaaaagttctgggattacaggagtgagccaccatgcctggcctcctctgtctttttgactgagtttgtttttgtactgatggtgcaaaggaatacggacactattgatgccttagcagggatcaagacagtgccaccaacctgtccgggtggtcattggatcgctgtattc

SEQ ID NO: 913551 - DNA, 4001 bp, Homo sapiens
gctattcaggaggctgaggcaggagaattgcttgaacctgggaggtggaggttgcagtgagctgagatcaggccactgcactccagcctgggcgacaagagccagactccgtctcaaaaaaaaaaaaaaaaaaaaaatactatcagtcccaaactgtgaaagggttaagtgtcaatctatgctcttaaccaacagctctgcattattaactccatgagtttcctggtagctaccagaccagctgtcagatcagtggcactggccgatgctgatgctgccgggggactatttgcctcacacaagaaaggaccctaggcaggagaagatggagagatgtataaaaaaggctatgacagaaggcagagcaaggcagttgtcccaagcaacaaagttataggatcaaaggagaagcagcagcagttctcaaagtgtagtagtccagagagctttgggagcctctgagacttttcagagtctgcagggctacaaccgttttcttaataattctaacactttatttgactttttcactttaattctctcacaagtgagaggcgttttcttttttgaggcagagtctcactctgtcacccaagatggagtgcattggcgcgatctcggcttactgcaacctccgtgaagaggcgttttcaagaggctacttgacatgttagactgaatgaagcagcgggcatgagaatccagctgtcttccattaagatatactgaagaaacttgcaaaaatatatttccactcttttgctttttttgttgttgttgtttaggaatatttctttttcaaaaaaatattatgtcaatatgtaatgggtttactatggttattttctaatcaatattttaaaattttgttttaattttatttttatttttttgagacggagtctcgctctgtcgcccagggtggagtgcagtggcgcgatctcggcttactgcaacctccgcctcccgggttcaagtgattctcctgcctcagcctcccgagtaactggtattacaggcgcctgccaccatgcccagctaatttttgtatttttagtagagacggggtttcaccatgctggccaggctggtctcgaactcctgagctcagatgatctgtccccctcggcctcccaaaaaaaaatttgttttaatttctaatacagtcaaaatagatagatgtaatccacataaagaaaaaatctttgaggattcttgataacttttaggaaggttcctcttcacggaggaagagggacttgccaaattctctggcacctgccatgccatgctaccctggcactcaggaagaactcgggtcttggagcagccacaagctcggccacttggtagctgcgtgactttggggaccaagccccgtccccgccgtggcagctacaggtaactgcaggttaggaactgggctccgcgctcgacaattaactatcccagcggagtactggctgctggtgcgggcggtactggcatcctcgtgtggcgacggaaaaaacgtgaagctgaagttaaccaacttgcacaaggtcgcagggccgttatgaggggaccccgggactcgaaccttggctccacagctgagccattctcgctacctgcccctcgtcacgccctccgtttccacacctttaacgcctcaaagatagaaggtgccgcccaaggggctggaaggagctgaggaaacgactccagaagaaatcaccactgactacgactcccgccggcccgccccggggagccttcggccgaccgtcccctcccccgccaccttccgcaccggccttcccggacggtatccgcgctcgttttcgctcagaggaggccccctgccttttcatgctccacgcgttcctccctcgtgcgcctgcagtttccacttggaatttgggctccggcgcgcaccagctaagaagcgcgtcaacagctgcgcgcgcccgtgcgcgcgtccccgacacctacgccccagcagcccccgcgaaagcggagtcgcaacgcaggcgcacttctgttcgctccggtccccagagaaggcggggctcccgctgcccgacccggaagtgcttctcttttccttggcggaggagggagaccacagagccctgggttgtggaagaggtggctgttccctgtcatcagtatgcagcgattgctctttccgccgttgagggccttgaaggggaggcagtatctgccgctcctggctcctagggcagcgcctagagcacaggtaccgcactgcagcggactccgagtcgcgggagcggggatggagtgaaagggccgggataaagataatgtagagccccacatcacgtttccggagctccttacagtgcactcacaacgcataggttcagatcagagcccctaggttcagatctggaacattgacctgctgtgtggtattggccaagttaattaaactttctgttcttcagtttccttatctgtaaaatggggataacaatacctactttaaggtttgttatgaggattacattctttaatatacatcaggcctttagcacatggtaaaagctgagtaatttttacccatatagtttatttttgcttaaaaagttccaagtagtcagatgaggaagtattactgcatcctacagagaaggaaattgaggcttaaagttacttttctaaaggtgactcagttaatcagaaataggaaaccgagcatggatctttggactcacagggatatagtaagaagagggcatgcatttgcttaactagtaattattgagtggttattatatattaggaactggaaaaagaaagataaatattacaagactcctgccctggaggaagtcagtttattcatttgcgaaatccttatcatggtctcattatataaaggaacagtgttagaaacaaagctagcagaagggagagagcaagactgaccggacactgccaccccaaagctcatagtttagtgggagatacaaacagatgaacctgaaggtagagtgatgtgctgcataacaacattttggtcaacaacaggccacagatacagtcatggtcccataagattataatggagctgcctttccaagtgtaccttttttttaaaaaaaaatctttttctctaaatttcttttttagagacagcgttttactttgtcacccaggctggagtgctgtggcatgattataactcactgcagcctccagcttggaaatcctggcctcaagcatcctcttacctcagtcacttaagtagctaagactacaagtgtgtgccactgtgcctaatttttgaaaaaatagagatagggggtctcgctacattgcccaggctggtctcgaactactggcctcaagtgatcctctcaccttggcctcccaaagccttgggattataggcttgagccgttgcacctggccccatttttaaatcttttataccatatttttactgtaatttttctatgtttagataaacaaataccattgtgttacagtattcggtacataatatgccatacagatttatagcctaagagcaataagtcataccatatagctcaggggtgtagtaggcgataccatctagatttctgtaagtacttttttttttgagagatggagtctcacttcatcgcctaggctggagtgcagtggtgagaccttggctcactgcaacctctgcctcccaggttcaagtgatcctgccacctcagcctctcaaatagctgggattacaagcatacaccaccatgcccagctaatttttgtatttttggtaaagatggggtttcaccattttggccaggctggtcttgaattcctgacccaagtgatctccctgcctctgcctcccaaagtgctgggattacaggtgtgaatcactacacccagcctttagatttgtgtaagtacattctatgaggttcacacaatgatgaaattgcttaagaatgcatttcacagaacatgtgcccctgttgttaagtgatgcttga

SEQ ID NO: 913552 - DNA, 4001 bp, Homo sapiens
gtaccaccatgcctggctaaaaaaattttttttttaattttgtagagtcgaggtctcactacgtcgttcagggtggtctcaaactctcagcctcaagcaatgctcccatgtcagccccccaaagtgctgggattgtaggcttgagccatcatgctgagcctgagacagtttcttttgggggtgaagaatatgttctggaattagatagtggtgattgttgcacaattctgtgtatatactaaaaaacactaaattgtatactttaaaatggtggattttatggtatgttaatcatatcttaataaagctgttattaaaaaggagaaagaagagaagaaagagaaaaggggaagaggaaaaataactggatcctaaagataagctgttagcagtgaaattacccggtaaggggctgggcgtggtgactcacacctgtaatcccagcactttgggaggccaaagcgggtggatcacttgagctcaggagttcgagaccagcctgggcaacatagtgaaaatttttttctataaaatttttaaaaattatttggtaaattcttatatttttatgtatgttgtcagatgggcccaaataaaattagtactaattcaaaatcccaccaagattttgactaatggtcaaaaaccccacctacataggaacaaagctttatttttatttattctcccatatactcccataaccccatccatccagaaacaatcatcactaaaaccttggtgtaaattcttccactccttttcctttcctcttctatttctagacatttaaaatgcttgaatgtatatatttcaaacataagaaccatcatattgtacacaaacttcagatctcttttttctcttaatgtggtctatggacacattatagatcagagtcttttttttttttttttatgagacggagtcttgctctgtcacccaggctggagtgcagtggcatgatcgcagctaactgcaacctccacctctcgggttcaagcgattctcctgcctcagcctcccgagtagctgggactacaggcacgcatcaccacacctggctaatttttgtatttttagtagagatggggtttcaccatgttggccaggctggtctcgaactcctgacctcgtgatccacccaccttggcctcccaaagtgctgggattacaggcgtgagccaccgcccccagccatcatttttttttaagttgcaaaaaagagtgttccattttatggatttaccgtaagaaataatgaaaattcatgttgtagtttacaattatgtaagtgcacatatttatacatatatctttggacacttttatgcttatttccaaaacataaactcttagcagtaaattactcagtaaaattctatacacttttgatatttttatggacattgtcagatgagccaaataaaattagaactaatttaaaatcccctccaagagcattagagtacatttttctctgaactggggccaacagatataaacactttgaaaaattttgaaagaggcctcttaagagaagaacttctctgttttggtgaataaatctggttcaattttcttaccttcagcctccgccattgtcagctccgccaaacaggagagaattaagagggtcaatggcatgagccttcttacaagctccattttggcaaggcgctgggcagccttaaggaccgacagcttttataggctctgtgttacatcagctttctggacacctccagggaaacgtcagttccagccacgcaaggggtagatttgtgtgagaatagagcagctgtgtgactggtttatcagcattccccacagtgagggttctctctccccaactccttcctggaagggttgcccccagtggaagctctctgtagggatctccagcagctggttcccagcaggcactgagttattttccatgaaactgatggggagctgtgcctttcttctgtgcctgcacatcacaaacaggtggcctcattgacatcattgaagtcttcagggctctgctttgagaagggagcctgtgggagaacaaaggcctgtggggcaaggcagggggtgcagcacctgggcaaaatctgggtccagctgggacattcagatgccctgccaggtggctgaccctgtgggggaggggaagagggtagaggatgaagagaaaaagagtgcagatccagattcccccacagcgatttctaaccagttatgtctggagagactgaagcaggtgaattagtctctcgggcacggtgttttgcagttgagagaaagaaatcctagtgtccacattgagattgggaggagcaagtggtggtgggtgggggctgccctcttttcattcattcagtcagtaaacattacttattgatctagggcctaagcaatatagaattgaatgtgagagacacagtcctgccctcatgaaacttgtattctaagtggagagttaaacaacaaaaataaatgaagaattcaactggtgagaggagctaaggatacaataaacaggatgactgcatagatggtggttgccttggggtggggaggaaatatgacagtgagaaggagggcatcttgagagatgaaatctgaacaaaggcagaaagacaagagggaggcattcatgggtgatctgagcttgggggctgcatcttaggcaaaagagagggcaagtgcacaggccccgaggcagagaccaggtgggcacacctacaatagtagggaataaagaacagcctggctggtcatgagtgggaggagtgagctgggaggggaggatggagaggagcaggtgaaggtcagatggggaaggacccatagggcaaatgagtctggttttcactctaagttcaggtggaacatattgagtggacaatgccaggactggctactttctgaagaacctttgtgcagctctggggaggtctgacgctcgtgtaggctaagtctcctagggtgaaaccctctggctaccgtcagcccctctgtgttgttctgactgtgctgcagcccaggaggcctccctagggagagcacagtcctacgttgtgacccaggggatccattcctcgttggacccttgcaggggaaaggcagcacctgggatgctcaggaggagcttggacataccccaaggcccctgccttgctctgctccattcctatctgcccgggctggctgtggatgaggcaggactgggtgtcctggggtgagttagcaggccacaggtgtttgagatgggggacccttctggttactaagcgcttgcagctgtgtccatggatacccactcccaccctgggctttccctctgaacccctctttgtcacccatggctgggatctccaacatccctaatccatctccactgagtgcgagagtttcatggccacactctgttaggtggccctggcaaaggacccaggcttccagatccagtcaggagagaagcccccttcaggcctctggcaacttcctggggaccacggggtgctgtggggtcaccctgcatcatctcattgcttcttctctgtcacctgtgcaagtccgcacttcacatcaaggacacagaggctcagatgagtcaagggacttcccctggtgaaggccgaattgggatgggaaccggctccatagggctctaaagcccatgtgcggtgctctgtcctcctgctaatgggggtgtcctgaagacctttgtcccacctccctcacggcccccgcaatacctgcaccaggtatagtcacccacatggggaggccctggcacaggcgtcctggatccaggcactgggccacccactgggtggggtaagaggggatttgtatgtgctccatctgtcagagctggctggtgacaagagaaaatcaaaggcaggggacagagacagtgcccggaaacttaagggggacaggtgacctccagctggaggctgccctgacttggcctcttcccaagcatgctggggctggaggct

SEQ ID NO: 913553 - DNA, 4001 bp, Homo sapiens
cggctaatttttgtatgtttagtagacacagggtttcaccatgttggccaggctggtcttgaacttctgacctcaggtgatccacccacctcggcctcccaaagtgttgggattacaggcataagccaccacacccggccaggtgttttcactgtaccctttctatatttaaatacaaaaatgcttaccattgtgttacaattgcctacagtattcagtacagtaacttgacgtacagctataccatttagcctaggtgtacaggaagccataccatctaggtctctggaagtacactcaaagatgttcgcacaatgacgaaatcgcctaccaactcatttctcagaacataaccctgctgttaagcaatggattactcttatttcccaaggctcaatcctaacattctcgggaagccttcttgactcctatcattaagccaaatacccctcttatgcactctcccagattcacgaatattttcttcccaaaagttaccactattgcaatttttttttttttttttttgagacagggtttcaatctgtcacccagcctggagatcagcagcacgatcacagctcactgcagcatcgacctccccaggctcaggtggtccacctgcttcagcctcccaattagctgggaccaccacgcccggctaatttttttttttttctgtattttttgtagaaacggggccttgctatattgcccaggctggtcttgaattcctggactcaagtgattctcttgccttggcctccggagtcgctgggattataggcgtgagccactgcgcctggccctatcactatggtaactttacatttatctgaattcctttttttttagacggagtctcactctgttacctaggctggagtgcagaggtgcagtgtcggctcactgtgcaacctccgcctccgggttcaagcgattctcctgcctcagcctcccaagtagctgggattacaggcacgcgccaccacgcctggctaattttttttttttgtattagtagagacggggtgtcaccacgttggccaggctggtctcgaactcctgaccgcaagtgatccgcccgcctcagcctcccaaagtgctaggattacaggcgtgagccaccgcgcccggccattatttgtattgttttttgtttgttttgttttgttttgttttgttttgagagtctcgttctgtcgcccaggctggagtgcagtggcgcgatctcggctcacagcaacctccgcctcccgggttcaagcgattctcctgcctcagccaccgcgcccggcccattatctggattctttagtacctgttcctctagactctacgctccattaaagcaggaactccatctgttgcaacacctagcacagcgtccggcacactgcagttcttcaataaatacttgctgcatgaagccctctcttcaccaccacccccacccctcctcctcgcaaaaaaaaaaaaaaaaaaaaaatgccccagggaagggtccctatctactctgtccaccactgcccagggcccatcagtgggcccaatggctatttggcgagtaaataaatggggtcaggagaaacgaaggggaaaggatgtgtcagaggccaggactgccccctaagatggaggaggcctaactctgggagcttccgcctctccgaacgagcgtcgccaagagaaaccccctcagaagcgaaaagggccaggaaaagaggtcagccccggccaggcaaagacatcacctaagctccccagcagccccgtgtctctccgccttttccttctcccttcccgtcatgggaaagactcccgcccgtgtcgtcacctacacacacgaaagagacacagggagagaggcttccattcacggtcactcacaggcgcagcggtttctgtgccatctgtccgaatagtatgggttgcgactgccacctaaaattgggaatgcgaatccgcgctccccggaaaaatgcgaccgcgcaacaatcagacgtcagcgccctccagccaataacggttcacttacttacggagaccgccgagggacagaagcctctctcaggtgtttgcgcctcaaggaagaatcaagagggaaagggaggaacgaagggagaaagagaaagtgaccgaaaggattccaactatgattttttaaattaaatttcagagcacttgaagcgaatgaatggctaggaagtacagagcacaatgtcgggttctaacctaacctaacctaacctaacctaacctaaccatatcggtctagtgggcaagacagaccccctctatccacgttttttgtaagtttttaacctatcaaaaagttaagaggccgggcgtggacgctcacgcctataatcccagcactttggaaggctgaggcgggcggatcacttgaggtcgggcgttcaagaccagcctgggcaacatggtgaaaccccgtctcttctaaaaatacaaaaattagccgggcatggtggagaattgcttcaaccagggaggcgggggttgcagtgagtcaagatcgcgccattgcactccagcctggacaacaagagcgaaactccgtctcaaattaaaaaaaaaaaagttaaaagaataatggctattaccttgattcagtaagtctcagcatgttggcaaatttgcttgtgttctctttctctcaaagtgcccaagcccttccattctcactcaatcatttgaaagtaaagtacaggccgggcgcagtggctcacgcctgtaatcccagcactttgggagatccagaccatcctggctaacacggtgaaaccccctctctactaaaaatacaaaaaattagccgggcgtggtggcacgcacctgcagtcccagttactcgggaggctgaggcaggggaatcgcttgaacccaggaggaggaagttgcagtgagccgagatcgcgccacttcactccagcctgggcgacagagcgagactccgtgtcaaaaaataaaataaaataaagtgcggacaacaggaatacatctccatttatctcctaagattaggatatcctcctacataaccgtaatactattaacacagctaagaaaattaacattaattattcaataatattacctaatatacatccatatttaaagttctccatatttccctacaaactgattttatatttggggcttgttttgattcagatgcaatcaagtttcacacttgcatttggttctgtctctattttaatctacaaaagccctcctacctatttggttttagtttttgtaatattgacttttttgaagggttcaggccaagtggtaggaaacaagtgtgtaaggaaatggaaacaagagagagttcctgacgactgcggggaaaggaagactcatcaagggcatctaaataattcaaaattaataaaacataagattaaagaagaactacaggccaggcacagtggctcatgcctgtaatcccagcactttgggaggctgaggcgggaggttcacttgagaacaggagttcaaggccaacctgggcaacatagccagacctcgtctctactacaaatttaaaaagaaaaaaaaaaaagttagctgggcatggtggccgtatgcctgtactcccaggtactccagaggctgaggtggggagatcacttgagcccaggagatggaggcttcagcgagctattaccttgccactgcactccagcctgggtgacacagcaagccctgtctcaataaccaaacaaaactacaaagttctggcttttcccacagcctacaagccttcttttttgtttgtttcttgcctcataactggtggctctgctttgctggcacataagcatgcattttttcctactctttggataatacagcactgcccaggagtagcactcaagactgaatcttgaagaagagtagaagtttgccaaacatgagcaggtaataattcccagaagaggatacaaaagtaagacataaaaactcatcgtatt

SEQ ID NO: 913554 - DNA, 4001 bp, Homo sapiens
ggcccagctgcctgacggaagtcagccaatgggggaggggcaggacccctggccaagctctctctgtagtgcagcttgaggactaagtgtggggatagggggcacataggcactgtgaggtgaggggaaaacaaaacaaaacaaaacattctggcgatgtgtgtaaggagcagatctgcctggagcccaggctcctgccctggttacttggctgccaatggggcaactctgagggccatgtcacccttcccaggccaggaggagtctgggatgaaccccacgtctctgtgcttcccccaggtcagttgcacccataactcaaagaccgaggttcctcattccaatcctctctccagccctccggggagggggcagcaccatttcccagagcggcgcactgtgacacctccgcgctcatcccaccaatcagtcaataactgcccaaaccagagaccttacaggaacagaagaatatccagcaataaaaactagaaacatgccccatgacttgcgggggggggggggggtcagtgtgcagacacagcctcagggacttttcatcaacgacgaacattcccaattgccttcagtctgtgtccttaacacttaggcagtccgccacgaccccaggctgcccagcttctccagcccgactcagctgcgctggtcctgctcacaccagcgcacagtccaagccagctaggacgccggggccacgtctgcaccaacccagccaagggctcgaggcgcgctgggcctgcacagcccgcggctgcaagagcactcagagtgtccttcaactctttgcaggaaacttcacagccaaggaagctcagcggcctgagccacagggttttgttttgtgtgttcagaggcaacagtttattttggtttgcatcggtgtcctgtgacagcgcagcgagtttctcttcagcgaaagaaaagaaaaaagccctctcccagtgaaacgggacaccacggttcccagtggcccagggccttggagattgaactttgctgcagctctcattctggggcaaagcgcttggccagctggtgacaaaagagcctgtctgcaggtgtgtttggggagctggggagggggcgtgtgaggctcggagggtccctgggcctctctcaggtgaacccgagaagagacaggaagacagcggctggacgcgcgcccaggtccgcgtcgctgcggaccgcggagctgtgcagaagcgcggcctggcgggtggcacaagcccgacagctgcgccgcgcagcccgcccgcgcctggccaagagccccgcgagggtgtggggagaggatcggcttcgcagggagcggaggctgcgcggctgcatcggacctcacagcctcaagtcgcggcatgaggcgaactttgcaaagcgcgctctcgccatgcaccgcccgacctccagcactgtgcgcagcaggacctcggagcccattcgcctgtggaaaccgagcccgcagcgggaaggcagtgggtggagggtgggcaggcaggggtctggggtccgcggctccccaccctcgcgccttcccgcgccagtcccgaacgctctcttggggcgttcctgcccagttgtcccggctgacctcgctctgcagccagcttgaggtcaggcggtcgctctctgcaggtcacaaaccctcggcgcaaaagtagggctttgaacgcgacaccgcaccagagcgcccagctaagcgagctgcctccacccccactgtgtcgggcggcgcaaactgcgggcgcaggcagaggagccgcggctctgcgccgggcgggagccgaagcccagagcctcgccagggcctccccgccgagcgcacttaccgtcgctgaggcagagcgcggtcagcacgaggaccagcacgaccacgaccttggcgttcatggcgcgggcgggcgggcgggcgggcggacgagcgcgggtcgggggccggacgccgagcgggcaatgcggctgacggagagtgaaagtgcggcggtgggaggcgcgcgccgggcgctttagaggggagagccaggcggggcggggcggggcgcgcggtgaggggcgggcccggagccgagtgctggccgtggccggggtctctgacgcgcgactccctcggcggcaccccccacccatccccttcgcccctcctccgctccctctgtgctcccgaggcgcagtgcgctccggcctttgaccttctcaggctccgctgggccccgcaccgctggcccggtctgcagtgaggtccgcagcctgagcgacgccggctggagggccgcttattgtccctgtgacagggccccactggagagactgaggaccttaggcgtaaagtggggcgcgcgtggaaagctgcgggacggggcctttcgatggcgggaactgaatgagaaccaatgaaaagcaaacaagttagtcccgggcggagggcctgctggcggtggcggcccaaggcagccgagggggtcctgctttctgtgcgtgggggctcaagctcgccacctgcccggcttgcggcgcagccgccggcagagctcgatctgcgggaatgagacccgtctttgcagtcagcgtggctcggactccaagcccacggcgccaccagccgagcctcagtttcctcgcctgtacaaacaaagcagaaggcgccggcggctctcagtaaaagcgaatgtagcctttgtacttccgacctctcaatggtgaaatgagctaatcacaggcccaccccgcggagtgggacgggagattcaatgagacccgccccacgccgcgaaattctctgcatcgtgtctgacaagcagacagtactcaataaatggtagctgtaagtaagtcctttaaacctaagtacttactgccttacccaagaaaagctccgtgcgacccaaagagctgagaactcccccaccccgacctccgactcctaggacagtactactggcgtctgccttctgggtccagaaaactcttcccacggagccgtccctcggcggtgcttagccctccggatacccccgagacatcccagatggccccagtccggtggcgaagggagggtgcaggtcggcacccaggagacgtgggggtgaggagagcgcccctttgggcctcgctttgtgaccgcaggctgccccagccacctctctgtgtccttcccagcacagcgtccagcgaagtggggtcagtcgccgcgtccatccaggggcctgccctggggacacgtccctgtccctggggagtcctggccgtcggggagtgggcggtcagcggctgcattaggcgggagcggtcaacaggaggctgcgagggctccggaactccgctggtgggagtaggtgtcttctgtgcattttttttccaaaaccactttggccgttagatggctgtgggccggcactccatccatccatccatccatccatccacccacccacccacccacccacccaccctgggcactgggcttggagccgggaaccccactgacttggccctgctcttaaagaactgaaggcagtgaggtccagtgaagaaggcagccgtcgggcgtccccaggcctttgctgggctgggccggggagcctggccgctcaccggccgcagcgctggggctccggcgccctctggtggcggcgcctccctccccgctcccagagctctggccagctccattcctgcgcagctgatgaaacccgggagggcgaaggggtccgcgggaaatctacacccgggtggaggggcgccctggagctcggagatccgaccctgcgggagccgcgcgcagcctcgcttgcccttaaatctggccaaagcaaacgccatcgcctctcgcttcttcttcttctttttttctttgccacaaaatcaggtgggcagctggacctaggatctgtcccagaagcctgaaaggcccgcgtgggctgagtcgagggcgaaccagggattcaggcctggccgctgcccctcccgcaggcgccctgaggccc

SEQ ID NO: 913555 - DNA, 4001 bp, Homo sapiens
actccaccatgactgcaaggacttggtaggacagaccctaaggcctcctactcccaattccttcagaaatacagtagatcaaggagaaagaaagaacccttaattagaatgcagcagcattggggttcttttcgctgacagggtgccctctgggcttctttttgctcatcagtttctgaccacaggaaggcaactctggatgggataaactctctaaactatgcctgtccagagggtagggagcaggtgagcttgtagaggctgaggactgcacagatctctgcttttccctgagcccttagctgagctaaaggcacagctcacctcactcaggtttacccttccattgcaagcctgcatacccagccacaagcccacatttggagagtgcagatgttttgtctacccagtctggacttgggccgagccgcctcctcctagaggtgccccccaaagcaaaagggtccaaagcctcccttttccatttcctgaccctgaagatccacatgactagccttctccatcttctctgcccccgggaggaagccagcagaggtgggagctaggtagttggtcagcagacctggctgattggtccaagaaaaaataaaccaacccttggcttgatcaaagctgagaggctggcagggcacagtggcttacgcctataatcctagcactttgggaggctaaggtgggaggatcacgaggtcaggagatcgagaccatcctggctaacatggtgaaacaccatctctactaaaaatacaaaaaattagcgggcatggtggcatgctcctgtagtcccaggtactcaggaggctgaggcaggagaatcacttgaacccgggaggcagaggttgcagtgagctgagattggccactgcactccaggctgggcgacagagagagactctgtctcaaaaaaaaaaaaaaaaaaaaaaaatgctgagaggctgggggccctgctgagtgggaggctcatcagcaaccctgaaatgtcattgtagaaaactgcccctgtgagcctgagtagctggaaatagcaccaggaaagcagcaatcccagcctgcaatagctaggctaattctccccagcagctttcatggaggacagtagtcactgcccccattttccatgaaaagtaacatgaatcctggctgtataaggggcacttactgtgctgggtgctaggctaagtgctgtacatgcaccttctcagtccattagagaagtctaggctcagagagaggagtggagtgaggattccttgacccctcagaccactgtggtcctcccatcccacctcctgggcagcctggtagaggagacattcctttaattcttcctgcctaatttagaggctgggtgggggtctgaaggttcactcccttcacatcatcccactagtctactttgggaagaattacaggttgttggagctggaagccccattctaggcatggtctgaagacctgaacaatcccagggggtggtgaagggggcagggaggagatgggcaccacttaccatttgaggccgcccagagaagtccttgcccttcttaataagcacctccttggccagctggtggtggccgacaatcactgtagtcttggtgcccatacgaaccgaatagatggggccatattttttctgcagcttgaagaagttgttatgcatatggccgtgtctggggaggaatggcaggctgcccaccaggggcagggacaggaggctcttggggtacttggcaccagggcaccttctcttgggccaaaacaaataagctagggtaagcagcaagagagccacgagctcccacatggtggctgggtgccggcaggcaagatagacagcagtggagtagaagagctgtggcaactctagggcacaaggaggccttttaaagggctaccctgatcttcaccttgactttgtgttatctcttgccttgtggaaagattctcctggagcccagccaggcctgagctcatatccagaagggagagaggcggtgggagtgaaggcctcctcaagggctggctcaactccagggcaaacctccggaggaggagctaggtaagggaggtcagttgatcaccctctgaggagctccccatgcttgaatgactccagagtgcgaatggtatctgggctcaggagtcaaggcttggaactttccatgttgcaaaatcaaaatcactggacagatgacagattcaggagggtcacaagtagcagggactgttaaaggtcttttatgcttctttttttttttttcagagtcttgctccatcaccaggctggtgtgcagtggtgtgactgtccatgcagccctggccctccagcccatgtggttttggcagcgataagggctgtgggttaatggtccccaaaataaaaatgtacatgtgtatgggaacgaaaggggtgctaagctgtggggagcggtggaagggaagggagagataggtcagtactaggaatgccagaggtgggaggccgtttcataacatttcttgttgatcaaaatgccatcaacaccttctttgctcatcagcaggactagcgtactgggggaacccacccccaatatttcaacgtaggttctttctataagtgtcagccggctgagaaataaagagagacagtataaagagaggaattttacagctgggccgccgggggtggcatcacatatcggtaggactgtgatacccacctgagcctcaaaccagcaagtttttattaagggtttcaaaaaggggagggggtgtaagaacagggagtaggtacaaagatcacatgcttcaaagggcgaaaagcagaactactaataagtgtctaacaaagatcacatgcttctgagggaaaggacaaagggcaaaagcagaactaccgataagggtccaacaaagatcacaaggcaaagggcaaaagcagaaccactgataagggtccaacaaagatcacaaggcaaagggcaaaagcagaactacagatgagggtctatgttcagcggtgcacatactgtcttgataaacaccttaaacaacagcaaacagggttcgacagcagagaaccggtctgaccacaaatttaccagggcggagtttttccccaccctagtaagcctgagggtactgcaggagaccagggcgtatctcagtccttatctcaactgcacaagatagacattcccagagcggctgtttatagacctccccccaggaatgcattcctttcccagggtattaataataatactccttgctaggaaaagaatttagtgatatcttccctacttgcatgtccatttatagcctctctcaagaaggaaaatatggctctttctgcccgaccctgcaggcagtcagaccttatggttgttttcccttgttccctaaaaattgctcttattctgttctttttcaaggtgcactaatttcatattgttcaaacacatgtcttacaatcaatttgtacagttaacacaattatcacagtggtcctgaagtgacaaacatcctcagcttacaaagataacaggattaagagattaaagtaaagacaggcataagaaattataaaagtattatttgggaactgataaatgtccatattaaaatgaaatcttcacaatttatgttcctctgccatggctccagccagtccctccattcagggtccctgacttcccgcaacatctctccctttctttttatataaatgtgccgtggcgatgaaggcttgctcgttctctcggttttgatgcaggattctttgactggtctggcacactaaaaacaagccgattaaacagagaaacatgattccaaaatttcctacagtggagcccccagtagacttaatccaagttgtggagtttagtccagaaagactttctgccacctgatctaacgcctcagctccaggcacaatggataaatgagcttgagaggcttcaaaaatttgtttctttaatttagttatgtcc

SEQ ID NO: 913556 - DNA, 4001 bp, Homo sapiens
gtggctgcactggccgtggtttcgtgtcctccaaagaggagttcggttgaagattgctttagtgcctaagaatagagtgagacccacattctcacaagtctgcctgcggtttgacagaaggattactcagaatcgaactgagagttctggagggaagactagaagggctaaatgttttgctgacagaaagtcaaggaaagcaatatctttaaacaaaatgcaacgtccctttagttcagctggagcagtaaggcgagtacgaccccgctctaccggaaactcctgagttaaagtcttagttttattaaaatcgcaaggttctttattaacatttttgcaaattccaactttccctttgaaacctggaaaggctaggggatgctcccagttccgccgcagccccttccgcagctctcctgaccgggtgtctcagccttccttcgggattccatagctgtagtctgagccggccgcccactccagaaagctgggccccaggcgcgcgctttgggggccccaggaacagcgcttggaaagccaggggaccaaactccgcagtgcctggtctgaagctgctactcacctgcatgtccagccgctctcccctctcccacgagtgctcgatcaacagctgcagcgcgtctttgcagccctggcccgcctcggatgcccgcagcccgcagatcttggcgcgaatgttctgctcgatgcgcgcgtgaatgaggttccgcgccttcatgccctgagcgcagagagcgcgcggcggtgagcagacgcccaggtcccgcgcccctagtccgcagcccgtttgccgcccttacccggtacagcccgctgaagggcacgtcgatgggcagcgagaagagattgcgggtcatttcctcgaaggcctccacaagctgctgctcggagtccccgtcgcccgccagttggggttcgcagcccagtaggatgcgcatggcgattcggaacatgaggcgcttcacctcggggtagaccaggaggccgcgctcgccgcagctcagccactgctccaggctgctgcccacttcctcggtgatcaccggcacgtagcattcgagtgcctcgcggctgaaggcccgcataatcacctgagtcccgaggaggggacagcgttaaaagcctccatccgcccctctcgtctaccgccgtccccttccagacacccccagtcctgccagacacatggcactctccgagctgggaaagctaacctggagctggcagagggtcctagcccacctcaagctgctagcccgcgcctagcatccatcagccggaattccgctcataaatggggtccccctccctgtccagccgtcgcctcctgcccccaccttcttgcgctgcttgtgcgaggagtcgtgcaggttagagaggcagccagatcccagaatggtgcgcaccgacgctggccagtggaccgacaccagccggtgctctccgagcaagatgcgccgcacattgtccgcgcccatcacccgtacggtgggccgcccgaacagatgcgtcttgtagatgaagccgtatttcctgcgcttcatctgcaggaacttcctccgctgtgggaggaaggcggaggagagaagtgggcatgagggggcgccggggagcgccgcgctcccgccagccctgctcctagccgcaatagcatgcctcccgggggcgcctaccccgacttcagcagaagcccagagccgcgccgggctccggggaagcagcctgtcccgccccaccctcccttacctgcagtaccatctgcaaggtttccccaaagaaggggaagcccatagtcccggggggcaatgggagggcacaactgcggtcgcggccgctcacgcagtacaggtcccagagcttgatcgcagccaggaagagcagcagcggcagcacgaaggtgcagagcgcactggccagcagcgccgggagccccatggcgcgccgcgacctcccgcgccacctgccgccgccgccagcgcttcaaaccccacggcgctgccgctttataggcggcccaggttgctgcccacgttaccttggtcagacaattagttcacccaaagttcatctttaattgcggattgggcccctggctcctccccccgcgaggcgctgcccaaaatctttaaccgtttgttccgcgccgaggcagaggcggcgcggtggcggcttccctccgagcgcgcctcctggggtgcggggctaggagctgcccgcctcccccatccaaggtgtgctgagctccgaggcggcggtgggggagggccaggactccgaggagccggaattccaagctctagccttcccggcggtctctttggaatccctcccgcccggtcccacccgctgccccggcccaaagcagccttcactggctttccatttccaggtgccgggtgggctctcttccacgtgatgaggaagcaagggaaagtcctttcaggaatcgtccagctgcctcctcccacgtgtggggaaactgaggtccaagagagatgcataaagcaggcctccagacgtctccgaaggatcgcgcagaagaactcagggccagagtccaagagagagcctcggggcatcgggcgcaataggcagatctgggatccccagctccccaacccctgcaagggggccaggactcatgaagtcttagaaggtcctacttcaggatacaagaaggcctccaggtccctcaggtccccaggtgctaccctgcacaagcctgatccccgaccctggggcacttcgtctggggctcggcagtcggtgcccgtctctgagatccaagcacagctcgcctattcggagggccctgctgcttggcgccccagctggacagcagggaagggggtccttagccctggcaggataaagagacggtataagaggaaggggagcccaggagtcctggctccgaggcccggctccatctgtactgcgtgtgaccttgggcaagtcaccacacatcactgtgcctgtttcctcctccttaaccgggaggcgatcattcccgacctgtctaagcctcagggtagtgagttcccaaaagggggctccggttgcaactactcttcccagctccaggcacggtagactgcgttacctgggtgtccggtacaccgggcactggagtcctcctcctctctcccaagtcccacccagagtaaagccactgtcctcatccaggtgagggggtgctcggccctaaactcagggctctaccgacccctaatgggaggggtgaagggatccgtactgggaagtcttctgtactttgcccatctacaatcagctgctactgagctgccaatgcccggagctcagacgctgcgggacgcgcacctgctctctctgctctccacctgccggagcttcccggctcgggaccagtcagggtcacacgctacctgggtttgggcgctgaacgcacctgcggcgccgaaaatgaaacagaatgacctgcatttgtttaaaactgaacactgtctctggcagaagcacgccgcacgccttggaaggcgtcccttggaggtggaaaactctgctcctgagagtttaaatgcgttgcccttctcgcggtagtccccaaacccggaggtatcaggaaatatctgcagaggtcggagggacccgcacaatcctagcgactctccaagccagagtcgccgccacagggagtgtttcggggggtcagcgtttccccataacctgcccagtgtttcagaggctctgggcagggtttcagtctccggcaaacgatttggtggctgtaaacacggcgaaccaacctctggccactgcaggaagccaggccaatcgcgctggaggtaattctcagaaatcccgggtccgcccctttctggacagcgcctccggccggtgtgcaaagccgacgaatggggacgtgacctggggcccattcccaatcctcgggcctgacccgcctgtgacccctgcaggccggaccgtgacatccgagt

SEQ ID NO: 913557 - DNA, 4001 bp, Homo sapiens
cctgaccgggtgtctcagccttccttcgggattccatagctgtagtctgagccggccgcccactccagaaagctgggccccaggcgcgcgctttgggggccccaggaacagcgcttggaaagccaggggaccaaactccgcagtgcctggtctgaagctgctactcacctgcatgtccagccgctctcccctctcccacgagtgctcgatcaacagctgcagcgcgtctttgcagccctggcccgcctcggatgcccgcagcccgcagatcttggcgcgaatgttctgctcgatgcgcgcgtgaatgaggttccgcgccttcatgccctgagcgcagagagcgcgcggcggtgagcagacgcccaggtcccgcgcccctagtccgcagcccgtttgccgcccttacccggtacagcccgctgaagggcacgtcgatgggcagcgagaagagattgcgggtcatttcctcgaaggcctccacaagctgctgctcggagtccccgtcgcccgccagttggggttcgcagcccagtaggatgcgcatggcgattcggaacatgaggcgcttcacctcggggtagaccaggaggccgcgctcgccgcagctcagccactgctccaggctgctgcccacttcctcggtgatcaccggcacgtagcattcgagtgcctcgcggctgaaggcccgcataatcacctgagtcccgaggaggggacagcgttaaaagcctccatccgcccctctcgtctaccgccgtccccttccagacacccccagtcctgccagacacatggcactctccgagctgggaaagctaacctggagctggcagagggtcctagcccacctcaagctgctagcccgcgcctagcatccatcagccggaattccgctcataaatggggtccccctccctgtccagccgtcgcctcctgcccccaccttcttgcgctgcttgtgcgaggagtcgtgcaggttagagaggcagccagatcccagaatggtgcgcaccgacgctggccagtggaccgacaccagccggtgctctccgagcaagatgcgccgcacattgtccgcgcccatcacccgtacggtgggccgcccgaacagatgcgtcttgtagatgaagccgtatttcctgcgcttcatctgcaggaacttcctccgctgtgggaggaaggcggaggagagaagtgggcatgagggggcgccggggagcgccgcgctcccgccagccctgctcctagccgcaatagcatgcctcccgggggcgcctaccccgacttcagcagaagcccagagccgcgccgggctccggggaagcagcctgtcccgccccaccctcccttacctgcagtaccatctgcaaggtttccccaaagaaggggaagcccatagtcccggggggcaatgggagggcacaactgcggtcgcggccgctcacgcagtacaggtcccagagcttgatcgcagccaggaagagcagcagcggcagcacgaaggtgcagagcgcactggccagcagcgccgggagccccatggcgcgccgcgacctcccgcgccacctgccgccgccgccagcgcttcaaaccccacggcgctgccgctttataggcggcccaggttgctgcccacgttaccttggtcagacaattagttcacccaaagttcatctttaattgcggattgggcccctggctcctccccccgcgaggcgctgcccaaaatctttaaccgtttgttccgcgccgaggcagaggcggcgcggtggcggcttccctccgagcgcgcctcctggggtgcggggctaggagctgcccgcctcccccatccaaggtgtgctgagctccgaggcggcggtgggggagggccaggactccgaggagccggaattccaagctctagccttcccggcggtctctttggaatccctcccgcccggtcccacccgctgccccggcccaaagcagccttcactggctttccatttccaggtgccgggtgggctctcttccacgtgatgaggaagcaagggaaagtcctttcaggaatcgtccagctgcctcctcccacgtgtggggaaactgaggtccaagagagatgcataaagcaggcctccagacgtctccgaaggatcgcgcagaagaactcagggccagagtccaagagagagcctcggggcatcgggcgcaataggcagatctgggatccccagctccccaacccctgcaagggggccaggactcatgaagtcttagaaggtcctacttcaggatacaagaaggcctccaggtccctcaggtccccaggtgctaccctgcacaagcctgatccccgaccctggggcacttcgtctggggctcggcagtcggtgcccgtctctgagatccaagcacagctcgcctattcggagggccctgctgcttggcgccccagctggacagcagggaagggggtccttagccctggcaggataaagagacggtataagaggaaggggagcccaggagtcctggctccgaggcccggctccatctgtactgcgtgtgaccttgggcaagtcaccacacatcactgtgcctgtttcctcctccttaaccgggaggcgatcattcccgacctgtctaagcctcagggtagtgagttcccaaaagggggctccggttgcaactactcttcccagctccaggcacggtagactgcgttacctgggtgtccggtacaccgggcactggagtcctcctcctctctcccaagtcccacccagagtaaagccactgtcctcatccaggtgagggggtgctcggccctaaactcagggctctaccgacccctaatgggaggggtgaagggatccgtactgggaagtcttctgtactttgcccatctacaatcagctgctactgagctgccaatgcccggagctcagacgctgcgggacgcgcacctgctctctctgctctccacctgccggagcttcccggctcgggaccagtcagggtcacacgctacctgggtttgggcgctgaacgcacctgcggcgccgaaaatgaaacagaatgacctgcatttgtttaaaactgaacactgtctctggcagaagcacgccgcacgccttggaaggcgtcccttggaggtggaaaactctgctcctgagagtttaaatgcgttgcccttctcgcggtagtccccaaacccggaggtatcaggaaatatctgcagaggtcggagggacccgcacaatcctagcgactctccaagccagagtcgccgccacagggagtgtttcggggggtcagcgtttccccataacctgcccagtgtttcagaggctctgggcagggtttcagtctccggcaaacgatttggtggctgtaaacacggcgaaccaacctctggccactgcaggaagccaggccaatcgcgctggaggtaattctcagaaatcccgggtccgcccctttctggacagcgcctccggccggtgtgcaaagccgacgaatggggacgtgacctggggcccattcccaatcctcgggcctgacccgcctgtgacccctgcaggccggaccgtgacatccgagtgaactctgcggggccacctcgccaagttcagctcaagccgggtcacaagatgagcggggcctgcacgctggaaattgccgcagggaaaaaaacgttttaatctatctgtacatcgaggccggcgggggcgtccggcaggaaaggattaaatgtgagagtgaacgatcattaaagaacatcttgtaggggggcagggcggggggtggggggtcaataaattaccaggccaataggaactttgatctaggaatctcgccaagctttcgtgggtggtggtgggcggggaggggggtgggttcactgaaaaacaactcgtttccaagatgtttacaaaacagcctccctattgctaagaggcggggatggggagtcgggttttttgtttttttgtttttttgttttttttgctggtggg

SEQ ID NO: 913558 - DNA, 4001 bp, Homo sapiens
gcttgctcaggctggagcgcgtcgcggcaggcgcgtcccacggaggtcgtgtggccagccccaggtcacaccagcgaaccagcacagaggccaggcccagagcccaccgccacgccaccgccacaacgcctcccacccccgggccctgccgccgttcccagcagaggtgacggacgcgcggggtgcgccgagggcgtcccgtctgggtctgggaggcccgcccgcgccgcggagcctcggaggaaggtctggagccggggcggccgtaccttgcgtaggccactgaagggaacgtccagaggcagtgagaagaggttctccacgagctgctcgaaggtccgggccagcgtggcgcactgcgcctcgtccagccgcaaccccagcaggatgcgcgcggccatgcggaaggtgagcgctttggaggcgtcgtagactgagaccggcccgcccgccgcgcaccaggagcgcacctcatgccgcagcgccccctgcaggcgcggcacgtagcgctccagcgcggcgcggctgaacacgcgcgccaggacctgtgggagcgcgcgtgatcagcgctggcggcggtctggcctcatctgcttggcgattccggagtagccagaaggccagttccggtcctttctccctcttccaagcggcccagacctaaacttcctggcttttgctttcgccatttcccccagttctgctctgatgcacacagtccctcccaaccatccaggctccagctgccatctcctctaagaagtcttccctggcccctttctaggtctgagtctccagcgcttctgctatcacagccacggaagatgggagatgaaagaatcttttagcgcagtcctaactttataaaccgaagctgaaggtaacggacccgcccaaggccacccgctagttaccagggaccttggtcgggttcacagtgtatccaacaccggggccccggcctggcccatggcagatgccggggaccgcggatccgacgtatctacggtccattcccgtttccactcaccttgcgccgccgccggtgcggctcgccgaccgcacctagcagtgtgtgcgagcccagcaggatgtgcgcactctgcggccactggctgcgcaccaggcggtgctcgcccagcaggatggtgcgcacgttctccgcgccgctcacgcggatcactggcctgcccagcaggtgcgtcttgaacactgtcccatagcgctctcggcgagaactgtggaagcgcgagccctgcgggcgaggcggagggtggagagctggaacttctgggcctgggctgggatctgacccagaccttccagctgccttttgatcacaacttcctgtccctggctggcgcgtttacaaaacaagatccccagtgggcctggtatctactctacgggaatgtacatgctcctgttcctattggtgagatgaggaaacagactcagagtgaagaagtgagggcccaagggctcacagctgggccaagctccaggctccttttctacccttgcaggacgtgctcctcagaccccttcctaaaaccccttatgtttaccccctgcgttgtgtctgggagttgctctggggggaattccagtgacttgaggtcccttcgagggaacggagtatctaggtaaaggcgagagttgtgcgcgcttcccggggtcgtgggcgatgggcagggactggctacaaatcccatgggcattgagactgaggagggtccagtgggagccgggggaagaagggaccgtattagcgctcggggtcgaaggactgctcacctgaactaaccagtgcagcgtttcgccgaagaagggccaccccatggagcccttgggcagaggcagggtggaggcccggtcccggctcagcatccagcggagggtccagaggtgctgggccaggctgagcagcaggcccgcgcacaggagagcagtgcccgccgcccccagcactgacaggcagctcagcccccaagggaacatgatgagcccgcgggggccaggccgctcagagcgcagggagagcaggggacgcaagaaccggggcgcgagcagtgcgcagtgctcacctgttccgtccgcaaaaggcctggggtttgggggcaaagcccgagatttataagctcaggccagaactctgttctaaaaacagacggacggtgaaagactgcagtgaccgtgcgcccttagggaacgtgccttcctcgaggccggcacgctcaggactttttcctggctcctgggcccaaatgccagtccctctcgaaggtgcctgctgcctcgggaacgctcactcccggctccgcggggcacctcccacctcctcccgggctcagcaccctttggatagaagaagggaaggagggcgaaagaagagcaactcaccagtgttgccaacctggtctgcagacccccgccccacctgtccctcctccagtcgtttaacccttcttggcccacgctggacacgtttatatagatattggctccccccctacggaccgatcccggttcacacaacgtgacgtgtctttgcatatttaaagcgctccacgcagagtggtgattggaggcggtgggcagcggcgcgctcacggaggggctctgagtagggagtggcaggcgccggggcggctcgagctgggctgggggctcgccccgcgagcgtcctcgggcggggcctgcgggttcgcgccagagcttccccgctcttcgcaggcgctcagaaagtgggcgaacccaacgcgcagaactgacccgggcttgcgccccgcagtgctcctggcccacccccggccgctggctccctctgccgtccccgccctcgagcttctaggtgcctttctctcgccactccaaggtgaaagaactgggcttttctctcctttgctccgactatttcagggaaactgcagtcgtcgacgcctgcgttggcatcgcaaaagcccaggagggatagcgcagccgagattctccgacagctccccacctctcccggctctctgatctaccacgtcaggtatccttccaaagatggcagttccactactgccctaggcttcataaagacgtcctaagcctccagaagcggatacccacgagcacctttccggtctcaaggaccgaattcatccttccctgcacatccttccctccctcccccgagtttgcccgacgactcttgtcaatctacattgttgcgttttgggctttgtgcgtcccattcaagggttccaaatgcctcaggactcactcgttcttgtccctacagtgcaacctggggtgtgtgtggaggggtgcagggtgtttatattattggtaagagtaaagaggtcccacagtggtctcctccaggcagtgcaaaggcagtatctctctgaatcccgggacgtctcagccaaagcagggaagacaccccaagtacgctggaaggctgggtaaggcgcgaagggcagccccattccagtcttcaaagagagctagctgttcaccgctcctctcctccagatttcaccgtgcctgaagaactaccatgcttttcatgtaatatttttaaaaacattaaatactttggattaagagatgatcgagagaacaagtgcgcatatgtatatatatgtgtgtgtgtgtgtgtgtgtatgtatatatactgttttggtgccactcccattccagtaactaggaaataatatgccttttctccaggaagcacttgttttaaatcagtaagctctgaatagacaaaatagtaatgcattttcaacaacttgctcaatatttttaatatttcatcacaaaatccagagatgtacatataattctttacacttattttacagaatcaggcatagtttcttacaggcctaaatcctgaaaaggcaaagggaagattcagcataaatacaacaaagggagaataaagactggatttatattgccatttggaccacggaaacatacacaaaggaaaatgtacatttgtt

SEQ ID NO: 913559 - DNA, 4001 bp, Homo sapiens
aactccatgacattggtctaggcaatgatttcttggatatgatcctaaaagtacaggccatgaaagcaaaactagacaaatgagattctgaccacccaaaatacttagaaactcaaattactcaataacaaataaataattctatttaaaacgagcaaaggggtcaagtgcaatggctcatgtctgtaattccagcactttgagagacaaaggtgggtggattgcttgagcccaagagttcaagaccagcctggacaacataatgagaccacatctctacaaagcattaaaaaattatccaggcatggtggcatacacctgtagccccagctacttgggggtctaaggtagaaggatggcttgagcccaggagctcaaggctgcagggaccatgatcccatcactacactccatcctacaacagagcaaaaccctgtctctattaattaattaattaattaattaattaaatgggcaaaggatttgagtagacatttttcaaaaaaagacatacaaatggccaagatatattttttaaatactcaacaaatttaatcatcagagaaatgcaaattaaaaccacaatgagataactcatcacaactcatagataagatattattattatcaaaaagataaaaagataacaagtgttgacaaagatgtggaataaagtgaaccttgggtatgtaaattagcattgtgatttgagaaaacagtatggatgttcctaaaaaaaacaaaaatagaactatcagatgatccagcaatcccactaccagtatatacccaaaggaattgaagtcagtatgtggaagacatgtctgtacttccatgtttattgcagtgctattgacaatagccaagatatggaaacaacctaagtgttcatcaataaattaatggattttgtatgtgacatatatgtacaatgaaatgctattcagccttttaaagaggaaaaaatattcttatttatgacggcatggatgaatctacagaacatcatattaattaaataagccaggcagagagaggcaaatatcatatatgatctcacttctatgtggaatcttaaaaagttaaactcagagaagtagagattagaatggtggctaccagaggctggcaggtggagatgggccaaataaggggatacgttggtcaacaggtacagagttacacttagataggaggaataagctcgggtgttctattggacagcaaggtgactataattaatattaatgtactgtatatttcaaaacagctaaaaaagaggattttaaatgttctcactacaaagaaatgacaaatatttgagatgatggatatgctaattaccctgatatgatcaattcacaatctatacatgtatcaaaatgtaatattgtaccccattaatatatacaattatcatttatcactttaaaatgaaataaaactttaagaattgtgaggttaaatacaccttgtacattactggaggaacataaagcatacttacattggttaaggatttgctcatgtccttaacatctaactgcaggatatttccaataatcgggagaggagtggggccagacgggagcctccctcttccagagctctgcctccagagtgaaaggagaaacaaacaggagagacagagcaccagagccacagctggatccattgaaggcttctcttcttagtaagacaactgcgggctttcacttcaaggcttttataacactccctactaatccacctgtgattctgactctgactgtgactagtcagcaaaaagcactttaatctctcttttgaatgaacattggctcactgaagaagataaaaataaggtgttcttttttcttgttctttccggtgccccaccctggagattctggtttaactagtctgaagcagagcccaggattttgttgttgttgttgttgtttttccttgagatggagtttcgctcttgttgcccaggctggagtgcaatggcaagatctcaactcactgcagcctccacttcctggattcgaacgattctgcctcagcttctggcgtggctgggattacaggaatgcacaactacgcccaggtgattttgtatttttagcagagacagggtttcaccatgttggccaggctggtctccctaagtgctgggattacaggcatgagccaccgtgcctggctaggcctaggttttttcaaacagcccaggtggttccactgtgcagccaaaattgagaaacaatgaaataaattatttcatcaaaaaattattcaaaattttggatttttagattgatgagcagttggaaatatgactttgagggcaatctgtgtattatattccttgtacataaaataatgtttatcctattgagaggagttagccagcttgcattaggcaggcagtaagggaagggtccccagagaacctccaacccttccaggtcattgcccaatccacaaaaaccccaagtacttacactagatgttttgtgcagataagggaacttgcacagggagcttgcctaaatatgcccacagtgaaaaattcctacctttaacacatgcgcaggaagggaaataaatcaatatggagtggcttagactaagagcccacacgcgcaatggaaggaaggggtggaaacaccaggaattcacgccttatgcaaataagtatcccagcctcatcagcttttctataaaagtcctggtattcaactgtgaagtggcaatctgcaacctgctttcagggcctctctctttgctgagagttttcctttcacttaataaattctactccactcactctccagtgtctgtgtgcctaattcttcctgcataagacaactcggacctagctgagctaaggatctgcaagactgcaacactataatgctttctcaaacactagatcattttccttgaaaatgagatccttttgaaatattttaatgtagtactaacattacagctgcctaaacataaagcagctaacaaactcattcatcttaaatggctaaaccggttatcaattaactaagtaaacatacacacctttttccattaaaccccgtgaaaaacactggacggctgagaatattatttcatattttccaaatggggaaagggagactctaggagaacagatgacctgtccagtgtcccacagctcataaatggcaggctgggatttgaactgagatcttctgacgcccgctgtggtatattctcacttacaccagagctgccttgagaacagttttagcaaaataaaataaatcctaaaaacatttctcactctgaatctacaccacactgttcacaaaataacagggttgtacattctcaagagaagaaataaaagctagggtttctcccctctctgtcactgaagagctgaaacctactcagtataactgaggaaagagccaatctcagagaattaagtgggtaagatctcagaaactatggcttctccagctcccacttgcctccagacactgctgtttctattgcttttttggtctgtgtcagaaataatggaatgaaatattgcacagcaaggaaggggaattataggcagaacaacaggcatgtgcttcagtggtgaatgggaggtagggaaatcattaaacagacccatggcacagaacaaacacagttgtgcagacctgaactggagatgacatttagcgctcatgaggctctatatatcactaaaatgatacatacatttctagatcactaatggcaatgcttgtacaaaggcatattctgtaaagatgtcattgtggtattctaaatgactagtacagttatttgtttatttccattgtatatatttaaggtatacaacattggtagacatataaacagtggaatcattactatggttaaacaaatttacatattaatcaattctataattaacttcttttttgtggtataagcacctaaaatctactcttttagcaaattttcagtatagtata

SEQ ID NO: 913560 - DNA, 4001 bp, Homo sapiens
actgacccactggccctttcactggcctaaagagttcccctccggaggacactacaactgcaggaccccttcttcacccctctccagcaggaagtagctacagcagtcatcaccgaattcccaacagcagttggggtgtcctgtttaaaggggggattgagaggtgaagccggctgggcttctgggtcaggtagggacttggagaacttttctgtctagctaaaggattgtaaacacaccaatcagtgctctgtgtctagctaaaggtttgcagatgcaccaatcaacactgtaaaaatgcaccaatcagctctctgtgtctagctaaaggtttgtaaacacaccaatcagcactctgtaaaaacagatcaatcagcactctgcaaaatggacaaatcagcactctgtaaaatgggccaatcagcaggacatgggtggggccaaataagggaataaaagctgcccacctgagccagcagcggcaaccctcttgggtccccttccatgctgtggaagctttgttcttttgctcttcacaataaatcttgctgctgctcactctttgggtccacactacctttatgagctataacactcaccgcaaaggtctgcaacttcactcctgaagccagcgagaccagaaacccaccaggaggaatgaacaactccagacatgccacctttaagagctgtaacactcattgcgaaggtctgcggcttcactcctgaagtcagcaagaccatgaacccagcagaaggaagaaactccagatgcatctgaacatctgaaggaacaaactctggcacaatatctttaagaactgtagcactcaccacgagggtccgtggcttcattcttgaagtcagcgagaccaagaacccactggaaagaaccagttccagacacaaaagcatactaataacacggggccttcaaacactgctctccctgaaagtgatgacccttaactagccccaccaatcttgccctgccccctaccatcaatctagtaggagtagtcttcataactacagcctcattctcttgatctgatcataccatcatgcttataaggcttaatatactaatcgcagccctttactctctgtatatgctaataactacacaatgaggtgtattcacatatcatattaacactgttaaaacatcttttactcaagaaaaaaccgtaatgcttatacatcttctaaccctctttctactattactaaaccctaaggtcattttggggtttatatattgtagctatagcttaattaaaacattagtttgtggatctaataattgaagtctataacttcttatctaccgcttatctgcttttgctggtcctaaacccacagctgcttcctttacaacaggcataaattatttcttcagagaagttcaattttcacggctattctgaataaaacacatggctaatatagtagaggacttatttaataaaatctctaataacaaacacttcccttactgtttaccctcagccaaaaattctagcaaatggctatgaaataaagaaggaacacaacatttcaaactattgacagtttgttattctgaatttaacatgcaaagacctaaatctttctctaataacaaaatatattatttcattccactatttctgacactgacagactggaaaaggcaacaaaagcctttcaaagtattttactttacaatgatctcttgtaacattgtacctctagggatatactttatttaaaaaatacaggtgaatttacttaccttttgcaagccactgaaggagcatacttacattggttaaggatttgctgacatccttaatatctatctgtaggatatttccaatcactgggagaggagtggggccaggagggagttttcctctcccagagctctgtctccagattgaaaggagaagcaaacatgagagacagagcacaaggaccacaaaaggatccattgaagccttctcctcttgttaagacaaccgtgagcttgcactccaagctttttataacactccatgctaattaagtgtgtgtgcctctttgatggataaagtggccaatcacctaggcccactatatgctccttctgaaaggactttgacccactgatagagataaaaataaaatgtcctttggtcttgttctccttcgtcccagtgcccactctgtacattctggtttcattgtactaggttgaagcctaggtattggtaataaaaacaaaaaaatgttaacccaagtggttccaatgcaccgtcataattgagagcactgaagtaaacaatctgatgcaaaaacaattacttaaaattctgaattcttagattaataaccagttgggaatttatgatttaacggaaatggccatattctatgccttgtatatttaaaaagtatgtcaatcctatatcgaagattaggagactttgtcctttataatgaaatcctctatttaatatagcctactaaaaatacagcagcctaaacatgaaatagctaacataactcatatatcttcaataaccaaacatatatcaagtaaattaccttagcagatataaacacctttaccatttaaccccctaaaaaaacacgtgaaggcaggaattgttattttttatatttcaaatgggaaaagggagaccctgggagaacaggacacctgttggtgccacacagctcatagctggcagaactgggatttgagctgaggtcttctgatgcccatcgtggcgcattatctcttacatcagagatgctttgagaacagaagacacaaatttgaaaaaaaaaatcgtttgctaaaactttgttttagcaaaacaaaacaacttccaaacattagttattctgaatatataccacattcatcctgttcataaaacaggcttcacattaaatagaaccacttatttatctaaggaaaacagccccagagatgctcatgagaaaaaataagagttctcccttctccatcactgcagaggggaaacgctcagtgtaactgaaggaagagctgatctcagagaatttggtgctaagggcttgagaaactaaggcttcttgacctcctggtctcctccagacatggctgctttatattgattttgctttctgattttcaaaaaaaaatgtaacaatgcaaagcaagcataggaaattatgggcagaacaacagttgtgaatctaatagaggatgggaggtagggaaatcactaaatggacccacagcacaaaaccaccacaatgtatagaccttaacgggagctgacatttgagttgaaggtctaaatacaaccagaaagatacacattactagatcactaacgacaatacttacacaaagccattttctttaaagatatcatcgtatttgttctaaatttcctaatgaggttatttccagttctcttattaagaaaaagtaagttatgttaagacacaattgcacaatgtttcactggtcatttttaacagggattctaaccccatttagagagaattctcacacctcatatccctttggaatctctcaattgcctttgcttacaataaaattgacccatctcaggaatgaggaggctgagccttgaagattcagtactgtagccaagaacatggtgtctgctggtgctagagctgagactagaattcataagccctgcatcttgaaggtttcatttcaagcaaaacattcagttcaattgagtccacagatatttactgattgtgtacaatggttcagtatttcgtgattcagtctagtaaatgattttcaaaataaatattaatttcattaataattacagcccaagttgactagattgggggtcagaagagtttggttttataacctttagtacttgggtgagtccaaggccttggagaaccctttatacagggcaaagaaaagcaataacttggtccctgactcacgtaactttaaactctaacagaaatatactaccttagtttgg

SEQ ID NO: 913561 - DNA, 4001 bp, Homo sapiens
ccaaagctgacacagaaatatgtgcacctaccaagtcctttagtaattctttgagatattggggaattgcctcttccagaaaactcctctccattatcaatcagggcttccttcactgcctcatatccatgaaacaccactatgggattcatgccaaaatacacggtgaacacaggaccatagacttttgagaactgggaaaggaaatgcaaatagcagcaaaataagtcgctatttgctccaaatactatgtatgattcagactgacattttcattgtattttttaatgttcatatttgccacacatagattcgatatttctgaattttgtacataaatgtgatggtgattgttatagctgccacttatagatggcctgtgatgtgccacgcaatgacccaggcaattggtacacaaatcacacagttcatcctcacttcaacacattcagcacattcatttgacctgttttaaaaatgaagaaactgaggccagagaattgcagattcattctcagagtcccacaggtaatatgtagaagctccaaactggaatctctgctaatttaaactgatgcttgagcaattaatcaatcccccatgtccaccttgaggccactacccagctaaagacttcagggtcacttgtaaagctcttaacatgaggattctgatacagcagtcctgtgatgaaccctagaaatctgtatttacagtgtcaccccaggtgattctaatgcccagtccagtttgtaactgctggtattaccaatatggaacgatgaagcaccacaaagttagaatcaggacattcagcatctcctggaagaacaatttcttccattctccagcaaccttggccacagacagtggctttcttcagaatccaaaagaattctgttaactacctattgggccctgactgattacttctttctttcatgcacttatgtttgccctgaacccacagatatttatttcacatcagccatcaaatgaatcttcagagaagttcaattttcatgaccattctgaataaaacacatgactactatagtagagaacttattggatgaaatttctaatcacacacacttcccttcaccttcagtcaaaaatcatagcaaaacactgtgaaacaaagaggagaaacagcactttaaacttttgccactgtattaaatgattatataatacaatgaccccaatgtttctgtattcacaaaatgcatcaactcactccgctatttctgacaatgacagacttagaaagacaaaagaggccaggtacggtggctcacacatgtaatcccagcactttgggaggccaaggcaggcagatcatgaggtcaggagactgagaccattctggctaacacggtgaaaccctgtctctactaaaacatacaaaaaattagccgggcatggtggagggcacctgtagtcccagttactcgggggaggctgaggcaggagaatggtgtgaacctgggaggcagagcttgcagtgagtggagatagtgccactgcactccagcctgggcaatagagcgagactccgtctcaaaaaaaaaaaaaataggaagacaaaagaaacatcaaagaagttcagagggagtattttgctttacaatgatctattataatagtgtgcttccaggaatatattttgtctaaaaatagcagtcaaataacttaccctttgcaattggctggaggaacataaggcagacttacattggtgaaagatttgcagatgtccttaacatctatctgtagcatatttccaataataggaagaggagtggggccaggagggagcttccttctcctacagctctgtctccagagtgaaaagagaagcataaaagagagacacagcaccaggaccacaaaaggttccattgaagccttctcttcttattaagacagctgtgagcttgcactccaaagtttttataacactccctgctaatttagtgtgtgtctctttgacatgtaaagtaaacaatcacctagatccaatttatactttttttctgagtggactttggcccatggatagaaataaaatgttcttttgtcctactccttctttccagtgccaatctaggagattctggtttaattgtattggattggagcccaggtatttttaattaaaagtccctggttgttccaatgtgctgtgatgatggagaaacactgaagtaaatgattctatgttagaatatactcaaaattcaatattctcagattaatgaccagttgggaatttatgaccttgagggaaatcagtgtattctatattttgtgtataaaaaatgtacattgtaatgctatatcaaaaaataggagacttagcccttgataacaaaagcctttcaaatatttagtatagttcacttaaaatacagctgcctaaacatgaaatagtgaatataactcatacatgttgaattaccatacatatatcaaattattagctaataaatgtatatttatatatatttaaatgtatataaacaatatacataaatatatatgttattacataataatatttgtgttattattacattattataataataggtgattatttactttacatgtcaaagagacaaactgaattagcagggagtgttacatacattattacataataataacataaatacatatttatactattaaatattatattaaatatataaaagtatatatataaatgtatattcatcattaaaagagactggagtataaagattatcattttttatttttcaaattgggaaagaaactctgggagaacaggacacctgtcagtgccacacagctcattgccggtaaaaccgggatttgagcagagatcttctgatacccattggggttcattaccacttacaccacagctggctcaagaacaattttagaaaaacaaaacaaaccccagacattagttactctgaagatacgccaccttgactctgttcagaaagcaacaggcttcacattaaatagaagtccgttatttgtttataaggataagaggaccggagacgctcaaaagaagaaataaaaattagagttctcccctctgcatcacctcacaagtgaaagttgttcagcactattaaggaaagggccaatctcacataatttatggcacagggcttgaaaatctatggcttctccaccttccagtcacctccagacatggctgcttctattgtttttggtctgttattgttacaaataatagaatgtaatcatacacagcaaggaagagaaattatacacagaacaacagttgtggattcaacagaagatggaacacagggaaatcactgaatggacccagggcacagaaccactgcaatgtgcagacctgaaatgggaactgatagtcaatggtcatgaagatctaaatacaactggatttatgaacattactagatcactaataacaaagtgtgtatacaaaggcatgctctgaaaagattacctttattctaaattgaccagtacagttatttccagctctttcattaagaaaatattaagacccagttatacaatgttttatcgattatgtttatagacattatgacaaatttacagagaattttcacactcatcacatctctttttattctctcaattatctttgcccactgtaaaattattcccagtttagagaggagaaagttagaccatggagattcagtactttagctaaggacacacagaatgcaagtgaccaagctggggctggaaaccataacccctgcatcttgctgccttccttttaagcaaaacatccagttaaaccgggccaccaagattgactaaaattcaatacttgtggattaatctaatcagtgactttcaaaataaacattaatttagttaataattctagcaccagttgagtaaaatgtgggtcagacgtgtttggttttataacctttaaaaggtgagtgagtccaggtcctggt

SEQ ID NO: 913562 - DNA, 4001 bp, Homo sapiens
ccaaaccatactactaacacaaggccttcaaacacttctctccctgatagccatgtgatgactcctagctagtcttgccaaccttgccctgccccctaccatcaatctagtaggagtagtcttcataactacagcgtcattctcttgatctaatcataccatcatgcttataagacttaatatactaattgcagccctttactctctgtatatggtaattattacacaacgaggggtgttcacatatcatattaacactgctaaaccatctttcacttgagaaaaaaccctaatacttatacatcttctgaccttcttcctaccattactaaatgctaaggtcattttggggtttatatattgtagctatagtataattaaaacagtactttgtggatctaaaaatggaagtctataacttcttttctaccacttatctgcttttgctggtcctgaacccacagttatttcctttacaacaggcataaattaattcttcagagaagtttaattttcatggctattctgaataaaacacatggctaatatagtagaggacttatttaataaaatctctaataacaaacatgttccttactgtagggagaccccccctgaaactattgctacggaataaaagatgaaatgctcccgattattgtaaatacaaaattgcatgcaggattgtgtaaggacagtgccaggctggactgccagaatgagccaacagcgcgtgatgtgcttccccctgcagagagcctatgaatggacgtgcagtcagagaggtttcacatcaccaagattcctatcccagaaaagcagatgttcatagctctgggaatggaatgcgacctttgtggagaacctataaatggacgcatggggggcacctgtccatatggataagatagggctataaatgccctcatcttgccatggctcttctaggcctctttagggttaaggcatactcccttctgagaatttctggtctaactggttgtctagcttcacatcctatttccatggattgtttgtaaccagcttttgttgcaattgttactgctgattaatatcttgctaatcataggttatggaaagattgtgtttctgttttaaggctctgttagaaattactgacgcacacactatattgtaaattcttatctccgtatactgtacttctacatacaaatgtactgtacttctacatacaaatgttatgttaaagaattacttcatccccatgtgaccatctcacctcataatcaaatgaccctaaatccctcactaacctacccctgccctcactaaacttaataataaatgctggtatatccagtgcattcttggcaccatgggaccagaaggcggtgacccccctggacccagctttcactatcttgtgtgtctattatttctcaacctgccgatccacctgggaaaaaagagagagcccagttgctttgtgggctgctgaccagatcccacaataccttaccatttaccttcagccaaaaattatagcaaatggttatgaaatgaagaaggaacacagcttttcaaactattgacacttgttattttgaatctaacatgcaaagacccaaatctttctctactcacaaaatacatggtttcattccactatttctgacactgacagactggaaaaggcaacaaaagcctttcaaagtattttactttaccattacctcttgtaacatgtacctctagggatacactttatttaaaaaatacaggtgaatttacttaccttttgcaagccactgaaggagcatacttacattggttaaggatttgctgatgtccttaatacctatctgtaggatatttccaatcactgggagaggagtggggccaggagggagttttcctctcccagagctctgtctccagagtgaaaggagaagcaaacatgagagacagagcacaaggaccacaagagaatccattgaagccttctcttcttgttaagacaaccatgagcttgcactccaagccttttataacactccatgctaattcggtgtgtgcctctttgatggataaattgaccaatcacctaggtccactatatgctccttctgaaaggactttgacccactgatacagataaaaataaaatgtcctttggtcttgttctccttcgttccattgtccactctgtacattccagtttcactgtacttggttggagcctaggtattggtaataaaaaacaaatgttaacccagatggttctaatgcaccatcataattgagagcactgaagtaaataatctgatgcaaaagcaattactcaaaattctgaattcttagattaataaccagttgggaatatatgatttaacagaaatggccatattctatgccttgtatatttaaaaagtatgtcaatgctatatcaaagattaggagactttgttctttataatgaaatcctttcaaatatttaatatagcctactaaaaatacagcagcctaaacatgaaatagctaacataactcatatatcttaaataaccaaacatatatcaagtaaattaccttagcagatataaacacctttaccattaaaccccctaaaaaaaattcctgaaggcaggaattgttattttttatttttcaaatgggaaaagggagaccctgggagaacaggacacctgttggtgccacacagctcatagctggcagaactgggatttgagctgaggtcttctgatgcccatcgtggtgtattatctcttacaccagagctgccttgagaacaattttagcaaaataaaacaaacttccaaacattagttattctgaatatacaccacatttattctgttcataaaacaggcttcacattaaatagaaccccttatttgtctctaagggaaacagcaccagagatgctcatgagaagaaataagggatctcccttctccatcactgcagaagtgaaacgctcagtgtaactgagggaaaaatttggtgctaagggtttgagaaactagggcttctcgaccccccagtcacctccagacatggctgctttctattgtttttggtttctcattttcagatatgatgtaataatgcacagaaagcaaaggaaattatggacagaaccacagttgtggatgcaataaaagatgggaggtagggaaatcactaaatggacccacagcacagaaccaccacaatgtatagaccttaacaggagctgacatactgagttgaggatctaaatacaactagaaagatacactttactagatcattaatgtcaatacttgtgcaaagccattttctttaaagatatcatcatatttgttctaaattccctagtgaggttatttccatttcttttattaagaaaaataaagttatgtcaagacacagttgcacaaagctttactggtcatttttaacagggattctaacaatttacagagaattgttacacctcatgtcccttttgaatctctcaattacctctgcttacaataaaattgacccatttccggaatgaggaagctgagccttgaagattcagtatcttagccaagaacatgctgtctgctagtgctagagctgggactagaacccataagccctgcatctcaaaggtttcatttcaagcaaaacattcagttcagttgggtccaccaatatttactgatagtgtacaatgattcaggatttcgtaattcagtctagtaaattattttcaaaataaacattaatttcattaataattacagccccagttgactagattgagaggtcagaagagtttggttttataacatttagtacttaggtaagtcaaaggccttggagaagcctttatacagggcaaagaaaagcaataacttggtccctgactcatgaaactctaaactctaacagaaatatactaccttattttgggtaaaataagctcggttgctgtctttataataatcatttcattcctcaggagg

SEQ ID NO: 913563 - DNA, 4001 bp, Homo sapiens
ccggccggcagccgccgcctcgctgaggtctgaagccaggaggctgggagaatgcgcagataaagacgagccagacctccagaccgcaaccctcctctccctagagagggaacaggccgctttctgcttatgctgaactcggggctctggagacaggaagcgtggaggagacagcagaggtgaggctgggagataggatttcagtgggtctcttcccccttcccggtctcaggacatccaccccagcgggacatcagagactccctctctggaggtcaccagctgcagctgagcaaagccctgaagcgagcagtgtccgcagcttccgacgcctcagcgtgggtgaggggacctcggtggacgaagccacctgtaccccggcggttgaacaggaggggaaagcgctcccgggaggagcctgcgggcccagaggcggaacggtgggggtgggggcggcgactcctgctcagaagcagccccgcccatccccataaactctcccgcacagtcgccgagaggccggattcctgggcgactcagtgcgcctcgctccgcaggcaacgcgcgggggccatcgccctaatcctgatctcatccttcggatgctgttactataatattactgttagtttattatttggccatcgccgacgtggctagcgcccgtaactgtcccggggcgtgttatgcaccccccgctccgtgccagggacgcggactcacccctgtccctgtgcgcatggaacgcggggaggtcgcctctgcccgagaactcgtccttgtagtccagcagcgcttccttcaccgccttgtagccgtgcatcaccaccatgcgctgcgagcccacgtacagcgtgaacaccggcccgaagcgctgggccaactgcggagacccgtggctagaagtcaggcccgccgcgcggcgaggaggtgcggggctctaagccacacccctgccgggcgggtattgctgttgctctagagaacccagagggacgtggggaaaagctgtctttgtccagcccgaggtgggggagaccctcccctcaagaggctgctgcgtctgcagggcgctcggggggttccagctgctctgctccccacccgcctggactccgcggacaactccgcggcaactccgcggactccggctcctcacgtcccttccctcaggcgcgcccaccaaccaccccgttgcccgcttccggaatcaaggttctggacccggttctggcgcgggagcccgagctggagcaggcgacccccgcccgccgtcagcctgcgccccacagagcgcacgcgcaagagcgcaaacacccagcgcctgctccgtgctgacggcgttatcagttcatttaacgtttaggtttgttggcccattcagtgttcacaacagtcgtaggcggcaggtattggtgccacacgggctggcccaacacttcacgtttcaactcgtgctttggcaaacacaggcggacgcccagcgagtgcgcatctggccgccagcccggttatcctggcgtcgcagcagcccggcctcgccggcctccccatcatcagccccaggacaaggcaccggcgggggcctccggggcctggcacgcaggctccgggctccagctgcaccacaggcgacacattttgagtgtcgctccaggatgctatcaattcaggtaattcacaacaggctggtattgaacaaccacaatttgtctgcaaatgagttgaatacacacataccagatccaattgctgagttattctccctaaaatcaacactatttctcttacccgggtgaaggacttgggaatattcttcaattccaactggaagaggttcccgatgatgggaagcgggaaagggcctgggggcagattccagctgctgtgcacctgcctccacatggacaccagcaggaggaaggccgcccacaccagcagggccacggtgactccgagggcagacatggtgccgctggggccctgctgccagcccgggagacaatcctgtggaaacggaaggtttttataatgtgttctgagaaggagggtgacccaccaaccaatgccctcttgctactcgtctatcccaaattactggtttattattagctgctgttggccatcgtttcaaaggctgattcccgcaatggtggcccccaggggttccagccagtgacctggtgaggatggagttggactgtgtcaacaccctggttgctagcacctgtcactgtgccagcaaacacatccaggaacatgttgccaacccatagttaagaacgtggggtgaggtaccgtcctgccctttggcactggttagacaacggggaactccagccacatccccatgcatttgtttggagtagggtttatgtaatacaactccaaccccatgccgaccacctctagacacggtaccggccctcctggtgcaacagcctcttgatgtctgatgaggaggtttgtctgagcagcccccagtagtacctgaatcaccacctgccacatgaatggggccagaaggaaaattcaacatcggaattcgattccactttctcaagttaactggaaaattccatggaagaaaaataaaaggaaagagtgagtcaaccaattctgagaaagttaatctctgttttcattttttttaaaggtatatattctggctgtagaaaattaagaaaaattgttctttggaattattccaaatttaaattcttaaaaaattacattagagttttattggatttgttttacattagggtaaatttagaagacgattttaaagatatcttgtctttgttgatcccgggacacaatagagctccacattgactagcttcttctttcatgtattaattattttcttcatacagaccctcttccaccttctatgaaggtagtccataggtattttgtggagcttttttgtgtgtgtggttagaatgaagagaatgtttttcattctgtcttctaactggcaatatatagaagttcttaattcataggttgcaattttgtacttttatattaacaatgaatctttatgtataatagaaaatatgatgagaaatgaagaaaataaaagtcatttacaatccagccaaatcacttgtggattttgagttatgccattctatacttgtatttatacaaaaatgagactacatactatatattgcattctaacccagtttttctcttgacaatttattagccacataagcaagtcattggttgtgctgcacctaacactgcacctctcctgaaccaagaaggggcgttggcctctggcagaggcttcaggggcctttgcttccctctggtttttggcacccctcgaggtgagaactgacaatgtagactcgactggctcacgggtgggttagcctgccgcctcctcctctctttcctttccagtggccagtgtgaggtggcagggacaattccctgggcagaaacagctgtccagacccctgaaccctgttgtcctgtgtgggcccagccaggcctggccgggacagacacccattggggtccacaagtttcctcgattactggttccttcttctagtgcttgagagcagcagagtcagctccccacagactgaaattgaagccttggctttggtggggtgagaacaggaagcatcagggtggagaggcagagcaggcctctggctcccctgggctgaggacaccttgtctgtgcagctcacctgagtgtgcacatcccaggcgggacccgcgtgccctggagagtctgtgcctcacagggatgcagctgtggtctgagtcctctggccataatactgttagatgcccaaccaacatcaaattttatatacgggaacacctcgtttgaaaataatgacatttctgtgtgcttcttttcagaagccggggcttttatttgttttgcatctgtcccattggcaggacactctaggacaaggtgaaataatcaggatgacagagtgcctgtgcctctgcccgtg

SEQ ID NO: 913564 - DNA, 4001 bp, Homo sapiens
tagctaccttatatggtgattgtgaaagttgggtaagtagacagtgtgaaagtacccagcatagtaaggattcagttaacatttatggaaaataatccagatacttaggaacttttatgaaataacacaatgtatttaaactgttttctagtctgccatttgctttacaattataccgttgactggtatggtgtttcccagtgtctcatctctcttttaggttactgcttgccttccttgtttcactgaattggtatgtctgacctaatgaagactttttagattatttagaaactactacgttttctgcagtcttacctgtttcagagcgtggtggagaatccaaacattcaaaaacatgccatcgaggtgtctgccctatcaatgaggaaaaaggcatctggcaatttggacagtatccatcataaactggacgtatctttggggacacgtgttggcttttttgagttctacagagttttcctggagtagtttccttgtcttgggtctgctgaataccatctccacaacttgaattctgactagaagcaacagaagtctgacaacctgcatttccaaggggcacttcatggtccttcacctctttagcttctgcggctctttttctgtttctactccgttttgactggtattttccatctgttgctttttcaacagattttagaatatttttagagccattatttggatcaactcgttttggttttcttttagatttgtattcccaaatgtcttcttcggaaatgtcttctaacatggcaaaatgattttatcattcaagaagtattaatcttaagtaaactgaaagtccatttcttgtcacaaacaaaaagttatagaattattttgctgagaaaaaaaacaaaggtaacaaaacccccaccaactcaatgggaatctgcagtgttggtaatgaacatattggcaagctacaaaccttgtacctgacaacacctgctattccatttataccacaatgaaactaagataaacctatcacaggagtagcaactgtgaagttctccattatgggtgctatttcattcaaatatcttgtccttttccagggcttgattcataaaaataatacttcaaaaattaagcgctaatggcaaatataggttcaacagcttaatcttagaacgagatttgtaacattgttatgaagctactgtcagttctttcaagtggacaaccgtccaaataattcataaatccaaccacagtccctggacaaagggcttaacaggtatcccaaacactaaatgactatctaacaaaactagtcacaacataatcaaagagatgtgtaattcgcaaaaaactgcgaagtcactgccctcatccacgactagtggatactcaaccacttcagtttcccgcgacagtccatgatcttcctccagcagcaatgaacaatccctgcacagtgaacaaaaaaagttgatatgtgaaaaaagttcaaatatgtgaaagagtgggcttgtattgaggtctgactccgtattgcacccatggttccgaaggtggccagccctctgtccacctgactcaaaacggggtcacacgccagcctctcccttatcttttggcattagaggctgggaggccaggaagcggggccttaatcatctccaggttaagcatagcgagctccaaaaagccctcagagtcctgcccttctgaagactctaaggcccgccctcaaggaccctcaccgccccccacctgccactcggcaccccaagggagccgctccagctgcatccgctcctcccggcacccccatctaaaaatgtgttcgcgcccgcactttcagcactcccagatgacaaaacgctgtgtttgtgtataagtgaaagccactcgcgccagtcacttccagtttacaaagccttctctctggaggttatccctacccgctttacctttagggtcttggcgggaacaagttcccgctgccagtgccgtgtcgaatcggcggatgctgttcaaagagagagactttaaaaataatttttaaaaatacattgcccttttaagtcctacggatttattgtattttatttgtgttcgaaagtccgctaattcccaatgtggagggttggggatgtttcccttagcgcctctgggacgctgtccctaaggccttattccatgttgaatctgacgctctcaatgtccaggctcggctgcggcgtggggaccgaaaaggggcggggtgggtcggacggcagtttaattacgtccccgggaactgcgccgatttggacttttggcacttggacctatgctttaaaaagaaaaaagtgtcattggcgtggagtggggctagtggagggtgaggtgaatgcgccgtttggaaaccacaggacagtgaacgtttcgtctctcccagcgagactctcccgcgggcccggcggccgcatcgggagcccggcggaaacatggcggcgcccggaggccggggccgcagcctctccggcctgctccccgcgcagacctcgctagagtacgccctgctcgacgccgttacccagcaggagaaggacagcctggtctaccagtatctgcagaaggtggacggctgggagcaggacttgtcagtacccgagtttccggaaggtgaggggctggcgtcggggtgggggcccctcccggcacctccccttcctcggggacggcgccctcccgcgaagcggtgggctaggcgggtttgtgccgctggcgccccggggagtggcccttcgcctaacttgggccgctgttcgcgtgttctgcaattcccaggggtccccaagcggccaccgacgggggtttccctggcacggggatccacatactcgtctgtgtatcctgagttccgcccgcgcctgatattagccaagtggacactccgtgaatatttagtgtccccggtggcaatgattgcaacgtccacaccattctgtccattcaatctggttccccagtgtcttctggtcatctttctgcatcatcttgacatttattgatcactttttcatgtatcacacacagggtttttttttgtttttttttgatacggagtctcgctctgtctcccaggctggagtacagtggcgtgatcttggctcactgcaacctccgcctcccaggttcaggcgattcacctgcctcagcctccggagtagctgggactacaggcccgcgccaccacgcctggctagttgttttgttttgttttgttttgttttgttttgtttgtatttttagtagagacggcgtttcactatgttggccaggctggtctcgacctcctgatttcaagtgatcctcccgcctccgtttcccaaagtgctgggattacaggcgtgagccaccgcgcccggcctgccacacacagtcctaaacacttgaggggatacctaaacacttgaggagatattaccttattcaattacctctatatcccagtgaggtgctcctatcattcccctttcacagttgaggaaatggaagcacagagaggttaagtcacatgcccagggcctcacagctgataactgccccagttggattatacaggccctggatttgctggtttcttagctgtactgtgcttctccgttcaaagtcgtgaaactaatacttttaaaaatcggaatcaattatagcctatttccagggtttaaatcctggccatgtgagcttttggagcatgaaggaacagatattcccggcagggatgtttgtgaagcatatcttgccatgataaatgaaaacgtattttaccttctttggatgggagtagcattgctttgcctgatggtgctggcatgtgtcctggcgtgacactgaaaccacatgtatagttaattggttggatgtggcagaattcagttatctcatgggaggtatatcggaacctgcctccgacaacagagtattggtgtctttccaagtcttttgcactactcaccttgagaagtgcttatttt

SEQ ID NO: 913565 - DNA, 4001 bp, Homo sapiens
tcccggctactcgggaagctgaggcaggagaatggcatgaacctaggaagcggagcttgcagtgagccaagatagcgccactgcactccaatctgggcaacagagagagactccgtctcaaaaaaataaataaccaattggacaagttatctgacttttaagaactttcatctataaaatgtcaatactagctaccttatatggtgattgtgaaagttgggtaagtagacagtgtgaaagtacccagcatagtaaggattcagttaacatttatggaaaataatccagatacttaggaacttttatgaaataacacaatgtatttaaactgttttctagtctgccatttgctttacaattataccgttgactggtatggtgtttcccagtgtctcatctctcttttaggttactgcttgccttccttgtttcactgaattggtatgtctgacctaatgaagactttttagattatttagaaactactacgttttctgcagtcttacctgtttcagagcgtggtggagaatccaaacattcaaaaacatgccatcgaggtgtctgccctatcaatgaggaaaaaggcatctggcaatttggacagtatccatcataaactggacgtatctttggggacacgtgttggcttttttgagttctacagagttttcctggagtagtttccttgtcttgggtctgctgaataccatctccacaacttgaattctgactagaagcaacagaagtctgacaacctgcatttccaaggggcacttcatggtccttcacctctttagcttctgcggctctttttctgtttctactccgttttgactggtattttccatctgttgctttttcaacagattttagaatatttttagagccattatttggatcaactcgttttggttttcttttagatttgtattcccaaatgtcttcttcggaaatgtcttctaacatggcaaaatgattttatcattcaagaagtattaatcttaagtaaactgaaagtccatttcttgtcacaaacaaaaagttatagaattattttgctgagaaaaaaaacaaaggtaacaaaacccccaccaactcaatgggaatctgcagtgttggtaatgaacatattggcaagctacaaaccttgtacctgacaacacctgctattccatttataccacaatgaaactaagataaacctatcacaggagtagcaactgtgaagttctccattatgggtgctatttcattcaaatatcttgtccttttccagggcttgattcataaaaataatacttcaaaaattaagcgctaatggcaaatataggttcaacagcttaatcttagaacgagatttgtaacattgttatgaagctactgtcagttctttcaagtggacaaccgtccaaataattcataaatccaaccacagtccctggacaaagggcttaacaggtatcccaaacactaaatgactatctaacaaaactagtcacaacataatcaaagagatgtgtaattcgcaaaaaactgcgaagtcactgccctcatccacgactagtggatactcaaccacttcagtttcccgcgacagtccatgatcttcctccagcagcaatgaacaatccctgcacagtgaacaaaaaaagttgatatgtgaaaaaagttcaaatatgtgaaagagtgggcttgtattgaggtctgactccgtattgcacccatggttccgaaggtggccagccctctgtccacctgactcaaaacggggtcacacgccagcctctcccttatcttttggcattagaggctgggaggccaggaagcggggccttaatcatctccaggttaagcatagcgagctccaaaaagccctcagagtcctgcccttctgaagactctaaggcccgccctcaaggaccctcaccgccccccacctgccactcggcaccccaagggagccgctccagctgcatccgctcctcccggcacccccatctaaaaatgtgttcgcgcccgcactttcagcactcccagatgacaaaacgctgtgtttgtgtataagtgaaagccactcgcgccagtcacttccagtttacaaagccttctctctggaggttatccctacccgctttacctttagggtcttggcgggaacaagttcccgctgccagtgccgtgtcgaatcggcggatgctgttcaaagagagagactttaaaaataatttttaaaaatacattgcccttttaagtcctacggatttattgtattttatttgtgttcgaaagtccgctaattcccaatgtggagggttggggatgtttcccttagcgcctctgggacgctgtccctaaggccttattccatgttgaatctgacgctctcaatgtccaggctcggctgcggcgtggggaccgaaaaggggcggggtgggtcggacggcagtttaattacgtccccgggaactgcgccgatttggacttttggcacttggacctatgctttaaaaagaaaaaagtgtcattggcgtggagtggggctagtggagggtgaggtgaatgcgccgtttggaaaccacaggacagtgaacgtttcgtctctcccagcgagactctcccgcgggcccggcggccgcatcgggagcccggcggaaacatggcggcgcccggaggccggggccgcagcctctccggcctgctccccgcgcagacctcgctagagtacgccctgctcgacgccgttacccagcaggagaaggacagcctggtctaccagtatctgcagaaggtggacggctgggagcaggacttgtcagtacccgagtttccggaaggtgaggggctggcgtcggggtgggggcccctcccggcacctccccttcctcggggacggcgccctcccgcgaagcggtgggctaggcgggtttgtgccgctggcgccccggggagtggcccttcgcctaacttgggccgctgttcgcgtgttctgcaattcccaggggtccccaagcggccaccgacgggggtttccctggcacggggatccacatactcgtctgtgtatcctgagttccgcccgcgcctgatattagccaagtggacactccgtgaatatttagtgtccccggtggcaatgattgcaacgtccacaccattctgtccattcaatctggttccccagtgtcttctggtcatctttctgcatcatcttgacatttattgatcactttttcatgtatcacacacagggtttttttttgtttttttttgatacggagtctcgctctgtctcccaggctggagtacagtggcgtgatcttggctcactgcaacctccgcctcccaggttcaggcgattcacctgcctcagcctccggagtagctgggactacaggcccgcgccaccacgcctggctagttgttttgttttgttttgttttgttttgttttgtttgtatttttagtagagacggcgtttcactatgttggccaggctggtctcgacctcctgatttcaagtgatcctcccgcctccgtttcccaaagtgctgggattacaggcgtgagccaccgcgcccggcctgccacacacagtcctaaacacttgaggggatacctaaacacttgaggagatattaccttattcaattacctctatatcccagtgaggtgctcctatcattcccctttcacagttgaggaaatggaagcacagagaggttaagtcacatgcccagggcctcacagctgataactgccccagttggattatacaggccctggatttgctggtttcttagctgtactgtgcttctccgttcaaagtcgtgaaactaatacttttaaaaatcggaatcaattatagcctatttccagggtttaaatcctggccatgtgagcttttggagcatgaaggaacagatattcccggcagggatgtttgtgaagcatatcttgccatgataaatgaaaacgtattttaccttctttggatgggagta

SEQ ID NO: 913566 - DNA, 4001 bp, Homo sapiens
caaaaattacctgggtgtggtggtgcgtgcctgtaactccagctacttgggaggctgaggcacgagaatcgcttgaacccaggaggcggaggttgcagtgaacagagatcacgccactgcactccagcctggtgatggagactccacctcaaaataataataaaaatacaaacattagctaggcatggtggctgactcctgtagtcccaactacttgagcagagagcatgtgccacactgtactccagcctgggcgacaaagggagaccctgtctccaaaaaaaagaaaaagaagaaggagatgctcaaagacgtgcacgatgcgaatacggcaacgcacgagaagaggtccagattttcccattaaagagaaatcactggtggctttgtggaaaaaaaaagcagagacatttcgcagaagcagtaacttcaacgatttatagtccaagtgattgattccacacacaaaacaacatagctggccttcacaccaaccctgtgaggaaaggctgtgtttggatacctgtaatttactttaaaatactttcctactgcgcaggtacagataggtttgttacgctgattgactccacagggtagtgggagcttcctgctccagcacgctgcaaggccacacagcaggaggcagcaactccagtgattccgtttatcattttctccaattaacactaatggctgggcgaattagcacaatgagcattaaaactgttttccctggtaaaagttagtgacttgttagcacaatagaagtgaaaatgaacaatggttgtcaagttagcggtatttaaactctggaacttagctccaatctctgcttggagcatcagcgacactctaaccttaatccctaaatcggcccagctgtgaaaggatccagctgtgaaatcatagtagcttttcaggttgcctgataccatctagaagggaaacatccctccaacctaaactagaacgaaactttcatattggatacggacagaacacccaaaggccaaggagcttgcacttcgtggagctcttaggcgggctgttccacagttgtgtgtgtgtctgagtctcctgcttgctgaccaatgtttgagggtgtggtcaaatggatctgaaacttgttttcttcatacatggtagcgaggctctgagggaagtactaaccctcgccaatctctgatcatcggccaccagcaaagctaccaagagaaactactagcagtgcttgaccaagccggcccggggcgcaactggcaggcgccgttacgccgcgttgaccacatccgaaaatagatgaagcctttgagaggctgaagagcccgactgggacaaggcgtgtgctggccgccccctcgctggcttcccacaggctgcagctccttgctccagggccggccccctcctgtcctctctccagcccccagcgccccgggagcgggcgacgcgcagccctcactcacctttgtggcagtgggacaggaagtaggcgcgggccctcaggttctccctatcgaagcggtctatggagatagttggatactcggccatctgcccctcgaaagaactcatagcgccgccgatcccagagtccgggaccccaaaaccgcagctgaagccaaggccagccctgaccgcgccgccacttccgggaagccgcgcgctgcctcgccattgggcggccgaacgcagccacgtccaatcagaggagtccggagaccgggggcaaagtcaaggagcatccggtcgggttctaggcgcccgctgcttgggtttaaatcacccgcgcttcgctgcacgcgatgggccctgagccctgcccagtgcaaggctcattcccgcccaacaaacacaggtgttgctctggtaaggcgttgcccatgtctgtggaggtgcagtcgcgggaagggaaatcgaaactcccagagcaggtggccccagccgacgaggtgagtgggctgcggaactgcgcttagaaatcattcttcgttccgcttcctgcttgtctgctgctagcctgaaacccgagctcagttccccgccctctctcttctgttcccaatttctaaccttgtgggattaccgtgagggttgtatgagaaagtttgtatctgactcatggtagattcaggaactattaattccctcttccgtttatataatctacaaactgaataaatcatctctgcgtgatcttggggcaaataagatcccaataatgccttcgctgctggcctctcccctgggcccccacctttttgagctatacttttaggaagttagaatgatgtacttaaaaaaagaaaaatggcaggaaaggtctaaaattttttaacaaccaaagcaactttatgaaaaggtttgttaaaccttttattgtatttcctttattgtattacaataaaccaaataatcaccatgacatttattgtgctccttcctatcaaatctccttagtataattaaacacaaacaacccagaacactttcgctttattttatttatttattcagttggggtctagttctatcgcccaggctggagtgcagtggcgtgatttcggctctctgcaacctccgcctcccgggttcaggcgattctcctgcctcagcctccagagtagctgggactacaggcacgcgccgccacgcctggctcatttttatatttttagcagagacggggtttcaccacgttgaccaggctggtctcgagctcctggcctcatgcgatccgctcgcctcggcctcccaaagtgctgggtgagccattgtacctggctttccaggcctccataacacttgaagtcccactttgtgcacagcactgtgacaaaccttcgggtagcattcaatctatctggcgacaacatgtttgcagaatatggcaaataaatgcttccacagagacgcaaggtaacgtgagaacaaatccaggaacaaagatttctgaccagggaaatcaggaatcagaatgccatcccagcccacctcagtggctcatgcctgtaatcccagcactttggagggctgaggcaggtgatcacctgaggtcaggagttcaggaccagcctggacaacatggtgaaaccccatctctactaaaaatacaaaaatcggccgggcatggtggcacacatctccagctactcgggaggccgaggcaggagaatcacttgaacctgggaggcggaggttgcagtgagcctagatcatgccagttcactccagcctgggcaacagagagagactctgtctcaaaaaaacaaaacaaaacagaatgacatccctagtgaatgtcagcttgtgcctgtagccatgatactcagagttctattcaaatacagatttccatgaaatcttgaggagggggaggaggggtgacatggaaaggtatacacaacataatcactaattgaggtaaaatatcctgctagtatactactggcaacacctttgatggtttgtcttagaacacatgggaacaactgccctggcagggttatggagacctaacaacaaattctgctgtgagtctagtgtccgaagaatctcacggtagagctccaggaaaggcaggtcaagttaatgctcgtgatcttatgtatttgctcacttatttatctcctcctctttccacaatggatacagtacaaacaaagggaaatagagtcaggacaaagagaaagacaggatagaaaataggcaagataggtaagcatagcccagaccaaacctagtgaatcagaaactctgggagagtggggcctggcagtttgcagcttaacacaccttctaggtgattctgatggaccctaaagtttgagaaccactggattcgagtctaaagaacattcagggccagtgtggtggctcatgcctataatcccaacactttgggaggccgacgcaggtggatcacccgaggtcaggagttcgagaccagcctgaccaacatggggaaaccccgtctctactaaaaataaaaaaaaaaa

SEQ ID NO: 913567 - DNA, 4001 bp, Homo sapiens
ggaagacccagatggcactcctcccggggaggggttccagcccccaccctctcagcccctcccctgccagctcaactctgcagtacacgatgggggaaggcttaaacgcagctgccaggtgtaatttttcaagtgtcaaagatcccaagtgatccctgacacccaccccttcctactcttacattcatgcgtctgtaagatagctgcctacaacaggtcagtagtgatgctccgatcagaaaaacaagatacaaaacaaacaacaaacacacttggtcccttcagaccagtaagatacacaaaccacctccacgacctccgacctcccccctccctccggctgctctgaggagcacgtgcctcttccttcaccctgggccgggctggggcgggagcagcccagctgctctctggatgtcacaccactgttaactgtcagtaacaaaaataataaggtacatgctacacacacatccagctggaagccttgttggcccctaagcctttgtttcatgctacagtactgaggggtatgtgtccccaatgcacagccacccgcacacaactcaatgagcttcctgggaaacactattcccccacctccaccttaggtggctgcctcagttttccaaccacaggaatcagtccctcagctcctgcctctagtctccaccccaaaagttcagtcgtctctgtcttggagggcactgtcggccccctcaggttgaagttcaacactcctcaatgagcagctgttccgagctgtacagcttcttcttgatgactcggaagccagtgctcagcgtcagggactggctgaagccagggaggaagggagagttggcggagctaaacagcccctggatcttgggccagagtcgtgagtccaggcgcagcacgagggtcagctggaaggtgggcaccaggctggggtcgagtgccagctggcccacgctgtggcagctcttgccctgctccacgcagacgtccagcagcgccccccgcaggccgcacggctcgctgtaggccaggcgcagtagttctttgcccacctggcttaccaactggctaggcatcagcaggcgcgcagggcgtcgagagcccagccgcgcctgggccaggctctcctgcagcagctgcatcaggttggcacacaagtgttcatcctcagggtcactgagcagctcgaagtcgggcaacgacaccccatccaggtaagccgtgtctggaaaggagagcacacaggaaggggtattagagcggcttcaaaacgaaacgcacaggcgggggaggtgctgtttccttaagaaaccaacgctccttcccactccgtgcctcagtttccgcctcactcaccttatactccaattccccctgcccccaagcaatctgggtcccgatgggataggaagccaaggcggctctgaccccttccagcaccggggcttccccaccttcccggcccctcgagtcgcgtcggcacccgcccaccgctcaccttcctccggcccgaagccactgttgctgctgtccagggactcgcagtccgagctctccaggctcgtggagcggtcaaacccctcctcccgggtcgccgacccccaggctgagcgcggcggccgatctggggtgggagttcggggcaaggacgagggcgaagaggaggtggacgacgacgagaagcggtcccaaaggctaggcatggtgaggacagacgccagggcgtttgctgatgaactcagagtgccggagcgtagaagccgctgtaagacaagagggggaccgaccaggcgtcagtctggggaccagaccagaccagaccgcgagctctaggacccacacacagaagggacactcaccagctagcgcggtcagcgagaactgctaagacaagtgcgtcctgccgcttgaatgggtgtgcgaacccgtgccaaccaccgagagccgcccagacccgtcccaggtccacgctcgcacctcccccttggcctgctgcgccctagcaccagcgcggagcagcctataaggactagcgcggcgaggccacgccttctctgcgccacgacccaatccagacccgggagtgtggcccgccttggccaatggactccgggcgcacgtaagcaacgttctctcctgcccggtgacagcggccgggccccgcctccattgagccccagaaagctcgcagtcgaaccccgacccaccgccacgccccctttctggaaaggatccgcggcggctgcagctgccaaggtccccgagggcgctcgcggcaggggaggatcaaggaaagacttgtttattatagggttgcattgctggaggaggggacagcccgtgaccaggctaggaggagaggcagggaagcgtgagggggcggcgggcaaggaaaatggttgcccccagcgtcttggatcctaaagcttcgggaacaactgggcacacacgggggggatgcccgtgggacggcggcgcaggagcagacgttagcccggcctgccctcgcgcccttaccccctctatccctgctttgcaaaggctcgggatatgggggtggggtccacagactgggaagctccgggcaccatgctgccccttccccaaggccccacctgcccatcctggctgttactctacagcccaggacataggttaatggggatccctgcctcctcccaaaccctatctgcttccacttccaactgctcccaaggagagggcttgaggagagtggttagaggagtgtggatgggcccgggttcatagcgcccagtgcagggatggaagcgaggattcacagcagtcggactcacagacccatccgccctccccgcggactgcaggcagcgcagccggacctccctgcccgggcgccccccgggtcctagcacccagcgctcgcctagcgctttgtgtaaaagatccagacggttgcatcaggaccgaggaccgagatctctggaaaagccagggagtgcaatggccatcccgtgtttcatcattcaggcggggccacaggaaatctggcctggcagcagtgctcagaggctaacagtggttgctgagggtgggtggaggttgagacggactcgacctttattgctctaaaggtttatcagtctgggacaggaggaccctgatggaagagggagccaaacttacatcagatgcccagggccccgggggcgggcaaggaacctaaccagataggcgggccttgcctcgggtcaggcttgctttcgcgtgacaaatgacacttgcaggagatgtcaggccactgccctccgcaacccccatccccaccccaacttagaaaaaagaaaaagctgacacttgggccaagacttagaacctgaaagaaccagaatccaagctctgcaccctactctcatttgacaggtgggagacccacttatggagacaaatttatggattaaaaaaagaaatcaggggatccaggagacatcttaaagacagctgcagaatggaatagtttgtgagccactgggactttcaaggccttctcttcccattcttcaagctctgtcgcttgttggagccttaaagacaccagattgcttaacaatggggatataaaaattaaaaataataaaagacactggatcaaggcggctagttgttcttggagggctggagtagatgacatactcttgaaatcactcttacagaggtgacctgcatgggtgtgtcttcctgctggccagagagaagatctgaattaatccatcaggaacattcacatttcctccaggctgatttgggcgggacacctaaacaccctaaggaaacaagagttacgatgttttttcttcttcttcttctttttttttttttttttgagatggggtctcactctttcacccaggctggagtgcagtggtgcgatcttggctcactgcaagctccgcctcccgggttcacaccattctcctacctcagcctcccgagaagctggaactgcaggtgcccaccaccac

SEQ ID NO: 913568 - DNA, 4001 bp, Homo sapiens
tttttaattagccaggtgtagcagcacacctatactcctagctacttaggaggctgaggtgggaggattgcttgagcccaggaattcaagactgcagtcagctataatcatgccactgcactctagcttgggtgacagtaagactctgtctctacaaaaaataaaagggcaggatgcagtggctcacacctgtaatcccagcactttgggaggccgaggtgggcggatcacctgaggctgggagtttgaaaccaacctgaccaacatggagaacaagcctgggcaacgacagcaaaactccatctcaaaaaataataataataaaataaagagacactttatgaaacaaaaagttataaaaactcacagtctatcactcatgtgtaaaaaagatgtacttaatttaaaataaaataaataagttacaagaatatggaaggagtgacaccttagaaccaagtaagacagatgactgtggctcctatttgaactttctgaccctctacaacttttcatactactgaaaacaattagacatgtgttgtagcctccttagaagcctgttctggcagagccccagaacaatgttggaagtacatattacgctgaattctgcctcccggaaatttcaggcctggtctctgttctcaaatcatagattaagaataatctcctagccaacaaaaaacaagctagtctccttccaaaattttattcgttttcatcccttggttccaccaaataagactgagtttcccatcctggtggtctcttttggaatataacagagtttggtcatgtacctctggatttgagcatgccaaattgaacgcaattgactgatgcaatgtaaaccaggaccacgaccttcttgcacctgagtacaaatctgccgcggcttcctacaattctaaaatattgctattgtaagaactccatatcaaaagacagagaaaccaacaaggaaagttaattctaagtagcgtacaacctaagttcaaggacaatctttgttcccactgacttgatctcagaacagagactcagtcacaagttaaatcactaggaagcaacagcaaagcaccggtcagctatcaaggttaaaactactgcacactgctggcctatataaaaaatatggtgtacactcagcaccgcaacacatgcctttacatttccatgggaaatccagtcaactcatgtgggtcaaacagttgtaaaacagattttcgtaataactgaattacgtcatcttctcagggcggcttaccggaaaacaaactctacttcccttacgagagtttaaaaagtcactaaagacgcggcccacgtgcgcagatgaagttaagacctctccagtctactctaaagctccagtgcccacattttttttttttttgagatggagtttcgctctgttgcccaggctgacgtgcagtggcgcgatctcggctcaccacaacctccgcctcccgggttcaagcaattctcctgcctcagcctcccgagtagctgggactacaggcgcgcgccaccatgcccggctaatttttgtattttttagtcgagacgggatttcactatgttggccaggctggtctcgaactcctgacctcatgatccgcccgcctcggcctcccaaagtgttgggattacaggcgtgagccaccgcacccggcctccagtacccactttgacttgacgtgtaacttccttcgcgcacgctcatgccgggagttctgtcttagccaacaacgtggagcctgactgaaggtccaactctgcgcactgtgtgaggcgcgcccaagtcgccggggaccacgtgggacacccggccctctcccgagctccaacagggcctctctaccagagttccgacctgtggatgcctataagctcagaggaagaggtcagcgcacggcggacctggctcggtcgggcaaacgacgcgtccactgcccggggagcgcaccactcctgggcgaccgcccgccaagacccacgcccggtgtctggacgcgctgttatccgccgcgcgctcccacgatcccagcccgggcacttctcccgcaccccggggttccgctccattcagcgtccctcctggccccaggtccctccgtttcacctcctcggtttgctttcgcagtgtctccccttttttcattgcggtgtctgattccaaaccagcgtcactacggagttttcccggcatcttcagcgcaggttgcccaggccgaccggtcttctcaaccgcgtggagaggaagaggtagttccccaccctgggtccacccggctctcgtcacttcccgtagcaaggcacttccgggggaagcaggaagcacaggaaaagctgctttccgcgtggtaaattcaaagcagcggcctgtgactgtggttggatttagtgaattgaccacttgcggcccttggtctagaaggcacctacggaacggtagaaccgcaaggaattgcaaaggttagctttgtattcttcaacactggccagattttccctagccccagcctgataaatgaaggcttctagttgcttttgagtggcgccatcttcagtgctttatgttgtattgctcgagtttgcacgtacagacgcgcggatgtgtgtccttaatcatctcttggaaacgtctactctgaaagtgtcgaccagactcaggagcctgaagaaaaaaaataattcagtcgggtctggtcgttcattcatgcgagcactcaaacatcttatgagcgttcactgtgtcaggtaggagaaacaggactagtattcactaacaagcacaaaagccttatcgtcaagaagctttatagactagcgggagagagaggtcttgtgggtttgagacagagtctcgctctgtcatccagactggagagtgccatggcgtgacctgggctcactgcaacctctgcctcccgagctcaagcgaatctcctgcctcagcctccaaagaagccaggacttaaagactagccctggcgacacagcaaaacccctatgtctatatatctatatatacacacacatatataatatataaataaaatatttcatatatataaaagaaaaaataaatttcaaaaatgggatagaataatatctgacattgaaaatcggcctttttgtttttttgagacggagtctcgctctgttgcccaagctggatgaagtggcgctatctcagctcattgcaacctctgcctccagcgattctcatccttcagcctcccgagtagctgggattacaggcctgcaccacgacacccagctaatttttgtatttttagtagagatggggcttcaccatcttcaccaggctggtctcgaactcctgacttcaggttatccacccatccgcctcagcgttccaaagtgctgggactataggcatgagccacagcgcccagtctttatctatttcatttttttgagacaggttctccctctgttgcccaggctggagtggagtgtaatggcgtgatcatggctcattgcagcctcgacctcccagagtcaaacgatcctcccacctcagtctcccgagtagctgggactacaggcatgtgccaccctgcctggctaattttttaattttttttttttttgtagagacggagttttgccatgttgcccaggctggttttgaactcctgagctcaagtgatcttcccacctccgcctcccaaagtactgggattacaggcaggagccaccatacccagtctgctctgttatttttggaaacattaccttatctgaacccaagtttcccttgtatgaaatgaggataacaaaacctacttcatcaattgagaaaattaaataagataatggcagaaaatggtctggcagtgcctgacacacagagcacaatcaatgaaaactattaaaacttagtgtgtcacaaggatttgaaaacacaatttaaaatattacattttatgataaaggaaaatgctggaaaagtatttctgtatttc

SEQ ID NO: 913569 - DNA, 4001 bp, Homo sapiens
ataataaaataaagagacactttatgaaacaaaaagttataaaaactcacagtctatcactcatgtgtaaaaaagatgtacttaatttaaaataaaataaataagttacaagaatatggaaggagtgacaccttagaaccaagtaagacagatgactgtggctcctatttgaactttctgaccctctacaacttttcatactactgaaaacaattagacatgtgttgtagcctccttagaagcctgttctggcagagccccagaacaatgttggaagtacatattacgctgaattctgcctcccggaaatttcaggcctggtctctgttctcaaatcatagattaagaataatctcctagccaacaaaaaacaagctagtctccttccaaaattttattcgttttcatcccttggttccaccaaataagactgagtttcccatcctggtggtctcttttggaatataacagagtttggtcatgtacctctggatttgagcatgccaaattgaacgcaattgactgatgcaatgtaaaccaggaccacgaccttcttgcacctgagtacaaatctgccgcggcttcctacaattctaaaatattgctattgtaagaactccatatcaaaagacagagaaaccaacaaggaaagttaattctaagtagcgtacaacctaagttcaaggacaatctttgttcccactgacttgatctcagaacagagactcagtcacaagttaaatcactaggaagcaacagcaaagcaccggtcagctatcaaggttaaaactactgcacactgctggcctatataaaaaatatggtgtacactcagcaccgcaacacatgcctttacatttccatgggaaatccagtcaactcatgtgggtcaaacagttgtaaaacagattttcgtaataactgaattacgtcatcttctcagggcggcttaccggaaaacaaactctacttcccttacgagagtttaaaaagtcactaaagacgcggcccacgtgcgcagatgaagttaagacctctccagtctactctaaagctccagtgcccacattttttttttttttgagatggagtttcgctctgttgcccaggctgacgtgcagtggcgcgatctcggctcaccacaacctccgcctcccgggttcaagcaattctcctgcctcagcctcccgagtagctgggactacaggcgcgcgccaccatgcccggctaatttttgtattttttagtcgagacgggatttcactatgttggccaggctggtctcgaactcctgacctcatgatccgcccgcctcggcctcccaaagtgttgggattacaggcgtgagccaccgcacccggcctccagtacccactttgacttgacgtgtaacttccttcgcgcacgctcatgccgggagttctgtcttagccaacaacgtggagcctgactgaaggtccaactctgcgcactgtgtgaggcgcgcccaagtcgccggggaccacgtgggacacccggccctctcccgagctccaacagggcctctctaccagagttccgacctgtggatgcctataagctcagaggaagaggtcagcgcacggcggacctggctcggtcgggcaaacgacgcgtccactgcccggggagcgcaccactcctgggcgaccgcccgccaagacccacgcccggtgtctggacgcgctgttatccgccgcgcgctcccacgatcccagcccgggcacttctcccgcaccccggggttccgctccattcagcgtccctcctggccccaggtccctccgtttcacctcctcggtttgctttcgcagtgtctccccttttttcattgcggtgtctgattccaaaccagcgtcactacggagttttcccggcatcttcagcgcaggttgcccaggccgaccggtcttctcaaccgcgtggagaggaagaggtagttccccaccctgggtccacccggctctcgtcacttcccgtagcaaggcacttccgggggaagcaggaagcacaggaaaagctgctttccgcgtggtaaattcaaagcagcggcctgtgactgtggttggatttagtgaattgaccacttgcggcccttggtctagaaggcacctacggaacggtagaaccgcaaggaattgcaaaggttagctttgtattcttcaacactggccagattttccctagccccagcctgataaatgaaggcttctagttgcttttgagtggcgccatcttcagtgctttatgttgtattgctcgagtttgcacgtacagacgcgcggatgtgtgtccttaatcatctcttggaaacgtctactctgaaagtgtcgaccagactcaggagcctgaagaaaaaaaataattcagtcgggtctggtcgttcattcatgcgagcactcaaacatcttatgagcgttcactgtgtcaggtaggagaaacaggactagtattcactaacaagcacaaaagccttatcgtcaagaagctttatagactagcgggagagagaggtcttgtgggtttgagacagagtctcgctctgtcatccagactggagagtgccatggcgtgacctgggctcactgcaacctctgcctcccgagctcaagcgaatctcctgcctcagcctccaaagaagccaggacttaaagactagccctggcgacacagcaaaacccctatgtctatatatctatatatacacacacatatataatatataaataaaatatttcatatatataaaagaaaaaataaatttcaaaaatgggatagaataatatctgacattgaaaatcggcctttttgtttttttgagacggagtctcgctctgttgcccaagctggatgaagtggcgctatctcagctcattgcaacctctgcctccagcgattctcatccttcagcctcccgagtagctgggattacaggcctgcaccacgacacccagctaatttttgtatttttagtagagatggggcttcaccatcttcaccaggctggtctcgaactcctgacttcaggttatccacccatccgcctcagcgttccaaagtgctgggactataggcatgagccacagcgcccagtctttatctatttcatttttttgagacaggttctccctctgttgcccaggctggagtggagtgtaatggcgtgatcatggctcattgcagcctcgacctcccagagtcaaacgatcctcccacctcagtctcccgagtagctgggactacaggcatgtgccaccctgcctggctaattttttaattttttttttttttgtagagacggagttttgccatgttgcccaggctggttttgaactcctgagctcaagtgatcttcccacctccgcctcccaaagtactgggattacaggcaggagccaccatacccagtctgctctgttatttttggaaacattaccttatctgaacccaagtttcccttgtatgaaatgaggataacaaaacctacttcatcaattgagaaaattaaataagataatggcagaaaatggtctggcagtgcctgacacacagagcacaatcaatgaaaactattaaaacttagtgtgtcacaaggatttgaaaacacaatttaaaatattacattttatgataaaggaaaatgctggaaaagtatttctgtatttctgattactgcactttttttttttttggagacagtctcactctgtggcccaggctggagtgcagtggcgtgatctcagctcactgcaagctctgcctcccgggttcacgccattctcctgcctcagcctcccaagtagctgggactacaggcgcccaccaccacacccggctaattttttgtatttttagtagagacggggtttcaccgtgttagccaggatggtctcgatctcctgacctcacgatcctcccgcctcggcctcccaaagtgctgggattataggctcgagccactgtgcctggtctactgcacattt

SEQ ID NO: 913570 - DNA, 4001 bp, Homo sapiens
attacaggcatgagccaccgcacccggctaatttttttattttttgtagagacagggtctctacaaaactctacctaaacttctgggctcaagcaatcctcccatctcagcgtcccaaagtgctaggattacaggcatgagccactgcagctagccaccagacctgtattctaatgctctatttcttttagttggtattccaattcgtttccaaatctctggttatctttcatagttaaagggcagtcaatatgtatttctggagaatttacaatgtgaaagccaccaatttaaaacaacatagtgaaacataaggatggataaagatttggtcactttcctcaagaacttttgggaaatatgtgggatacatacaggaaaaatgaactaattttatatagacatgcataacaaatgtcaatcaaatgatgaagatagccactgaaactagataacggtacattcgggttgtcaggaaagacataaactaggccttgaccgctggacaggattgggatgcaaaagacaagaatttcaaaagaagccttttttaaaatacctgcttggttttctgcttacactctaggtaacttcagtagtcaaattcacagagcgaaagtagaatggtagttgccgggagtggaaggagagaggaatgagaagtgagtgtttaatgggcacagagtttcagtctgggacaatgaaaagttctggagatggatgatggtgacagctgcaaaacgatgtaaatatacttaatgtcacagagctatatacttaaaaatggttaaaatgataaacgttatgtgtattttagcacaataaaagtgttagctgaaatggcaagtttaccttagtgataaggtcagagaggtagattctgctttctaaggctatacaaaataagtctcattcttttgtcgaatgtcagccttcgaatactgccaccttagcctcttcagctgatttcttttttccaggtcaaatgtctccagtaataattttacctgggcattttttcagcaccttgtgatcctctgagtgtttcaggatgttttttcttttcctttttttttttttttttttttggagggcagggggctgggaggaggaaagactacaactcctctacaggctccttgagagcagagaccatttctttacttatttagtttaacctccttggtactcagcaaagagtatggtacaaattaggttcaataaacacctgcggattgaatgaaaatactgacagtaaaggctattaataatgcaacccacacgatctccatcactgacaaatcctggcaagtctcagtgacacttttccttaagcctctacagactagttattgaggtctgtaaacctaagatcgctttccccaggattcttgcacaggggacggggtgacagaagcaacacatattcaaagcaatcattttttcttaatcatcttctaagagggccaatgaaaacgaaatggcaagcgtcactgcttcaggagagaaagaacagattccatggtgatgggagcttgagtctgcccatctgagattcaggcgccaacgggaagggctgaggggccacgcggaggagaggcccaaagcccagggccatctttctccaggtcgggagggtggaggtggaaacggtccctgagcgaccccagagggccgagggcggcgcgaagggaggccctcggatgctccggcccggttctgacaggccatcatcagggacagacagttcccctccccgcccaagccggcgcagcccaaaaggaggcgcggcccatgctcagcgcaccttttgcctctccttcttctggctctcggactcctccaagggtgcttccagctccataatgtccccccagaggagtttcccaggcattactggccaccgccgcctccctccgggcacagtggccacaaccacctacgggcagcgacagcgtgaaaggaagcgggggcaaggcggccgcccggccttggccatgcgtcacttccgggacacgcaccgcacggcggggaaaaataatcccggatactctcggtttaagaccttccattgcgccgcaacctctcaaccaatgagtgtgagagatatcaacgggcccgcccttgttctgaagtgattggttactagagtaaaaccctggccaatctccataaaggaagcatgcactgattaacataaatagttcggtttatcttcccctcccccactccgaacgggtctcctcggcctcgcagagccttttgggggcttcccagtacgcactgctagggctgggaagcccttcaacggcggtagacagggtccggcgcgcgctgggcgggtgcgtgggcaggcccatgccgaggccagtgggcaacgccgcgcgccgcctcgccatttgcagccggaagctgaagccctccatcccgcccattgcgggggagatgttaacgaccaacagcttcgcgcgaggccacaggcctggcgtcggtggagaggggcttcgcgcagtttggggtgggccagatgggccggaggtgtagccaggaacggacagatgtccgtctcttaagtcttaggttttaatcgtgaagctgatccctggttcattgtgatccttctcacgctgtccatttgacataagaaacccgagaaaggaatgtacttgtctgaagtcccacagtctgttagtggcacagtcaggactagagaatttagctcctgaagccgagatcaatgctctttctgccacatcagcctgagaactttgagttttgcagtgttttggggaagatgctcccgtgaaacaatgaacaggaaaaacctgaagaagcctcacattttctgctagcgagaaaagccaaaatgtcttccacagattatctatttgcaatgaataaaaaaggatttaattttagtgatggagattaactgcccgtgaatcaccaccttacacaaaactgaaacctttgacaatacaaagggtaacttccttagtgtttctatacctttgcttactatcaccgaggctagttggcttttcacagccatttcttcatctcttcatgatccttgcgacccagctactctacccaatggagacacagggctactctcacaaaccacttgataacgtctagcacaccagccttaaaacctaagcatcaaactgtgtcctagcaaaattacaaattgttacatgtcgtggagtttgggaattggtcctgaatagctggaaccacaaatgttaaatctgtgattgcttcaagccttctgcataactacggcttggcctgaaggcaagggctgtatgtttgcatgtaactttatggattcaatacttagaaacacaaggagtgttcagctattgatgacggagaaatccacctctcttcctaggttatgagaatagctatgcatctctagatctgcggttttccacatccttttgtcctaatccctcagtccactcccaattctaccatagtagggtctttatagccctacaacagggtatgatgatgtgcataaaaacacagtgtagatatggctaagaatgccgcacgtaaaattgggataaaaggaacagatgttattgtcttgtggttgaaggttaataacagctgaagtaaaagttgagctcctgagcactctttggcattcatttgtatgtcagaggtcctaagagcgggcctgaaaaaaaagaaaggagtagactgttcaaatctccctattcaagtgattaacaagtatacgagtgttttagaatgaccttctgtgacttgcaacactacagactctgcctttctaagccctaaattcactgaaccaaatctctggctgctgtctgtgtcagatggaaagggcaagtataaaccgatgtgtcagtaatttgaccaaggagtggcttagctgaaaaaaatatgtaccacattacacatgtgttctccggggatatcatttttgcctcaatcaactagaaaacgtgggaacgggatgc

SEQ ID NO: 913571 - DNA, 4001 bp, Homo sapiens
agcgtatgttcattgtatcttgtcactttcaggaaggcccaagaagaaagatgaggtcaagttggagctccctaatgagcaagtagacaggaaggggaattcggctctgcaaaaaggaggttccctcttggccaggcacggtggctcatgcctgtaatcccagcactttaggaggccaaggccagtggatcacttcaggtcgggagttcaagaccagcctggccaacatggtgaaaccccatctctactaaaaatacaaaaattagctgggcatggtggcaggtgcctgtaatcccagctactcggaacactggggcaggacaatcgcttgaacccagaagacagaggttgcagtgagccaagatcgtgccactgcactccagcctgggcgacaaagccagactccattttaggattaaaaaaagagagagagacagagatatgaggtttattttaaatgccctccgaagtgaagagcaaaatattgaagttctagtgtgtgattgatggaacattccaaggtcaggtgcccagatgccgaaggggatcttcaacattaatctaatgatcagatcaaagatgccaaatgattttcctctaataagcaatctgtacttatcttctactccgtgaggataaataatgatacaataattttggagcgtaaaccaaatactcaaaattagtctcgcaaatgagcatgcaacagaagttccaaaagctgatattcatgactgttaattcattaaaaccaccagcacatatcaaggtgtcaatagagtggctaaaaggaaaagaaagaaaccccaccagcacatagttccaaattcagcagagttaagagttaaactctgaaattaaagtaacagactagctacaaggagacaaatacataataaatatcatgctgtcttccaagactggaactaactgcccacttctcccaagcaatgcagtcttggacccccccacctgctcacataaaagaagcctcagagatggtcctggaaatgtatccttgggagaccttaaaactttacttctcccacagctccgcctcattaaagagctggttttctaggctgggtgcagtggctcagcctgtaatcccaacacattgggaggccgaggctgcaggatcagcttgagctcaagagttcaagaccagcctgggcaacatggtgggaccccatctctactaaaaatgaaaaaaaaaaaaaaaaaaaaaaaaaagctgggcgtggtcatccctctgtgtccccagctactcgggacgctgaggtggaaggatagcctgagcccaggagttcgaggctgcagggagctgtggtcgcagcactgcactccagcctgggccacagagcgagactccgtctcaaaaaaaaaaaaaaaaaaaaaaggaaacaaaaagagaaagaaaaaaagagtttctcacacgtttccaacaaaggaaagaaaagcccttccgaaaccaggtccggaccagcaagatgggaagaccacccaagcgtggacctcaaagatcctcagttacagaggatggacgggggatgaccccaacactgagcacccacacctaccctctgctcccctcacctccccctcctccccaccggccgcgcgttcaggccggcagccggttccccgaccccgacaccccaccgcaaatcggccaggggaggcttctgcgtcccagcccccgctcccaccgcccgggccccatccccgacctggggggcgctccagggcgccctggggctcgcggctctcgggcttcctcggccggtagccgtaaacgccccgctcggtctggtagccacgccagaagagagggagagcccggccgaggccccgtcgtgctgctgccgcagtagcagaggccatgttcaccagatgtcccggccagcatgctaaggcgggagcccgaggggatcccaccggccctggtaaatccgggactcgtcagaggcggccggagccccgcccccagacaacgcccccgcgcctgattggccgacgggccggaccctggaagccaatccgtggcagcggcactcacagcgaagcgacgcccaggattggggcgggcttccagggcggttccggcggctgagaccgccctgctccaccgcagggcggggcaagtaagtgttccgcggggcggcacctgctcccagtacgaaacaggatgtagctgcagcgcctgtagtctcccgccaggagtgtttacccatcacgcctctgcccaaccgcatagacacagtctagggtgtctgttacagaaaggacaaattagccacagggtggataggaaatggctaggactgagaccaagggacgcaaaaagcaaaggttacttagcgcagctacaaaatcaatacccctaatttttttgttttcttaagaaacattaacagaggccgggcgcggtggctcacgcctgtaatcctaacactttggggggccacagcgggaggatcatctgaggtcaggagtttgagaccaacctgtccaacatggcgaaaacccatctctactaaaaatacaaaaattaggtcgggcgcggtggttcacgcctgtaatcccagcactttgggaggccgaggcgggcggatcacctgaggtcgggggttcgagaccagtcttaccaacgtggagaaacctcgtctctactaaaaatacaaaattagccaggcgtagtggtgggtgcctgtggtcccagctactcgggaggctgagacaggaaaatcgctggaacccgggaggtggaggttgcggtgagttgagatggcgccattgcactccagcctgggcaacaagagcgaaactccgtctcaaaaaaaacagaacaaaaacaaacaaacaaacgaacaaaaaaaaaaaaacaaaacaggctgcagtggctcatgcctgtaatcccaacactctgggaggccctctgggaggccaaggagggcggatcacgaagtcaggagttcgagaccatcatggctactatggtgaaaccccgtctctactaaaaatacaaaaattagccgagtgtggtggcgggtgcctgtagtcccagctactcgggaggctgaggcagaagaatcgcttaaaccctggaggcagaggttgcagtgagccaagatcgtgcccactgcactccagcctgggcgacagagcgagactctgtctcacaaacaaacaaaaaacattaagagagaaagaaggaaatagggtaaagggagcagggaagaaagggataagagtcaaaagaaactggacatgaacgattagttggtctgtctctgagtgagtttcccaaatgattttttttctgtggcttacttttaactttgccagtatggtaggagagagagtctgcatccttacctggttagtcatccttcgttccagtaagctgtgcagctataccccaaactcctaggaatattatacatacaagcccaagacatcctccttcttactcattcaaccagtacactcataaagcactctgctgggttacaaagattaataaggcacagtttctgcccttagttcccagtctagctgtagatagaactcagcacacaggatgatagattatataatgtaggcacatgtaagtgccccctgcaagcacaggagcgtcatccagcacagctactgtagctgggaccccttaggtccacactttggtggcctccccatcttgctagtttggacctggttttgcaagggcttgtcttttttttccttttttttttttttttttttttttgagacggagtctcgctctgtcgcccaggctggaatgcagtagggcaatctcggctcactgcaacctccatctcccgggttcaagcaattcccctgcctcagcctcccgagtagctgggatttcaggcgcctgccaccacgcccagctaatttttgttgctgttgtttttgtttgtttgtttgtttgtttgagacagagtttctctcttgttgcccaggctggagagcaatgg

SEQ ID NO: 913572 - DNA, 4001 bp, Homo sapiens
acctggcccactatcccgttaaacaaacaaacaaactttaattgagaggccattaggctgaggcaatgacagagctctagaaggtcccacataagcaaactaaagtccaatgtaaacagtaaaaccatactagactttatcaatcagaaactgccaactattccctaactcggaactttccactctaaccaatttaaatgtcttttgtcttactttcatgttcagcctataaaagctcactgcccttgctgctagaatggggctcactaacctccaatggttctgagtgctgcgtaattcatgagtcattctttgctcaaacaaactccttgttttttttgttttttttctgagacaaggtctctcactcacatcgcccaggctggaatgcaggggcatcatcacagctcactgcagcctcaacttcccaggttcaggtgattctctcacctcagcctcccaagtagctgggacgacaggcatgcagcaccatgcccggctacttctttgtagagacggcattttgccatgttgcccaggctggtcttgaactcctgggctcaaatgatctgtccaccttggtctcccaaagtgctgggattccagatgtgagccactgtgcctgctccaactctttaatattttaatatccctaggtttatctcttaatgatcctaattctttcccccatcttagaccccaaagtgtgtggccccaggcctggatcatatttagttgctcagttatttcttatagtcaggaaaatcagaatttccttgtgcttttgatttcagtagctcagccagcttcaccagcaagcacatccacatatctggattctcagaccactgggcactgaaacagagcagttaatccccatacccatgctgaggaaataacacgcatcacatcttttaaaatatcatatacacaatggatcatttgagtaaatttaatactaggatcatttgagtaattttaatactgctctatagacaattcagtggtaccctaaacacaattaatttctacatagatattattaacttttcagctagtattagtaaaattaataaaattaggtacgtgatttaattattttatctgaataatgttttgttttttgttttagacactattattagaacactaggctgtgacatgtcattaaataacaattaaaaaatcaacacatacagcaaattattttttgtagtggttactcacctgagcgctcttaccacatttagcatctcctgaaacaatcacgatttgattttgaagcaggttctccataaaggagtatttttctttccatataggaagatcttctctttctttcagaagtttataataacgtgatgaatatggcaatccatcaaaggggttaagttccaaatcctcacaggccaaaacctcttcctcatccccatcgctggaatccagggattcaggaaaatagcgtttttcagaggaagagtttggacactccagcccttcttcttccatcttgtctgacagtgagctcacgcagctgacattccacaagcaagtttctcctatcagtaacccattgcaaacagggcttaaaagcctatttatacaaacccgtatgttccaatctctaagacttcagttcaaggttttagcaagttaaattcctcaaacctgcatctgttctccgttgctgtgttacccactgtgctggctcactacagcactcttcggcattgtaaatgattgtcaataaaccacactaagaaacaaacaaacaaaaagagtaaggaaaattaggaacacatataagttaaaaagaaaatgcacaggagttcaaatgaaaagcattattttttttttttctgttaacgggtttctgtcatttctgctgcctgcttaaaagaacaggaataatttaggctggtgtttaaagtttggtgggttccggtatttcctggctggttcagaaaatgattctgcactgggcctcgtgctctctgcctgacctctatctcaggctctgcgtcttgatcaactgtgaatggaaagcaacaggagggacaggattgtgattgtgaggctaatcaatcacgtggtcacctaatcccatgtcaaaagaggagctggaccctataaaaggaaagaactgtgatgacctggtgagtgttcctctaacacaggctacaggaaaatctattattaagaaatcctttactttaatgaaaaacatttttaaaacttttcattttccttttgcttatgtcagtttagaaagccaagtgaggggaatgaatttattatttccttccatatgtagttatggttggcttttattttatatatatataaaaaagacagggtctcgctctgtcacccaggctggatgcagtggcgtgatcatggctcactgcagcctcaacctcccaggctgttttccccctgcctcagcctcctgagtagctgggactacaggtgtacaccactatgtccagctaatttctgtatttttttgtagagacggagttttgccttgttgcccaggctagtttcgaactcctgggctcaagtggtctgtcctccttggcctcccaaagtgctgggatttcaaatgtgagccaccatgcccagctggctggcttttattaataaggtcttttgtttaattaaaccagaaatctctagcatatttcttgagattcctgggtcttgagcccaacatgtcagctccaagaggccattaaggacaacttttaatttaaatgaagaagagaaatcacccaagaaagagcaagatttataccaataactcagtccccacatgtcaggtgaagggtctttccccttccaattactagtgattaaaaagaaaaattccattagtgttgctggaaataagctccttttcacattaaccagataaaaatgaaaaagaaaactcaagttaaaaagaataataaaatacagttcatgatattttgtaagttactgcacttttcggatcacctggtttaccttaattattgctttagatggttggagccagtgtgctcaacagctagttcctaattagtaagtgataagaaaagctctctctctattggtcaagacaggctccagggcaacagtcaatcactcaaaaaacatttgctgagtgtcttctaagggcttattagatgagtaaactaggcactagatacacacataaaggatattttgaagatggcagcaagagcaggatagaaagttttaaaattcacagatgaacaagctagtttagaggtaagtaaccagagaggcagaagaacttcatagctcttcccaagtaaagttcttaaaaattcatctaaaagccagtgtttcaaaattaaaatggaattacaaaggcataatagaaatgttgtaatatggattcacttcagaactcttcactgcctctataaggtgagagtagacccacagaatagctccaggaagcatggtagcttgagatcatcgcacaagctaattctgggaaggtatccaagaatcagaaaattccactcttcagagaagttaaaatttaattttatattctatttttcttttgttctgattagaatcccttccaagggttctcagcctacatgtaaattaaattgctattaaatattataaccaatgattgccttaggtagtatttcttaactgttttaccttaaaaaaagaacagctattatttttaccaaaaagaaatgtttctcttatttataatactccctaagagtgtaataatcttataattacagtaaattcttacttataaagcactgaccactttgaaccctgaggaaataatcaagttttctgaatagtcttctttctaaagacctgagacttacctggccccttcatcacacattgtgcaatgtatccacacacattagccttaaccacttctctgttatagtggaattaaagatggccacagattatttgccactgttccaaatggagaggtagagtct

SEQ ID NO: 913573 - DNA, 4001 bp, Homo sapiens
aaagtggctttgccatcatctgggcagcaagacagtatcactcaccctccaagagcaactgacaggcaagtgtcgtcacctcaaaaggccacaatgcccaacacaggacacccattcccatagacatcccagactctgggaacaaatgtgggtccaacttctgggctagcagtgggtgggggaaccctcagatggggctcgccctgctgagctcaggggcgctacgctctgctgacctggatggggcactgacacttcacatcagtgtgatgcaggcagcacagaagcccctgtcctgagacagcgaacacggagggtgctgcaggcaggggtgcacctgggccgagacgcaagccgggaaacctacccaaggctgacacaatcagataaccagggtgggccttttgcaaatgatacactccttacccaccaaacgagctgtctgcactgcacaatctacttaccagtttacatccgaaccctgcacacggcagctcccgcctcctagccatgccctcctcatcctcagctcctcaggagggcagcagccaagcccacaggcctggaagactctgccccccgccaactgtgtcacgttacaggacactgacacacctcgcggaaccccacatctgaaactgaaaaacagtaccatttcccgtccccagaagtctggaaaggcagttggctgcacaccatggcccctgctcactcccttctttgccctgaaagtgttaaaaaggaaaacataaagtcaacaccagctcctccctgccggtgaaaattggcacgaatgagtttactttctggctgccggccctcacaaaaccgttacccaaaaaaagttcaccatgctaaactgctccaaatataaatgtgagacgcgccggcccacccccaccccaccccacgttacaggaatggcctgaccaggatgagcccagagacggctaaatgcacatcaaacatttcagatttgggaacttcagtggttttggggaaaagacctggcaaagcccgatctgaaacttatgacagttgagcacatgatctccgccatgaagagcaaataagaggcgtacacaaccctccataagaccgcggtggctgatctgccacaaaccctcctacgagaggaccaggacggcaaggccggagcccggcccggggggaggttgacgattccgcccagccctccccgcgcagcgcccgcgaacaatgggggtgggatcccccgggccgcgccaggaccgctgcacggcctgagccaccagagatcgaacccggggtccaacgacaagtttcgcattgaaatctggccgggcgttccaggccgaacccgccagcgaggaggtggcgcgcaccgcgctgctgcaccaaggacgccgcggctccagcgcagagcgcacgggaaggccgatcccgccgggcccgctgcatcctgcgtccccgcgcggcgcccaggccccacagacacccccagggcgcggggggatcgcggccccacaaacatcccagggcgcgggggatcgcggccccacaaacacccccagagcgcgaggggatcccaggccccacagacacccccagggcgcggggaatcgcggccccacaaacgtccccagagcgcgggggatcgcggcctcacaaacgtccctagggcgcggggtctgggggtccgggggacgcgcacgctccgggctggggtcgcacctccccctccgggcccggcccccgccccgccgcaggccccgcgcccccagccctccgcgcgcggccctccccggtgacagcgcggcccggcccggggcgggggcccggttaccttccgacagctccagctccagctcggccaggcgcgcccgcacctccaggggcagcgccatgccctccaggctgcggtccgccatgctccgcgggcgccgcgccccgcacggcctcctctttgttcgcaggcggaggtctcggcggctcctcgcgcccggcggaaccgcaccgaggaggaggcggcggcgcgggcgcgggaggcgggcggcgggcgcgcagggacctccctcccctcggcgcctcctcagcgcggccccgccacggccgcctcgcgcgcccccgcgccccacggtccccggcccgccccgcgcgcgctcggcccctccccgcaggcgctgcggacccggacccggccctgctgctctcggccccggcccggcgggagcgtctctgcgcgcgcgcgtcacggggccgcgggggcagggcgcgcgcgcgcggggcgcgaggacgcgcaggagcgggagcgcgcgggggggcgcgcggccgcgtcggcgaagcgcgcgctcccgggggcgcgctcgggggcgggttgggggctcggggcccgcggggcggggcggggcggggcggtcttgtctgtcctgggctctgcgcgtccagcggagcctgcgggcccggccccagagcctggtccacccggctccctgcgaaaatcacgtcctggagccgcagcttgacgtctgcgcgaaaactcgcagtgccccgggtcttggagggctggttttttgttaatgaacattttaagaggcggagacggagcgctaggctggaagtttcgaatgcaacgaccagcagatgaccttgagcgactctgagcctttgcctggagggtcagtgtccccatctgtgaaaaggggatgggaagacaaggttgggtcacctaatctccaaatgccaggtgggcccgaaaagcctggctccagccctcccggaacaggctgcaggccccagggttcccaccgtccttctccttgtggggccatcagctcccagcctcagtgccacctcggcgaggctgaagccccgtctgtgcctctagtcctgaccatctggggaggccctcgcatctccaaccgtccactgagcaaacttccctggaagcccctagacaccccaaacgccacaaaccctaaatgaagccagctgcttccagtgactcttagtcactggaagttctgcttctcagaaccgcccccgttgtcttcatcatcaccttcctctgtctccacacatcctccccagtctgttgcacaaagccccgacgacctggcctccttttcatccttgtaccccctcttcccagcccggcccctcccttaggcccagagcttcctaaagacctcctcgcctccccgtcctccacgggacattggccagcgctggctcccggaggcccagctgcactcactcccctttcagagtgggccgcaggaacacaggtcccccacctcacccccctacccctaccccccaccacccccccaccccgcttcgaccggagcccccaccagccgggacccacctgcacggcagccttgcggcctccacactccggctcctgcaaacaacgcggctgacccgcagcacctctgctcccggcctccaccccggagagcctgccccttctctgcccctgccacccacagccatccctgaccccaggtccagaacaatctctctcctttctcttcctgcaccggccacttcccgccctcatcacgtttgaccttttttatcttctctgtattctttgtgagtgtaagcgcctggaggacagagcccatgcctcacccacctttgcccttcccatggatctagcagtggtggcaaccgccagaggtgtgtgcatttcctgtaaggatcggtcctttcagtggggaattgtgagaatgacattcgacgatgagctgggaaacaggaaccccaaacccgtgtgcttcctgcgccgagccgtgtgcctccgcctggtgtgcgccgtgggttcgtccttcgctccagactgcgttcaatgcaacagatacgggtggcacaagcatgtggccccaccatcatctctcccctttgcatgataaagagaccgaccagcaatgcaggggccgtggggaagatcccacacagcccctacacgtcacagataaaagtccttagagacagaaaggggagcagaaccagga

SEQ ID NO: 913574 - DNA, 4001 bp, Homo sapiens
aaatagtgattaacttcagggttgtaatgcattactgctaacagctgtgacagtggcagtctgttatgccagcatcaacttgagatacttcattgcagtgacatcattttaaacacaagccaaacttcctctttactgttaatgcaaaactctccagatggacagaagcaccaatgtgtatactgtatacagtcagtcataggtaatatccccagtatagccatttaaaatactttcccaccaactgtggtaggggcaagtgagatttctgcccattttaatattacctttggggtaagaaaaagaaactcagtcactttaaaaatgttcttaaaaataacttctctgcccctggtgctatatgggtcctaccagactaagttaagcaaatgcaattccagctgcctggaacattgcaatctcaccggccagttactttactgtgtaatttctatattacagagatttacttagttcatcctggagtactgctgggtcctaaggagggtcgtcgccctgttagcttatttctggagacctctttagctgtctaaatccaccttttgaaaaattaaaagttagtggatctgtggttggggggaggagtacttatattaaggcagcagagggtagagggagggggaaggatggagaagtcaagttgtgagggtaccaagatctctcttaaaaatggccaatgcagataaatcagtcctctggctgacaacagtttcagcaaaaatcagaaggcgaggccagtctggcaaaactgtgagaatcacaataagaaaaatgaaaaggacagctgaacgccaaagctggtttctttgatatctgtatgatcccatcgtcctcctcatcatcccccttctcaattgacctcaaggttctccccagacaaatttttatggaagagtccactacgaggtgaaccgttgtattgaatcattgagggacacggaggaagataaggacctcagagacctcccaacttctctcttcttcccgattaaacacttgcaatgaagatacttcagcggaatcctgcatgctgaacacccatttgcaggtggcgccgcagtgttctcagggcggagatttctccccccaccccccccaaccccccgcccccgcccaattcatagacgctcaaaggctggacagttttagtgtgaaagggagctttcaggactcaccatttttgcagtaattcccggggcagcacatagcgtgacgcatgcagcgttttcggcgcttcctgcaggcgagacagatttgcacgcctgcgtcccctccgcgggtgggactagcgcagtactcatcagtgccgcactcctcgtcctctgcgcacgggtacggctgtgggaagggttcggggagagggtgaggcacccagacgtccaggtacccgccctcttggacccgggcgctgatcacagtccttatctgtccacctctccaaaacctgttactgcccactgctcccaaatgcagggttaccaaatgctccctgaaccgcacacattcagcacgttctactccctcgtctccagataggaccctttcaaggtcagagcatcctctgagtgcccgacccctctcacctggtagttgtcaatggtctggtacttattcccgcccgggtacaggattcccggcgcggcgctgactgcagagcctgggtgccccgcagcgccgcccagcggtgggggcaggttcttgatagcgttggaattgagaaccgagttcaaggtggcgctcactcccagcagagggtggccgccgagagccgccgctaccatcgcgacaaagacccgggtagctcccgctgcgcccagagccatcatctcagaaggactcaagagggagaaagaaagagaaaatgaccgtcactttgcaagcctgggtccccacgaaaccgtgccggttcggctgcagagtcagggtccgggagccccctgcggtcccagagtcctgactgcagggagcacagagctctgcgccgccaccgccaccgcggctgcctttataccgcgggcccggagcattccggccccttgggagggagacaacaaagccgggatgggatttcaaagcgctgggaggggctgggagggggtgtgtttgtgtacatgaaggggggcctttgacactcttcaccccgcccctcccttgcttagtcgctcggctggcccggctcaccttcggggtgaaggctaccagcgagcgttatagcagacgactttaataaatgcaggcggcagcaggaactctgggaacttgggtgcccttgcctggcagtaagggttgaattatccggatctgaaatactttacagagccgaggggtgataggctctgcaaaagcactttttgcccctctcctttatgccaatactcgctgactgtgcacacaagtcatattcagtattaaatacaaaccggtctgtaattcaatggctctagcaagacgcctctgagagggccaggtggcgggtgcaagttgctcattaaccctttagagtcgcagtttgcagatctgagttagatccccggctttgaggtccttcagttgccctcctcccccacctccccccgccactgcgagaaaaatgtgcaaagagaaggaaatttgcacatcaaacgagggtaagaaggaagaagagctaattctcttttgatgggaagtttagagagggaggcgagagactggcgtttagaaattagatcaggggtggagggaagagggaaatgaccatccgataatcaaaccatttaatgttgttctttgaatcagggcaatcgcggcggtagatgaacttgattaggcagacgcgtgagatcaaagtggccgggaccaaagcggacagggtccaacgtgccaggtcagtcgcctttccccggttctcccttctcagtggtgggctaatgtggagaaataagaaacccttagggcttagcgcctgacttcctcattagtatatcacatcgcaacgcttccgaatgcagggtttgctcccaagtcttaccttgcacgggaccacgcaataccctttctagggagaaaagaaacaaccttgaggagaagaagagctgaaagtgaattagaaagtgaatttgacgtcattgaaattggtgtgtggatataataaagtaaggctggtgtataagaatgatgtcatgcttataaatgggaaatgatctatttaattcaacaaaaacttattggaagcctagagccctggcattgggctgccctctgggttgttaccttatttttattttttaaattttttggtgagatgggtggtggggggaggggcacagtgaatacaaatatttatgagacacagctctcattttaaataataaagttctctttattctaattacagtaataataaaagatgtagtaacaataaaattatagcaataaatataaaagcatacataattcttttaaaaacaggttgatattataagtgtcagaaaataagcaactgttttgtgagtttggaaaagggagagatgattgaataatcactattgaattaaaaaagagtaagatatatttattttgtcttcctctaagctgtatagatttaggctgtctataatgactccacatgctgacctactatagtcagaactggggccaccaccaagtaaagccagtgacaatcttaaagtaaaaaaatcctaaagtttactgggagaaggagtaattaaaacacaatttactatggtctgtgttctagttccttcagtttcaaaggtaatattaagaagatcatctaaacaattcttgaatggtaccctagttatattagtgtccttcccatcccaaattccatctgtccaggaaattatcctgtcaggaatcaatgcgttaagcaccttcagtgtactaggaaatctgcaagctgtgttaagtttgaatgactttgaaacgtagagaaaaatccgcctgccaatcagaaggttgaaaatgtttctttttag

SEQ ID NO: 913575 - DNA, 4001 bp, Homo sapiens
aaaaagaaaaaaattactttgttgagatcccctctgtccttatcctcatggccacatctgacagtcccttcctagcatctcccaaagcactatcccaggaaaggactaggtttgcccagtaactctgacatgaccacaactggggggaaagaatgcaggtttgagggacagagatgcaagtcagaagctcaaagtggagacgggagggccaccaatgaaatgacctgctgtgtggccagcaatttagtctctctgtcagtttcctgcagctacaaaaattgaggttaagatggccaacgtaagagagctgttaccaggaatgccttataaaatcattcccttaataagtggggcttttaacagccaaataaatgggtcccatcagcctttgaccttcaggttgctaagggcagtttctcagccctctcggttcacttgtttttcttttatacatatatccttatttatttttactgtacctatcgattcactgttaaaacagggacaagacctagaaagatggcactttgtttcctggctctgaacaagttaaatcaaacaataggttataattcaaaattcctggtgcccaatactttctgagcattttaaccactccaagccagagttttctctctggcaaagaataacagaaagctcacatagtggcaacgacaactgaacgtgataaagcagagcgcctgccacaacagtagatgcccaataaatgctagttctcctcctccctcagtgccatgtcttcttcctccagctgccttgtctaaaaaggctggcttccacactccacggccaggccaggacaagcctaccacttgtcagaaactcccgccagtatccgttcctgcacccagacacacacttacaaatcagtcatccccaagaccaaagacacaggggttccaaaaggcaccctcaagggaaccagtcaccagccttcctcgttaagcagctctgtgctctcagggagagaacttagccccagcagccactactaggattttcccatggtgcaatgcaacttccccaacttttccgggcccagtttccaaagaaacccaggcaggcgttgtgcacaatcagccaccagtctgggagagactgggctctgagcagagaaaaaggagctgggacagccagaaaatgaaaaagcagttgtggccccggcacaggatggcagcgaccaaaacttaagagtaggggtcctggcccaagtcccattcttctggacggtacccttggttaaaggctagcacagggtgccaaagctagcggacggtgaggagcctcagaaaagggactgatggacatcctccgaggtaccccctacccgctactggacctggtggcccccggggaccctgtcgtcgaggcacctgagagtgaaggccttcagcggggggcattgttcacagcgaacggcgggactgggggaggcggcgggacttcgggatccgcgcaccgccgcctccccaactgggccagaggagcgagtccaccgaggccatcgccaggtggagcggcggccccggcgaggtaccctcggccagcaggagggagaagcggagggcgcgtcccagaggcgggggccaagggtctgccactcacccgcgccttcggcgggctgcggcggcccgacgacgccgttcaggtagagaatgggcagcaggtgaggctgcgtcttctccagcgccgcccgcaggtcctggaagtggtcccgctccttggccaagagcagcttgagcagcagctccgccttggcgcctcccgcctcctcgtccagctgccgccgctcgccgggactgagcgctcccgcggcctcgagcagcccgagcacggcttccacctccgtcatggcctgggccaggctctgctgacactgggcgagcagctcccggcgctggggctccatggtggcgggccgcgccgccccgccccgccggacgcctcccgggccccccgaggccggcgggcgggcaggcgagcacctcggcagcagccctagggcgccgggagccgtgaggcggcgggagccatgggccggggcctgggcgggctgggggcccggggcggcgggcggcgctcagcagcggccgcctcccgggctccggagcgcagccatgttggctgccgcggcggcgggactggaagaggaggaggaggagacggaggaggagaaggaggaggcggaggtggggacggcggccggggcgcgccccgaggccgggctccagccgggcatgctccccctccccctcagcctccgcgcgcgccgcccgccccgcgagaaaactcgccccgaaagccgggccgcgcgccgcccccagagcaagactacaactcccgggagaaagtcgcctgggccgtgtttcccaggctcccgacagctccggcccggctcggaggccgcctcggcccccgtgcaccccggcccggctcaccggggccccgcggccgccacccgctcccccgtggccacagccccgccgccgccggcccgtccctcctctctcccctccccaggccgtccctccgggaggcggcagcaggggaggaggggacgggcggaggggaggggtccccggcccgcccgctaggcggggacgcggcgccggctggttcccggtcccccgaggcccaggcgcagccgggggtgggggacacggagtcaggcctggcacgcggccagcccacaagctgctggagaccccctcatacaaatcttgcccccagtccagagggtcctaatctgagaactccaaaatacagcctggagacaaatggtggggagggtttcccctaaatttggacatctccagattaagacctccgccgaatccgtgaggctttccctctccaaggagctcctaagagaatttcccagtaaaatcgcctcaactgcggtaaataggctgttccccgcgccagcatttgagaagagctggtccccagagtgtaaaggagttaggatgttggcaggaggaaggatgtgtcgccggatgaggaaaagaaaggtgggtgtctgcggtgcagtccttggtctttctggcaagtgaggcgctctccccctaaatgtctcagagggagacaaatcagcggactaccttgcttcctttgatgacttggaaaggatctgcagtcccccttaaagcccaagaatgtcttctcttccacgacagccgtttgtggacacatactgcttacctccctgactgcaggacaaggtccttcaaagctggaactctgactgcgctcagtgatcccgcagtgctcctctgtagagtgggaacccaggtccatttcaaatatctacgttggaatgagtggatctcgctgggggtgagaggcactttgtctacccacactgccagtcccagccacatgcctcctcccttccctcaaaaagcagtgtcttcttagtctgcttcttcaaggggagaagtcgtttttatttatggaaacgaactcactatatggtagaaagaacaagagtatcagaatttgcactttggacttggactcccctctaagcagctgcacaaggtggaacaaaccaataatccttgctgatctgttttgtccttaggaaaaatggtggagggagaatattagatcaggggttcttagccttggcttcatgaataagctcaaggatgtcaatgaagcttttgacatgatctcaacttttttgtgaacatttatatatttttctggaatggggtccatagagttacaagttctttaagacctccagatggaccccaatatggcagaaatgaactatttaaagatacctgcctgctcccgtagtctgaccctctatggctaagcaaggttttagaggagtggaaggctggccattgcacagtatcagggttccagacaggctccctggctcttccctcccagtcctgctcctgagatatagttctttctggccgccacttcccttagggcaaccccagagcttaaatcatctgcaa

SEQ ID NO: 913576 - DNA, 4001 bp, Homo sapiens
cctgttgtttctttgtagataaagacgaggcaattcactccctgtctacagtggctgatgtgaattccatgtcatggttcagagacaatctggagggtgaactcggtactgacaagagctggggctgaggacgcagcctcccagtttcagatgcttctgatggaggcaggatgaggatgcccagtctccactcccctgaggtcctgggcctggtggcccccagtccctccacacactcatcacagggggtgggcctgctccctaccacctgggtgggagggctgggtttgggggtgctgctttcatgaaagcaaccaaccagatgaaccttaatcttcaaagcttcccccactgagcctagggggagagtgacagttccagaagttacctgaaaattaggtgatttttaccctgtatcctgaaattcataaatctagcaaaagatgacataaaagaaaaaaaaggcagtaggaaagataaaagagaagaaggaagaaagaaatgaataaagagagggagagaaagaaaaagggatggaaggaaggtagaaagaagatagaaacaaagggagagagagagagagaaatagggaggaaaagtgataagagctgcccaatagatgatgagaaagagtgagagagaaaaagagagggggagggaaggtgataatagctgcctgacagatgaagagaaacagatagagagagagaggaaaggtgataatagttgcccaatagttgaagagaaagagagacagagacagagagaaaggtgataatagctgcccaataaagagaaagagagatggagagagaaacagagaaggaggaggagggagggaggaaaggtaataactgcctgatagatgagaaagacaggaagatacagtgaggggggcagggagagaaaggcagaggcagaaacagagggaggaggaggaagaaaaggtgatatctgcccaaaagatgggaaaaagagaaagatacagagagagagagaaacacagacagacagacagaaacagagggagagagaggggagagaaaagatgataataactacacaatagataagagagaaagagagagagagagaggcagagagacaggaagagagagacaaaataggcaaactgagaatcacttgttcctctagtatctctgcaaaatgccattgagatgcagcaatcagagtgcgctaccgacggctctctcacgtttatcatctgactctctaagaacatacagctatgcttgagtgactgggcttcaagtgtttgtttaaagctgtgcatgacagagaaacttggaattccaagacaaacttggaatcttaatgatcttgtctgcgctcaattacttgacctgattttgctcggcaaatattagccatcaagccagacacacctgtagaaagaagccacataaagggcatttgcagtgggaatcctttctgcccgttttcatagcacacaaattgtgtgtttaaccaattgttgcaaagtttaagggcctcttaataatacacatccacctttcctaaacttcagggatttttctaagacaaatcaatcattcctttagttgaatgacttactgaaaacattgacttaatgactggctttttctaactacaaccatttatatttctcagccagaaataaaacaaaaaagagccattcctcctgaatacctgcaaacaattacaattatcagcaaagtgctacccactctttgatataaaacttcccttgtaatggaaagtagtagatataatttgccatgattgggtctgcaggagagaaattaatgaatataataattaaacgtaatacctgtagatagaacttgtccccataaaagacacatttcaaggatgactgtggagatccccattttgctgggttcttctcaattgaatagaaaatcctggacatttataggtacctagctaaaaggaggtgtgtcctctagggtggtatatttctactgctgctataaatcaatataaaggaagtgagggcttttgctaacagtcgatggctaatatgtggaaaaaacttaggtgtgtttgattgattgccatatgaacaatctggctgttgcccaactgcaaacgcactgacataagtgaaaaatttccaacttccctctcggtgaacctcaaggactcccaagtgtttcctgaatacgggcttgattttaatcttggggagttcaaattcacctgtgggaagtctgccccaaggtttggggaagaacaggatgtgggctgctgagcaaatacaggacacagtgccaagggggaaagcatctctgggatggtttttcctggcaggacatgctctcatcagcccctgtgcagtactagtaacctcaccttggaagaacgaggatgacatgagtgtggatgtgatcagagagcagaagtcatgagggatgattccacggagaccatgggtccataatagctttggccacagtcttctgggtctcacactaattccacaacaggagctgagaaacacatgacctcaaactgaaccacctccaaccatttcacatggctttgatttcttgtccttgacatgcacattgtatgacccttggagcttggcaaacccacaaaacctgcccccacctccacctatattgcacacaatccccctccttggatttgctatgtaaatatcacttcactctttgggaccctcagaagtcattaccagactctgataatgccccccaacacactctaccaagaaggttgcctgacacttattttttaaccaagacacttgatggccagtaactcttggttaaaagcagacagctttccaggacttgcctctgttttcctagcctgggtgagctgtgccctgcttctcagctgagaggctgaggccatgaaatgacacttggcttctttgccatgcactgttcatcagtagtctatgctgcattctagaagggtaccatgaacccatgtcctgtgtcagccaccagtcagaatttagggctggaagtctgcctttggcttcatccagatgaaagttacatttaatcttggatgtcctttttaatcctacaactcttcctgttgtttccaggtgcctcttcaccccttgagtagaacaggaacacagaataggctcactgtgtttcatcctcctactgccagatcagcaactgataagcactgggtgacgagagaacaggtttactcacctaccagggaatgcccaagaccaggcacatgctggattcctcttagaagtggattgtgatcccttggttcctggagtgttggactgagaatgataatgcagctgggtctgggatcatcagagtgtcatgacagattagaattgtctgccgggagcacagcagggaaagatgatggtaagaatactaaatacctgtgaacaggaaggggtaataagtgtccttccaagacaaaagcagactgtctggtcttagagacagacctgcctggtgacaatttcaacagggggtagcaagtattagtacaagctgctatgagaaggtaaagaaaagcatctaaatcagatgagggaggccatctctcagagagggtggcaccaaacagtcttgaaataccagcagaggtcagcccagcaaatgagagcgagaagatgggatgacgaacaggagcgactctcccggctgtacaggaatgggggcagggagccttcccctccaggaaagcatgatgtcccaggtatctctcagcttggcggggacacccttcttgagaatgtgtgggattttctgaactgcgtaacctccccgtttttgttgttttgactgcatcttttgcccatggtggttagcagaaaagatcctgagaaaataaggtttgtgagctttttgttcaggagacaccaggaagaaggaagtggtgaagcctagctgtcatttcaaagccagcccaggtaggcatcccaggtgggaaatgggtgacgtcagtggaacaggaag

SEQ ID NO: 913577 - DNA, 4001 bp, Homo sapiens
aaattaccagtcattcctaaggatgcatagttctttattttctagtgactgtgaagcagtgatgaccaggcgcttttcacagtttccctctttgttctgtacagtattgactgccaacaccaggtaccggttatccattcctgtgctcagaactgttcttggaaaggaagctaccactttcttctgaaatctaaagcacacacatacaaaactattttagcacaaccatgaaataagaagccatccaatatgttttatctacaaaccaatcttccagttttctaggtttctttcttctgaaaagcttattgcaatgacatttagacaaaataggtaaaattaagagagcaaagacacagaagaattcctattataaaaacttcccagaagtaatgccatttcaaacatgctcatgatatgagattttccattttaatttctgtaaagcgttctgtgggacactcattacaatgaggattaagaataaactggaagccaggcatgatggcgcacacctgtagtcccagctactcaagaggctgaggtggaaggactgcttgagcccaggagtttgaggctgcagtgagatacgatcatgctactgcaccccttcctgagcgacagaaaaagaccccggttctggcggagaaaaaagaaaggaaagtataaattggacaacattaaacaagaaatttctaccactggtgcaagccttcccaaagtacaagtaaaaggagatgttttggacacgatcctttttgtaaatatgagacttatgttacggaaaagggtattgtccgtggttcactgaaagtcctatcatgagccacagaattgtacttagaaataatttagtccaacctgctaaagtaatgccggaaatctttcgataaaatctcactggacagaaagcaggcttaatacctatcgatttagctcaatcctttacagagtaattcagaactttattacttatatttatagtgggtaagtcaatttgtcaatactttcatccatcggtccaagctgtctaaaattatgcaaaataataatctctcaagaaaacagcccttctcctattaagtacctcttaagtcttccccgtttgactgaggcatcagtgagggaccaaaggagggtccaaagtcattacctctccagtgataacaccaaacgcctttcacattacactgcaagttatcttttgttacctgaccgtaggttctattattttgcaaacgctttattcctgtagtccacctaacctcaggccatgaatttcgcaagattggctatgatgccttaaagatgtttctcaaaaggtattgctgatcaaaagcccaaacgcaaaagtccctcaacgctaattagcattattgctataatattgaaagtaattccacattatgaccgtggttaacttcctctgatcatttatatacaccatgctgagggtgcagagatcccccaaggataagttaatccaactaaacatcgagaaaagcctacggcggttgcaatttcctattataaaaacattccagtggccgaaactcctcaacttagggagagaggtgaaatcaagggaaacaatgaactgctcggcgagggagagtccaggctctggctgaatgtggccccaaagaacaccttgggaggcaggccccgactccggaggctcgtcgggtgcccagggagctgcaccgggtccctgggccccgggcccggtcagtctgaggcggtgcggacgcagcctctcccgctccttctttcaaatctcccgctttgttcccacaccctcccccctctccgctcacagctccgccggcagctccgcctcctcccaaaaactcttctccatcagcagctccagttcgttcagctgctccatcctggacgcggggatcgcaaactgtagacagaaaagacagcggaaccgggggtaacacagaaagcttagaaaagggaaaaaggcgcgagcctgcgcacctcgcgcgcatgcgccaacccgcagatgtcccaaatgacctgcgccaggccgcccctcccgcgccggcgcgttccacgtggggcccctcacctgagcagcagggctctgtcccctgcctttgctcccttgcttaggactgggaatacagggagtcttcatatctgaagcagactaaacgctcctgccttctctcttgacactccaacccgtgtccgaaacctcccgggttcacaccattctcctgcttcagcctcccaagtagctgggactacaggcgcccagcttagtttgaacacaacctttacacgcttagtttgaacacaaccacatttgtagttgcccaaaaccaggcgcccctggttagccttcagaattgtgcactccctgggaaacagcctctcccctttttttcagaaaacttattgagaaaatagaaactgtcggataggaactccttgatcatgccacggctaaatctacaaaacttctggccaggcatggaggctcacgcctgtaatcccagcacttcggaaggctgaggcgggaggatcacgaggtcagcagttgagaccagcctggccaacatggtgaaacgccatctctactaaaaatacaaaaattagccgggcgtggtggcatgcgtctgtaatcccagctactcgggaggaggctgaggtagaataaattgaacacgggaggtggagattgcagatcctgcaacggcactccagcctgggtagagcgagactccgtctccaaaaaaaaaaattctacaaaacttctaatatctgcaccattcttcataacctctttccaccttttttcaatagcagacaaagtgttcttctggttaaagggcaatcgctccacttgcacttggcatcccagggcttcaagcattctcaagggcatcgcttcttcaattattctcttgtatcatcagcctcgccctcactattggattgagcctctaatatggcctggtgtctcccatttttaaaagatgtttccttgctgggcacagtggtgtgcaccgatttttgatatttatatacttctctcatctggaggcactgacaagaacatccagagccatgttaaatatcagtggtataactgttatcctgatttttgttattcattttttaaatagataaaatgcgccgggtgcccggtggctcaggcctgtaatcccaacaccttgggaggccgaggcgggtgaatcacttgaggtcaggaggtcaagaccagcctggccaacatggtgaaacccagtctctactaaaaatataaaaattagccgggtgtggtggtgcactcctgtaatctcagctactcagaagaccgaggcaggagaatcacttgagcctggaaggcagaggttgcagtgagctgagatcacaccactgtactccagcctaggtgaaagagtgactcagtctaaaagaaaaaaaaaattggcaaaaagttaatatatttatcatgtacatgggctttcaaatatgtacacactggaatgggagttattctattagtatttgtccctgatatcaacagctttatgacctacctttgcaagtgatataacatcacggtagtcacaggcccactcagccagattcaagggaaggggaacacagttcctacctcttgatgggatgagtgtcaacgacacataagaaaagcatatggggcctggtggctcacgcctgtaatctcatcactttgggaggctgaggcggaaggatcatctgaggttaggagtttgagaccagcctggccaacatggcaaaaccccatctctactaaaaatacaaaaattagccagacatggtggcgcatgcctgtgatctcagctacttgggaggctgagacaggagaatcgcttggacctgggaggcaggggttacagtgagcaagattgtgccaccgcactccagcctgggcaacagcgagaatccatctaaaaaaaaaaataaaaccatatgaattgggatgtgttctggtcatt

SEQ ID NO: 913578 - DNA, 4001 bp, Homo sapiens
ttcaagctcctgaactggtgcaggggcctgctgacagaaagatccccagaggccctgtggcccatcctttcttggctgcctgctcctgagcccgcagcagcatcagtgtcaggcagaattctgacagctggaggataccaccccaccacagaatatgaattaattcacagggaggctcctcgagcaggttacctcaggtgtcctggcaaatacagcccgaaaccctctccaaggggaggcaaacaggccaaagatcaacctgcaagagtccggagggaggaaagttcagcagtccaggctacctcttccaccagcgttccgctttctcaatctcatcaggcgggcagggccggttaggaggctgactgctgttcctcaatttcatttcttttccttcataaacatttacagagtcacagaacattttactttctagctgtgtcatcctgggcatcccttacctcagagattttcctcacccatagaataaagataatgatctttgctctgcatccctgactggcaggctcaagtgagaaggcacaggtgaaggagcttcctaaactgcaaagccctatgggtattattgccaatcacattatctgcgccaaccctctaatcttcccgaggaggaaacccaagctcaggaaggtcacgtggtagccgtcaggatgagactgggcccttcggagtgcctgttattcccagacggtttactgagtggtgatcacaagcaccacccggtgtctctctcccctctagcgtggattaagaaaaactccttggaaaacttaggttaaagaaaaaagaaagggttcccgggtgaagcgaggtgatgagttgtaaagccagcttcactcttccctccctggctcaggaggctcctgtccagggcaactcagcagcctcggcgtccacatggctgaccgccgctggactcttgcgggcgatggaggactggcggtggctgaggtcagcacctcccaccaggccacccgctccgaatctcatcatcgggaggagtgaggggcccggcttcaggacagtccgaggcggcggactggggtgggtgcaaaggccggcttgcattttgggagagtggtccctgaccctcagcccgagaggtgagagggagtgaagatacggaagcgcctttccctggcgcccgaagaacagaaatgtctccctgtctagcgcccattctctcccttaaaggagttatgtttattttcctgaactgtaatatttcccaggccggcgactggcctgggctaccgaacggccccttgggaaaagtagttcgagttcacttccaggtaagttcccttcgtcccggctgccagcgcgtttcattctcggagacctcaaaccccagcgggctccgccagcaccccgaaagctgaagtcccggccgcccgagtctccagacggctcgcatcccgcagaggaacaagagggaaaaactacgcctcccagcagccaccgcgcgcctcagtgcgcaggcgtagccgcgcctcgccacccctccccctcccccaactgctcccgtcggtccgttcccgtgttccccccatcagttctaatgtccccagtctctccggcacctcacactcaccgcgaactcgcggcgtcggatacagccgctgtgccttctccaggaagcggagcgcccggtcgggctggttgctctggatggccttgagggcgatgctgatacagcgctcagcttcatccttgttggattccatggcggaaccagaacgcggaaccagggagggggaggccgggcgagcgaagggctgcgccacccgccggcgcgtcgcgggcagccgggcgcggagtgatgacatccaccctccgcccctcctttcccgagttttgagcgagggtggaagtgctaccgtatgtcttctaagaaagggacggctggtgtaggtgtcaataatggtgcacgcccagattccatgttccggaggtcttagagttgagtatgcgccaaccctctaatcttccggaggaggaaacccaagctcaggaaggtcacgtggtagccgtcgggatgagactggggccttcggagtgcctgttattcccagacggtttactaagtggtgatctatatacgtaatgtaactacatacgtttcagacaaaggttatttattcactgaacagatattgagtgcccactgtttgtgaggcatggttttatgatggggatacaggggtgagcaaaacaaagctcctgctctcatggagcttacattccagtgtgtgtaggctgggggagctccagatagattcagatagtgataaaagctctgaagaaaaattatggaaaacacagggatagagagtgggaggcgctattttaaatagcgcgataaaagaaacctctcagaagctgtcattaacaggtaccagaattcaggaacgataacaggtagatgtgactgtctggaggaagggtggtcaggccgaaggaacagcaagtgcaaaggctctgaaaagggaattctcttggtgagttataacagatcaggaaggcgaatacattctagggagcgtaaagattctactacaggctgggcgcggtggctcacgcctgtaatcccagcactttgagaggccgaggcgggcggatcacttgaggtcaggagttcgagaccagcctgaccaacatggagaaaccccgtctctactaaaaatacaaaattagccgggcatggtggcacatggcctgtaatcccacctactcgggaggctgaggcgggagaatcgcttgaacctgggaggtggaggttgcggtgagccaagatcacaccattgcactccagcctgggcaacaagagtgaaacgccatctaaaaaaaaagaagaaaaaaaaaagattctactacagagtgtaatccagttctatcattatcccgttcttcgagggctatcactccagtgaaagcaatcttgtgaaggttgccagtgacctccacgttgccgaatccccgagtcatctgtcagcccttacattgcttggcctttcaggcaggatttggtaagatgctactacagtaatccggatgagagtcaggaagctactattataatacaggtgaaaattaatggtaacttggataagggtgatggcggaggtggtgagtagtagtaaaattctggatatattttgaagacagaatgacgcaatggatgtgggctgtgagagaaagaagattcaaggatgattccaatgtttttggcttgataactggaagaagagaatttctatttactaaaacaaggaaatggaaaagactacaaaagcagtttggtgggggaatattaagggtttgattcagtttatgatgctttttagaatcaagcagagatacagactaggatgttgtacatacgtagggtttaggcaaaaaggacctggaaatataactttggggccaggcacagtggctcactcctataatcccaacattttgggaggccaggggtgggaggatcacttgaggcaaggagtttgagaccagcctgggcaacagagtgagatcccatcactacaaaaaaataaaaaattagctgggtgtggtagtacacgcctgtagtcccagctactcaggaggctgaggtgggaggatcacttgagcatgggaggtcaaggctgcagtgagctgtgatatatatatatatatatatatatatatatatatatatatatatatatatatatatatatatgcaccaaggaagtgagtgtagatggagaagagcagagaagtctgattactgagcctcacgaaatcccaacatttaaagatctggaagaggaagaaaatccagtaaaggagaatgtgaagaagcaggttgtaaggaaatgagtaggtcaggtatggtggctcatgcctgtaatcccagcacttggggaggctgaggtgggaggctcgctttagcccaggagttcaagaccagcctgggcaacataatgagaccgcccccc

SEQ ID NO: 913579 - DNA, 4001 bp, Homo sapiens
gaataactggatcttcaagatttctggatagattatgtttaagactctctttacgtacagaatgtaatcaatgataaattctaattattcccagtattaaagtagttcttaaaagtcatcagagcttcactaattatttttacacatactccatcatttgctttgaaaatgagatatatagtgtatctataagcagggaggggcaccaggcaacagatcataaatatagttattacaaagttgcttgcacatatgaatctgaagtgtgaaatgcctatactttataactcttacaaaaataaaaaattgtttcactcatggtaccctggcaacccagcaattttatattcactgatggaatgaaaatgcaatgtctgaaaattaaaattcagtaaaagttcaatagttcacccacatttatgataacctatgggggaaggggatgtgcatttcatatctagtcatgtgaagtgtgccttgaatggcaactatcgtaaacattaattttttactcccataactattcaaagcattgtacgaagggctcaatcagatcgtgtgaagtgtacatttttcaccccataagcctgaaatcagcgaaatgttatcttctccttcgcacaaggcttcaggtagagactggatatctaccctcactcaaccaccctcaatggtagaactaaaaagcaacaaatggattttacaagttaatgtcttaagctatagaagaaaacgaaatgaaacaaaaggaaaaggggaaaaaaaaacccattcctacattactgaccgggggcttctcttccaatcgcatcccaagtcctttgctgctcaaaaaacttaacacctccaacctggttagacgcttcaaattcctccagatttctaaactgcgaaagcgaaacaaacatctacctaacaggctaaaaagatgacgaagtacaaagtaagaaaaacttttgcaacacagacactggccacagtgcattcctactttcccagaagggaagaggaggggaggcagctgaaataagaataaggatgaggtaagtatcggtggaagatgacagtttagggtgagaagcggctgctctttctcacattcagggggacaggaaggcaaaaggtaggtgttaaattaaaaaaaaaaaaaagtctacccacaccactcttcgttcttcctccagcacagctggagggggaaggctcttccccagaacgccggagcagagagaaggcatcgccaccctaggctagtggcgccgtccagcctgtcactggggctgggactagaaaagttgaagcaggagtaaagatctggggaagacggacacgtccttccaaggctgaggaccccggtgacccgagctgagggcagccagagcccggggtgaccaagccctgccctacgtgtccggctgtctctgaggaaccgggtcgcctgacgcctgccctggcccctctccgcccggccccgcgcgcctccttgcttacctgctgcaccccgaggaactggtagaagttgagctgcacctcctccactaagtcaaacaactccaggtctccgctctcccagccgcgcgccggcgccacggcggccagcagcagcagcagcagccacagcagcggcgtccgcggcggcggcggcgggaacggcaccagcccgagctggcggcgtccaggaagctgcgccggctgggagcaaggagccgtcatcgcgctgggctcggaaaggtcacccgccgcgcagctccgttggccgagagctgggacgtggcgggcggcgctggctgtggggaacagcgcctgtcagtgaaaagcgcgggcaggcgcaccggagcggcccgccaggtggctggccccagacagagcgcggaggcggcgggagccggctgccggacgggcgggtgggtaggcgggcggggccgcagccagcgctacgttccgaagaccctcgcccccaggcctacacacagctgtagaggcagcgcccggcgcctgggctgcacagtgggtgaggcttcccttcgcctcagcctatcccaggcctcgcttccggtgacatcatgtctcctagcaaccgcgggaagggggcgtggccggaagcctggacgcctggcgccccagatctgggcctgggtgaaatgcctctcaatcactggcgcgcacggagcagctgtacctgcgcccacatgggctgagagacagggacggttatagccatctcgcgtccatctggaacgccccacgtggacttcccctgaaatagctactgtcttcctctcccctagctatcgaacactaaaagcatatttgaagcctgattaattgattatggcttccatgcatttaattagtccatcagcaaagaagacaggacaagttgaaccaggttctaaaaggggcaaatctagtaagtagagagaggtagagcagaaaaggaattgaaaccaaaacaaaaagtatacttctaattatgaattaagatttacaggcataataccataaaatgacctggtagaattaacagttaataatggtgactcaatcatagttggaggagaaatgtagtttatccaccttagcccacctccagttggggttcctttgaaaacagacctcaattgagatgtttctgttttaaaagacaggctaaaaacctcctctcccataacaatgtctcaccttctagtcttgcattgcttctgttcaagctcttttcaagttattttctccaccacaattctcttgtgtggactttattattgtgtgcttagcacaatgcatagcacatgagagcactcaattagttgaactgaatcctgtgactacctccctaccaccattccccctaccacagatttttagtttatttatttatttatttagagacggagttttgctcttgttgcacaggctggagtgcaatgacaccatctcggctcactgcaacctctgcctcccacgttcaagcaattctcctggctcagcctcccgagtagctaggattacagactcctgccaccatgcctggctaattttttgtatttttagtagagacggggtttcaccgtgtaggccagattggtctcaaactcctgacctcacatgatgtgatctacccacctcagcctcccaaactgctgggattacaggcatgagccaccacccccagcctagtttatttttggttatatcagttttcttaaagtgaacgtcatctttaccaagtccctaaattaggttactgtttattcaatgaacaaaacatcgaaataagatgaaattaatgatcttaagcactacttttacatattatagtaacattcatcttttctcctaatttgatcattagattaagtgcaataaaacctttgaaactggtgccatattgccacaaatctgggattcttaccccgatcttgtagcagacagcctagtatttcccttttgagttttacctttatgttgtctgagaacctcggggacttactccatctaaagatagcccatcctctttctaaggccatgctgaaacagaattggattctattaataatacttctcatggacataaggtattactcaaaaattcatgctgcccagctccaatgacacttgtccaccctgagatgatcttcttgcttgtccaggttcctgcaaagaccacagtgatattcatatttagacttctagcttggcctctttacctattcagtcattgtcccaaaaattacagtgcaattgaataaatcttttgctgaggtctgaactaagggagtgacagtatccactgttttcttccctggtgacatgtactaattctgggcatagactcatccagcttggcctgggcagagggagtttacacagaaaaagagaaaccagtgagatgtttaaccatcatgtgagctgtgaaatggattggaaatatagaggagccccaaacatatagccagttttcccacaggacattcgctgagttctggggtggtgcaggaggc

SEQ ID NO: 913580 - DNA, 4001 bp, Homo sapiens
acacaccggggcctgtcggggggtgggggagaaggggagggacagcattaggacaaatacctaatgtatgcggggcttaaaacctagatgatgggttgataggtgcagcaaaccaccctggcacatgtgtatctatgtaacaaacctgcacattctgcacagggatcccagaacttaaagtaaaattgaaaaaaaaaaaaaaggactgactaaataggtcacaagattatggagatataatgacccttactgtataagctagcatgtatttttttaaatccaaattgtcagccttatcaagttaaattatattcctttgattttaaattattccttcaaaaattgtttgataatagtataatttcaactgtgaataacacatggtaaaaatggtaataagctttctcaattgctataagcaaatcaccaccaacataaacaagaataacacattcttgagaagaaatatgcaactaaaagaccattataagctattctgggggcggggcagtttttttaatttcaacgtgtctaagataacttcctcagcatggcaaaaatagagattttaatcctttgtgtccagtaatgcattctattcttaaaacaaaactaagcacattttattaatgaactactgcctttatgaaacaacaataaatataaaaacattttgctttacaatgttaattttactacttagattttaataaaaataaataaaataaaatacattaattataaaacataaatatatcctaataacatgatttaataatatataatttaataatgaatatattttatattaatctcaacattatttgaaatattgaaaaattggaaataaaatatttaacaataagagaataattcaactgtggtaacacagcaaaataaaatattttgcaaccactaaaaagtgtacaaggaaagtttaatagcatggaaaattccttgttataatacgaatgggtaaaaagcaggaatcaacaagtacatataatatcctcccaaacaggtctttaaagaatatacatagaaagaatagtggagattaatatgccaaaatattaatactgttatccttgggagagagaattataaatgatttttccataatttaaaaaacctctacaacctttataattgtttattgagaactttaaaaattttgttttcttacagatccagtgaacagctacagagttttcacatgttttgtttcagaagccaccctttcaagaagtaatttctgtcacacaatttgaaatattaacataaagggatgcttctttgtttctattttgactgctcacataggagtacacattttaataaaatatattaaaatccctaattttataagaaatttcatttcacctcaattatgagtcaccataataaaggtatagcttatatatactgtgaaacactgccatcagaaattacaataaaatttcaaatatttatttttaatatactatattgtgaaacagcatatggccatgtgccagaatacacatatttaatcagaagcttccgtaaaattcccataggacactattcaagtaaaatcccaacatacatttaaattcttaactttctctgagccaaaagtgctttaaaacaacacaaggttaggtttgtaggcaatgtgactaaaaattcaaagttaaaaccttaaataaaaacttgaaatactattgtgaaaaagaatactgttgtgataaaaatattatccactgtcttaccgaagatagttcatcacatcccagtaatgtgtagtaatcttcagtatcttctgacctgtaattcagtattgcatccatttagatgacttaatcagtccttcttccctcggaaacaagaggcacagtgagcttcgaattaacaggaagaaactctttaaatctgaattagagcagcatgttccacatagcaaaaactagctttaagactggccacagtcaatacaccagatgtcatcctagacctttgtaaactctgcctctcattggctgtttacagagaagaaaagaacagtccacgtgtctattattgcagtgctgcctgggatctgtagtttgagtttatataagagatgcatgtgaaccatttgtcttatgagttaataaagactgtctattttcagaaacttgccacattagccacttctccatctcctatatatttttgtctctatcctttaaaaaaaaaaaagaaaaaaaatgtgaagcaatgtggtaaaatcttaggatgtgttaataaggataatgggagcttttcttagtgtttaaaatacttaattttattttttatttgtttattttcagacaaggtctcactctgttgcccaggctggagtgcagtggtgcagtctcagctcactgcaacctctgtctccccagctcaagcgatcctcccacctcagcctccctagtagctgggaccacaggcacatagcaccatgtccagctaatttttggtttttgttttgttatgttttaagaggagggggttttgccatgttgcccagcctggtctcgaactcgtgagctcaaagcgatctgcctgcttcggcctcccaacgtgctgggattacaggcatgatccacagcgcccagccaataacacagtcttgatttttatggagcttacgctctgatggaggaagacagctgaaaaacatgcaaaaaaaaaaaaaaaaaaaaaaaacacgatcatttaaaatagtgatttgtaagccaggcatggtggcccacacctgtagtccagctacttgggaggctgaggcagaagaatcacttggacccaggaggcagaggctgtagtgagccgagatggtgccactgcactccagactgcgctacagagcaagactccatctcaaaaaataaaaaaataaaatagtgatttgtgctttagagaaaataaaataggacaatgagaagaactgtatgataactcgggtcagatggctgtgctatttctcctgggttggttctccagactcaggagtgtctctagtctgaggtaggtccaggcaatttatgtttcagttcattttggccctaagaaacacagttcaggtctgggatttagagaacaaggtgagtggtcagggacacaacactttgactgccttaacactttttttgtttcatttttcagagagacagggtctcgccatattgcccagattggtcttaaacccctggactcaagtgatcctcccactttggcctcccaaagtgctgcgattacagatgtgagccaacatgcctggcccttaacactttaaattcccccacctgaggggaaaaaatagtttttcttttagcccacctatatacatctttttaaaggtttatttctgaagagaagcaagaaaaagcactgaaacaccattttttactaatccttcattgtacatgctgtcttgctaaaagttctatatagaattttaaggccaggcacggtggctcatgccataatcccagcactgggagaccgaggcgggcggatcacgaggtcgggggttcgagaccagcctgaccaatgtgatgaaatcctgtctctactaaaaatacaaaaattagccaagcatggtggcacgcacctgtagtcccagctactcaggatgctgaggcaggagaattgcttgaatctgggaggcggaggttgcagcgagccgagatcgtgccactggactccagcctgggtgacagagccagggtccatctcaaaaaaaaaaaaaaaaattagatcacaatatcttgatctaaatcactgataaatggccttttaatgatgtgaagttgccatggtggaaagcagtatggtggttcctcaaaaaattaaacatagaactaccatgtgaccccacaattccacttctgggtaaatacacaaaagaattgaaagcaggaacttgaaaagatatttatatactcatgttcatcaaggcattagtcataatagccaaaaagtggaggcaa

SEQ ID NO: 913581 - DNA, 4001 bp, Homo sapiens
ggcagcagtggtcctaaaagttgtgtgctccttaagagaatctaacgcccgatgatctaaggtttcatcctgaaccacccccccaactctcctcacccccactgtcactggaaaaactgtcttccacaaaacaggtacctggtatcaaaaaggctggggaccgctaagctaaagtttttctttaaaaaaaaaaaaaagaaaagaaaaattctgtatccaactcaagaatcaaattcggggcaaaggcccaaacatctgcacttttaacaagacggtgtctgccattctcttcttaccccctcaaccgagtaaggatcactgcccatcctgtgtacccgggttccactaactttatctcctgaggaatgcctcaggaatgctacaagaattggcctacatgaaaaaatatttcagtgctactttactatggtaatatttaaacaatctatgcaataaaaatcatcttgagcacaacatgctagaaaaagtttctcttgatgaactggtatgcccattttattagatcgaaactatagaccaagttaaccctagtccttatttctggagttttatgtttacttctactgctgtaaatactctcaaatcctttttggaagcagtcaaaatataaatccacagtattcaaaatcttaccctccttttccttgcattcatcttttgtttcgattctttgacaaaggcattataggatgggacctctccggcgtcaatagcttgctgaatgatattccttatcctgggttcctctgtgtactgcacgcaaagcacagactccatgatctgatccatgtcacccttgaagtccagataggcctgcttaatatcagccagctcttcttccgaacctttgtatgtcttttcaaaagcttgaatgtcctctaaagatatctgatgataaaggagatttgctttaactttgggaattttactttaaataaaacgtacgttagtaaaactagagttgggtgttgaattgctgcaatacaacagttgcttgagttgaaattattgaaccagattttctatgcctaagcttctccggagtcctcctttttaaatccaatcttcattaactgctaactagggaccagggaagggaaatttaagtgaaatttccaagagtgagaggtgatccggaatcaggacttacatttggatatgtaaaataaagcgcatccggcaaaaaaaataaatcggcccttttcagtgcaacaatcacattaacaggaaatttaaagcccgtttcagtaagcgtgcgtgtatctgtatttcaaggccaaactcaaaattcctaattcctacaaaattaacacaaaatacaagatcttagaggcagtcaataaaggtttgttgattgaatgatggtaacagtcacaaagaaacctccagagtcctttacctttttaaagagtagccgccaatacgcctcccagtctcggtcttgggtgagcacaggagagtcctcgtccactgttccctgctcatcgtacactgctctctgttctctgtcactgagaacggaatagacttttcccaggatctgagggcaaagagtatccgtaaatcacccctgctcctcccaccgaaacggcggcgcgagaaataaagatcagaaggcgccaagcggagctcagcgcgctcccccggggcggggcccggtagccaaaaggctagggggaggcccgcgcagccggtcggcttcggggcgggaccctgcatacctggaagcggcgggtggcgtcctccttgtcgccctcacccacccggtccgggtgtacctgcagggacaccttgtggtagcctcgtcggacctcgccgtcggaggcctcgcgtcgcacgcccagcacccggtaaaggtcggcggtgccgaacacttcctcgcaaaggtccagcagccccatgccgggcggagatacgaccccggaggaagcagccgctcccagctgcgccgggtacaacccaggactgcttctttttcgcgcccaaaaagcccagggcgcctgcgtcacaagcactgaaggggcgtggccacgccgcgcatccgcgctttacggcggccgcaaaatgaggtgtggcgagtcaggcgcgggcccgggtaagtaacgccggcatgtggagtcacagtccccggccgcgcgcaggagctaggtcttcagggaagtgatgttgctcgggtctctcctccccttgctctggaaatctggcgtccgtcttaccttttagtgtccaagaacaactttttcaaaaagttcatatattagcttgaatttacaaactgctggcctatttttttaagtagaaaacggccaaacatcagcattcagcagttacacatggttcaacttaacagatgtgttttttcaaaaatgttcttgaaaggaataggtaaagctgtagacccaaataattttgcaccccactggttggaaatgctggggtactttccctctagccctgtaggaaaaaaccctatactgaaacccaaaaagcacaaaacacgggtcttccaaaaactcttacctaataggactttcaccttacacattggtggagagagataacatgacccaagcctccgtcttaataacataaactgctgaagcaaaggctctttcttttaatactctgtgaagttcacagctgggtttgaacatgttggatcccaggtggcagcagagtgggctggagcaatcatccaagagatggtgagaaacttgggcctggagacccaaagcaaggttgaggctggggataaaactttgttagtagggtaaactcacagaggaagtatgtgtatacatatcttaaaggataaacaatgctaagtgaatacccgagttggcagaaaataccttatcaaatatcccctcactgatgtagcatttttcagaatcattctgctctgccaataagtttctgcaaagcctcaaactctccaggatacattaatatcttttaaacttcccagagttgccgtgattttcaaagcatttctctttcccagatccaagatcaaactcagctgaagtcagttcctctcaacctgccctggcatcaaagtctcaaagcaagtgggggccaaccagcaacaaccccaggggagctttgacaaccacagaatttgagatggctggtaatcgttctcagaacataaaacacaaagtaagtcggcacattgatagaacctcctctataaatttcctatatcttagtcacacaccagagttaagccatctgtctttgctcatttttccctctatggacaacataatatgttgggaagggctttccaggagggcataaccgggagatgaatcttacatcactgggcaagtttccacctctaggcctcagcttccctatctgtaaaacggagataatcctacctgccttcataataccttacaattgtcacaaataaccttgtacacaaaaggcctaggatatatgtagatgctttgcaatattatctttcttccagtttcttgtattttttaaggtattcaaatacatctattttaacatttttctatatatacatttgctacggaaaattgaaatcgcacactgaaatatccttttattgcaactcaaattttcaaaaaccagaaaatcaaattattatgctctagccaaattatgtaatgttttctttttcttttctctgtcacccaggctggactgtagtggaacaatcacagttcactgcagcatcggcctcctgggctcaagtgatcttactgcctcagcttcccgagtagctggaactatgggtgagcaacaccacagccagctaattttttaagtttttgtagagacggggtcttgctgtgttgcacaggctggtctcaaactctggcttcaagtgatccttccacctcagcctcccaaagtgctgagattacaggtgtgagccactgccccaatggtatctttatattatttttccttacaagttacttcaaattcttgatgttgaa

SEQ ID NO: 913582 - DNA, 4001 bp, Homo sapiens
tggtgttgcaaaactttccagaagtattctgaatgaattctaaggatgctttggcagatgatcaagcacattcgagaatttcacaggagataatctcgtaataataccatgttgtaggtaatccattagctgactctagaaacaacagaatactaaacctagaaaataagccaaaagccaggctcggtggctcacgcctgtaatcccagcattttgggaggctgaggcaggcggatcacctgaagtcaggagccagaaaagaggaagagattgatggaacgttgagggaaatgccctgccttggggctgcaagacaaataaataactggtgcatatttaaacagatcgtttatgaagattattattatctcagccaaaaaatacacaatatgaacactgtataaaagtcaatttatcacattctctgagtcagactgttcttggcttattgcaaaagttatcagtgcactgcacgaaccccgttcccaagccagacttgagctactctccaccctccagaaatcactccattgcagcctctgaatttaagtgaatttaacacgtaagtatctgcaatttgaaaagtcacttttcacttattttagcccaaccctgataaagtgactgagagagctgagaataatgaatttgaagattcgctatgccccattatgcagaattctaaaaatcttttcttcttaaaacatttttattatcacaatgagtgacgtgtttcaagttaacatgtaaaatcggagaactcgagacagaagaggaccttagagatcctttaattcaatattttagagaaaaatgggtagaggataaactaacttgctgatcaccgtgtcggtattcatgctgtgaaagtaataaacggaacaccaactgagaaatgatccccgaatgctgtcaggtacttcagtcttgcaaaaactactacagattaatcagtcctgctcatccgtttaactcagctatgtaaacaagcagagctagactatgctcaaaccctaaatattagcgttaccactcgcctgccacatactacagcatcattagttatgaaagtgttttaatacaagatcttcatgtttgtgtaaaagaattactataaaacagacctaaaggcaagttacccatattccagaataagtgagtgccaaaaatattcacccttcattacagtacaaatgagacaggcagtaataatgagactgcatttaaagttgtttttgcacttaaaatttaagtctatactcctcatctgcatcaggccccggcctgtttggtaacctcaatattcctttactaaagtgacagcatcaccaccctttgagacacagatgcccggtggacatctgtgcctgcagcaggaacgcgggtgtccgcgggtttctgcaaaactccaccatgaccaaagctgcatctccagctgaacaggtctaacccttgcttcggaagccatctgtccctgtctccctgacacagaatcacggcctcctatgccgtaaggctccgaacatctgtaaaatcagcggggtggactaacgcagaattctttttccagctctcaaaattccgcctcattgccggagtggcagggcggtgcagagaaagagccctgggcttgacaccgcttgaaaagcccacgttcgcattgctctgaccacccctccaactcccggggactacaggagtgcgagggggcccgctgcgccccactgtccctcgcgggctcctggcccacagagcgcagcacagcgccgccgctgggaaagggccgatacaggcctagccgcgcggcgcggcgcggcgcgtctctcggggtgcgggtcccctccgcccgcggccccggaccgcgacccccgctccccgcccggcccccgcccggctccggcctggcccggcctctgacctgctttccgccgcccggcggtccctcggcgcggcaggcagttgcagccgccagtccccagcccgctgtcacctccgcccctggaagcggcgggcgggtcgatcccgtgtgagtcagcgcgccgccccgcctcccgctcaggcttccgcctctgccggcgcggtccgcgcggccccgggggcgccaagctccgctgcccgcgcgcccacctctccggcgcccgccccgcgctcgcgccccctggcggccggcccggccctgctcgcctcgcgacgtcagaggggcgtcgctcccagaacggccaccggggaaactgaggcacgggggcccgcccccgccgcagcgcgccgacacggctcgtcgggcctcggcctcacgcagtcctacgtgcagccccggctgcggacaagttcctccactcttgctgttcccccactcccgacaccaccctccaacctagaaaaaagtcaaaattccattcagagaagtccaagtcgattcctgtctgcgtgtgatgctgtcctctttgctaccccgaggcagtttcccttattatgccacacaatactcgctggggttcgcctctatctgtcccatttttttctgaggaaagtctctcaggacatctttgagaatttgagagcaagaaatgacagaagcaagaactgggcagggctgtcagaactcctcctccgactcagtttctgaatccccgcagtattcccgttgtttgtttaaagaccacgaagttacacagcttggctatgttgctggaattgctgcgcctcacgtttctggaatctacctagaggattctgaagaaggcggcgagtctatgactgtgcatgcacaacaaaaataaatatttcacaaatctcatcccatgctgtatatgtttctccttccctttgctttttaaaaacttgtggttaaatatatatcacatgaaatttaccattttaatcctttttaagtgtacagttcagtggcattaagtacattgacattgttctgcaaccatcaccaccatccagctccagaactttttcatcttcccaaactgaaactgtacccattaaacactaactcctcattctccagcccctggtaaccatcattctactttctgtctctatgattactctggatacctcatataagtgggatcatacaatattgtccttttgtgagtggcttctttcacctagcataatgtcttcaaggctcacccatgttgtagcatgcgttagaatatccttccttttgaaggctgaataatactcaattgtacgtatataacatctttggtttatcccatctttctgtggacatttgggttgtttgtacctttaggctatggtgaataatgctgcaatgaacatgggtgtacaaatatctgagtccctactttcaattcttttgggtatatatccagaagaattgctggatcatgtggtaattctgtgtttaattttttgagaagccaccatactgtttttttttcctttgctttttgaagcatgttaacactgtaaagagaacattttgtagtaaaatatcaacgttcggagagtctttaaaattcttagcaatgcttcatttgcctgtaaaactgtgacttttcggcggatcacgaggtcaagagaacgagaccatcctggtcaacatggtgaaaccctgtctctactaaaaataaaaaattagctggtcatggtggtgggtgcctgtagtcccagctactcgggaggctgaggcaggagaatcgcttgaacccgggaggtagaggttgcagtgagctgagatcgcgccactgcactccagcgtggtgacacagcgagactccgtctcaaataaataaataaataaataaataaataaatattttaaaacaagtgacttttctttcctcaagaaagtaattaacattgcaaatctattgtctttatttttggataatgttattagccaaaataaaaataacttattattcagtttcctacaattttgttttctgtggatgtagctttctaaagttgtttggagtcaagtatgccatatgaaattcagatgaaaaatcaagcat

SEQ ID NO: 913583 - DNA, 4001 bp, Homo sapiens
caaagtcaggagatagagaccatcctggtcaacatagtgaaaccccgtctctactaaaaacacaaaaattagctgattgtggtggcgcgtgtccgtagtcccagctacttgggaggctgaggcaggagaatcacttgcacctgggaggcggaggttgcagtgagccgagattgtgccactgcactccaacccgggcaacagagcaagactctgtctcaaaaaaaaaaaaaaaaaaatctatttttttggcttctttacctatataatcttcctgtcttctccaactctagccttctatgtaagtctgtaatatcaggcaggcttaacagttagatgaaatctaggattttcttggaaaggatgttagaaaatgagattcagagtggctgtaggaggttacagagaggcagcaagagagaaaaggagaccttgcaaagagaaatcaggtggaagaagggccataggaaattcaggaatttctgaatggggcattttagcaaaaaatgaatgaaaagtcaatgtcatatgaatcagggtgttgcgaacattaacatatctgaaaattgacttttgaaatatgtctcctcaacacttggaagctgacatttcttctgcatgacatgcttgtcagttttattttcaaatatcaaagactatttatacaatcaaaatgtcctttcacataaaatttttatagttttgcctgaaaatttgtggtcaatttatttcttgcacagtcaaagcggtcaactgcataaatcattactccttcattgcaagccccttaacagtttaatccagaaccatcacttatgtcaaggttctaataccatttgtttctggattttgcttgttttctcttcatctatttgagatcagtgaagagcttacacagaagttagaaaaacaacaagaataattgctgttcaaggtgagtggattagtgagtgaaccaatctaggtggtccaaatgcttctatcgcctccttgcctgggctctgattacatctcactcagtgtgatgtctgtcatccctggacagagctgtcttaacagtgaatacatctttacctagcatctctctttctaagaaccccactaggaccactctttggaaaaatgtggtcaaggccacatctgggtgcctgtggtaagctggctagtcatcctcgcccaccacagatgctagctgccttagcacgcccagatgtataggtaagaaccaagcaaccaaatcatctttctgcatcaaagtagccaaaacttttttgttgaacccagtgatactttgttcaaattggtcaagaatagaattgagtggttcagcattaaattttccaattagtgttctgcttatcatccctaaataacacatctcataggagtgaaaagcaaaaaacaaaaaatttatctcatcttttggtgtcaactagtttcaatataattgtattcagtccccacttatctcgttttccttaactagttgttctttgatttcaaatctgctgttctcccagtgggaagatcacctcttccacatgtggaagaaaacacaggttccttgggttcccaagaagctgttcacaaagcctctgcttatttacaaagcaagatcgatgctgtcctacctgagctcattttcaaccctgaaccctttcctgcgggccagctccatgaggaacgctctgcgggtggttcccattttcttctccaaaatgaagacgaccaaatcttgaaatttgatgtcttgaggagaggaggccatcaaggcacccgtctgccggggtctcttcttccgagggctcaagtgggacgctcgtggtggatccatgggaagaggctgctgctgcctctggctggcccatctggtggtgtctccagaagggagggagactgccaccctcctacacgaagggttttgatgtcatctcaccagcagactctgaagccaggccagggcttcacaggtgctgccctggcaacagcttcctgccaaagtgtgatggggaatttttatctctgttcagttcatttgtccaatatggagatcataatgaagacagtcaattaacttttgttttcatacgcacaatctcattagctcctcagagtaacctcgtgaggaaggtagggaagcatcattgtttgcatgttatttatttctaaatgtactgaggcccttctgtggtctttatttattgatcccctttaaacctcccaactcacttgcattctcctccttttgtagacaatcattacactgtactggatgtctgttatttgcatgggtgttatattctgcttgtggttgttttgactttacataaatggcattgttacatttctcattttgccaatcacctttttatttcacttggaactatgttttccagatccgtattctaattgctctgttgcttctaactgctccatagtatttcatggtgggtattaccacctgttcacttacataggtacattttataagcaagagaaccaaggctcagttattcaagatcacagaataaggggccaagccatatcttgaattcagttctttggattccaaatgctgtatgcatatattagttttttaagtggattaaggttgtccagagagtagtctgttataaaccctaaaataggtcttcttcagtgggatggtatgacttttagatgataaccactgccataaggagacattttcataactttatgtgcaaaattaaatttgtctttcaccaatacactctatagatctcatttcctgagcagctactacacggccaaggcaagcacctaccagccttagctgacaggatcctcacaataccactgtcaggtggtcctacctttctcatttggctaaacaatttgcccaaggtcacagagctactgaattttcacaactgagaaatgattgagctaggatttggactcagatctgtctgattttaaaagactactcttaaccaccaaggagccttcctctgtattgtcttctccaataaccaatctgagctctgctcaccctttgtccttttttttttttttggagatggagtttcgctcttattgcccaggctagagtgcagtgacacaatctcagctcactgcaacctccacctcctgggttcaagcgatcctgctacctcagcctcctgaatagctgggattacaggcgcacgccaccacgcctggctaatttttgtatttttagtagagatggggtttcaccatgttggtcaggctggtcttgaactcctgacctcaggtgatcggcccacctcggcctctcagagtgctgggattacaggtgtgagccaccatggctggccgtctgtgccatattatttgagacttttgctatctccaaaacacgtgagcacctcacaaccgtattaggggaagagtcatgtgacagctgccttaaggcatgggtaaagcactctgtgttgctcaagaaagcaaaatcagaaatcttcaggtggaaattgtagagtaatagattccagttctccgcaagtaagacctgtttagtaactcagctgtctaaaaatatacagagagcagctttatacagttgtgtgttacaagtcatgaaaagtattcaaacagatgctggataactgtttattgagctgtaacagaagggaattcagacatctggtaagggcctataatgcagccctgaaattcccggatgctatgactgtttgctagagatcaactggaagatgagagtctattttgaccctcactattatgtgtttggttactgaagagctgaatgcttcatgttagaatgcagtcttagctaccaaatggtgctgcagcagggagttaagtaaatgattctagcaagagtctgggattgttgtgttcgttcccaaggtatagccacctaatagtaaaggtgcaccacctaagcagtaaagggaatggggaggtagtactgagatgtggctaacagctcaggcttcgtcaggctgcccataaaa

SEQ ID NO: 913584 - DNA, 4001 bp, Homo sapiens
ccgatggcccccactacacccccaatggccactactgcaccctggccatgggcacctaagttgcttcctcagcagggccagggctatgggatgcctgctcctctgccagcctcctgcctctcctgcctatccacctcttcctctctctctgcgtgtgctggtgctaggttccctgggagtcagtcctcagctctctcctctacacactacccccgcagggacccccactgtcgccacaacccaagcattctcaggtggaatatccaccccgaacctctcgcctctgatgcagactgaaggcccgtgccaagtgccccagactgaatccattaggtggtgcacagggtgcaggttacacactgagtctgcagtcagatgagctctcctgcacttttgtgaatgtgtctgggcctcagtttcctcatctgcaaaatggggagatggggaggaagctcagtcataatggtcctgaagcaaggaggccccctatgcctcccagcatgtggaacaagctaagtgcaggcccggtaggacccagggctgtcccaggactgtccccgtgaccactgtccagctggctccgtggtcagggcatactgtaagtcattgacagcagagagaagcaactgttcacagaaaggagagcgctccggggacaagggctgccagggcgcttcccaaaagtcagagagccaggattcgaaccacaccagcagagggtcgggcaggtccagcacgggccaggcacagaatgggcgcggggctgctgctgagacggtgcccttggaggacacagcctgggctgtgggaggcgagaccaccaaaggtcttcccagtcgggtcgagtggcctggatgaggcaggcggtcaaggatgtctgtggatggtgggacggggaatagcaagcccgaaaaccaactgggaagatcccggacccgggagagcaggagagtagccacggcccagtcccgacaccaggcgcgcagatcacgaagaggtgggcgtccgcaggcctcggcgaccggctgcgggtccccggggcgcaaggatgcgggtcccacgcggacgggcccgtctattcagccgcaagggaaagcctccctctcaggaatgcgcactcgggtccgaaatgtaaacttgcaacccgactccttccatcccccctcggaagcgacaaagagccgcggagcaaaaacaggcccccgctctcccggaagggtctccaggcctggggccactggggcgctcggccgctcgccttctctccaaggtcccacacggtccccagcgagaccgccgaggggcaaggggcgctggccacccaggtcgcgccccctcctccccgccgggaaagggcggaattatccgctgggaccgcgccgacctgagcccgcccacccagagcccggacgcgggacgcaagttcatccaagaagcagaagccgccgcgagacagtgacccctgggcttccctgacgggcccagccgcgcagatagcagcggccggggccggggagttgggggtagcccggggggctccacggcagaggtccagaggagcgggcgtcggaggggacaccctagggagggacgcgcccgcccccattcccaccccaccccctcgtgttcccgacccgcatccccggggctggagctgacgccgccgggggcgcggggcggccggggtcgccgggcattgcgagcggggcggcggcgcgggcgcgggcggaagcgcctctccccggcccggcggccgctcggggcggcggcaacaggcgcccggcacacccgccccgccggagcctgggcttggggcgagaggcgcggcggcggcggcgctgctcacccacgccgtacttctcctcgcgcttggtgggcacccagcgcgtcatggcgccgccggagccgccgcgggtcgggcaggaaactccgcgtctaggccgccattttccattcctttcgagccgcgacaggatggggaggaaaaagtttgcggcggaggcggcgtcatgtgggacggggcgggcggagcgtcgcgggccggatgggaaaggccgggagcgccggcgggaggcgggacggccgcgggctctgcgcccgccctcggcgcggaccctgggccccgaccccgcggtcgccggggctccccttcctctgtcccagtgcgcccagccccgcgctccgcacccgggcacccccgcggggttctcctgagttcctggagctcccggggctggcgctcacgccgtgagaggggtgcgcccttaggggggcgggacggacggggggtttctacgggaggtaggaaacgggcggcttgcaaggcgcgggcttaggccggagcctggtggtgcgaggtccccagctcggatttctccctggtggagagtcccggagcagaacaaaccagcagaggctctggaaagggtcctcctgagcacgtggctcattcattcattcgacaaacgttacctgagcgcctgcccactcattgcccgagtgtgctgggagcgccgcaccaactgcctggtaggtgggagaagggacacgtcaggtaacaaacagcacaggtaagtgccggccactcaaatggggtggaaagaggtggcacagcgctgccgagggagtgcgttccagacaggtgacctcttgcttgggtgctgaatgagtggagttttccagagagaccaagaggaagcagccgcagaaacctcagcccagctgggcttgcagaagctaatgctagaatagttgtgggactcaggatctgctgaagtcgggggaagagagaagtagggaaaggaaagcccaggccacgcgtggggctcaggaacggcatcctcgcccgaggtgggagttcttctcaggccctggtgtttcccatgacagtaaaaggtgggggcttcagatttctccaagggaaaagttaaagcaacacacacctatttatttttactgtaatttcagaaaagagaggttaaaaccaagacatggacaaagcctccgaatgaaggcagccctttaaatggaataaatttggtttcatggcacattaatggggtgtcttctctccgaagacacagagacaactacagtaggtctgggggccgtcagggattggaggaacgaaggtaagaaaaggaagaaggtaagaaaaagaggtccctacctctgtgaggtagggacagtgctgaacagcagggctgggagagcccacagggaggtggccaggatggccacagggcctggggaggaccaggtggggcaccatcctgcggtagagaatgcccgtcacctgccctaggggccacccagaatgcagattaaataagtatttgggaatggcacaggagcttttccattttcgtgggttagaggaaagctgctgcgttcaagaggataacgtgggacctgagcattctggtaagtcaaccccacattcatggaaagccacgggctctgttttactgataaggaactgaagtcccacagaggaagtggccaggctcactcacacacagcatgcacttgaagctttctgtggaaatcagaaacctccggggctcaggcgctgtagtggtggcctggtgactctgaccccttgaaggagaagcatctgtgaaggtgctgtccaggacaagtagggtgctctacggtaaaggacatggtggcctgacctgctccagagcagggaggcctcccttgaggaaataagataaacccagactttaaggataagcagaaaccagctaggtgaactggagtgggaacagcacgtgaaaaggccctggtttaggaaggagcaccactccttcagagcacagaaaggccaggatggccgaagcatagggaacaacaggaaagtgacataaattgaggctgcagaggtagaagaagggccttattggtcgtgctaggaatttggaattctgcaaagaagcctgggaaacagattttggtgacactcgccttctctttaatgtgcagtttcagttctgttg

SEQ ID NO: 913585 - DNA, 4001 bp, Homo sapiens
aacttcccctcattgctccttgagaaaagggacctttttattctcgcttccatcctggcacctagaatagtacctgacatagttataggtggtttgttctgactgagtgactgctttaacattactaaacattttgttattcctctagtaatcaggcacgtaccttcacaccttcacatagggtccttatatgtgagttgttctttgaatagctatcccctcttcttcactcagcaaacgcctattaattcttttttttttttttttttccagtttttttgagacagggtctcgctctgtcgcccaagctggagtgcactggcatgatctcggctcactgctgcgtctacctcgctggctcaagcgatcctctggcctcagccaccacaagtagctgggactacaggcatgtgccatgatgcacggcttatttatttttttgtctgagacacagtctcactcactctgtcacccaggctggaatgcagtggtgtgatctcagttcactgcaacctccatctcccgggttcaagcgattctcctgcctcagcctccagagtagctggaattacgggtgcgcaccaccacacctggctaatttttttgtatttttagtagcgatggggtggtttcatcatgttggctaggctggtctcgaactcctggcctcaagggatccgcccactcggcctcccaacatgctgggattacaggcgtgaaccaccacatccggccataatttccgtattttttgtagagatgaggtttggccatgttgcccaagctggtctcgaactcctgagctcaaatgatccgcccactttggcctcccagagtgctggaattacgggcgtgagccactgtgcctgaccttattaattctttaggacccagaaacatcatcacttctgttgggtcttcctccaaagagatgtcacttacaccttcactctttcctaccattttatacaagactacaacctctatttaacgcttcttattatttaagtacatgtttttcccaaccactctgagtcctgggacaacatatctttttctttctgttctagtttagagcttggcacatagtaaaagtcttcctaaatgttgcacgaacgagtaaatgattttaatttccacaaactccaggcttccctgattggcccctgcctgtgaacatgagtcaccagttgttatcttgaaagcctcaggaacttcagacgcaattcatcctggctacccagtgggtccagaaaggacccaagtgcacaaaggggccggcatcggccaatcctagggtggggaaaagttaggtatccatgcccctgtgcccacttcttccaggcacagcccttggttcttgctctagctcccctaaagacacagaaaatatttagaagttcacttaacaaaaatattacagctggaaaggacctcagagataacaatggtagtccatccacttcattttatagatgaggaaagtgaggcccaaacaagtaaaggagccgactgaagcgcccgtggtgaattaatggcacagtcggaactagagcccaggcctctctcctctctaaagtctaaaacattcttggatttcagtttcctcttctgtaaaacggggtgaaaattagcctctcaggacagtggtgaggagcaaatgagataatgaatgtaaaagaaattactatattagcaacagaaatcagagcggagcgagatggtgtagaggaatctaaggggtgtccggagacatgtgttccagtcatgtcatctctgtgaacctcagtctcctcatctgcaaatgcaggacctggcccggctgaccgccgagacccttccagctctgccgacccaggccctgaggcccttcccggagggccggaccctgagggaaaaaaacgaaggagcccgtggggaccctcgagttaccgtcctgcagcagcgcagtcttctgggctgtccgcagactctccaaccagcccgtcaccgccatctttcccctgctaagcagcacgcccagccgctgccatggcaaccgttccagagggtcacttccggctgactcggaagctattctggccatttgccctccttccccccttcgtccgctctcattggctctgctggtaagtggtctattcctgcccacccccgggtgactagcttggccagtagtcgaccccacccggggaccgactctgggggttggagagactcttggggccggggtcgggcactccagctttcttctagccccgagctgggattccctggcctgcgccagctgcgtacacggcgagtacaccgcacctgcccgggacttcacccgcagctgcgagactcctccattcccggagggctccccacacctgctgcggccgtgccccatctccccgcagctgcggcgctgagcacccccatgtcgagaggctgagaccaggacaggtgcagggcgttcccactcacccccgaaagtcctcctccttcctctgcgagtctgtgttggaggtagagaaatagtatgtggggtttatgtgcaggtcctccccaggctccgctccatcccctaaagctccatttcctagcccagcatcccatttggtaaagcccttcgaagtgggccgcagcagggctgtgctgaatctttagcgcaacccctctgaggaatggtgtcgtttcctactcctcaaaagtacccccgatggcaccagccttcccctcatttcccgtaatactccaacttcgaaaggctggggagtgtgaagctaggctaaaccactgaagtttaaccgggtttgaagagaccccctcccccgacccgcttccccaaactgggctgctacccccaaagcctggtcaggaaagaccctacctccataggcaaaggggttggagggcctcaattctggatttccacgtgcagcagccctgaccaacgctccaataggccgggatccagccatacttcaatggatcccaggggtatcttgaaggcatttcccaagcggcagaaaattcatgctgatgcatcatcaaaagtacttgcaaagattcctaggagggaagagggagaagaagcagaaggtgagctgacccagtctcagaaccctcgtgtgcttgaacccacagccttcatgtgcttcagccctacgttgtttatgtccagaatcagatattggagctgactctgcctgtccagggcctgcaggtctgtttgtatctaccttgtgctaagcttggtcctgggtcttggacaggctatttgctgtgttaccttcttttctacccgaagacctctatccatcagaaaagactccctgggccctcagggaatgaccagtataatttttgccctgaggactgggacagaaacccccctccattacccaggcttgttgttagttgttttgcagccaaattggcaaataaatggcagaggctttggaggcagggttgtcgggtctgtcagactgtaagggcaagaaacgcgctttgttgaaagaataaatgataaaggattcaaagtatggagagaggctgggcgcggtggctcttgcctgtaatctcagcactttgggaggccgaggcaggcagatcacctgtgctcaggagttcgagaccagcttgggcaacatggcgaaaccctgtctctactaaaaatacaaaaaattagccaggcatggtggcacacgccggtaatcccagctactcgggaggctgaggcatgagaatcgcttgaactcgggagatggaggttgcagtgagccaagacgatgccactgtactccagcctgggcgacagagtgagactgtctccaaacaaaaacaaaacaaaagaaaacaaaacaaacaaacaaaaaacaaagtaagaagggaggaggcattcattaaacaaatatttacaggttacttacaatgtgccagacacttctagattgcaccaaggaacaggacgtatgaaaatccttgtcccttacattcaagtgctggcctgtgag

SEQ ID NO: 913586 - DNA, 4001 bp, Homo sapiens
atgccacaggccagacccaaccctctacctctcttcatacagccctaggctaagaatcgttcttgtatattcactgaaaacaataacaagagtatgtcatgactcaaaaattctatgaagttcacactgcagcatccacagatgaagttttgttggaacacagtggtgcccatcgacttcctaaatgtccaggactgctttcctggcagggccaagcagctgagacaggaacagcgtggtccgcaaagctgacaacatttactctcgggctggttgtggaagaagttttagacccttggtctacagagctgtctgttcccagccgctgcacctctcctcctcctgcccagtcccagctgagcgccaggctcagccctgacccggcaccaccatgcatttgcagagcctctgtggccgcatcaggccctggctgccttcccggtgctgtccctcttcttcactttccacccctcccaggggacccacgcattttcaaggaagccctagaaaacgcaaccgggcagaaggaggcttgaggagacgtgtggtctgggctctctgctcataggcgcccaagtgttcaggcacccgcactgagactgggtttggaacccagaggagacgcagctggggtgtggggctgtgctcttcttactgcactcatccggatggaggtgaaagttcccgggaagcagctgcccctccgcactgacatggttgcctgacctcccctgggaaggggtcctcctgccacccccaaactcgacccccacatgccagctgactggcaagacctcctgcatcaagaccagacccagccgggcagaaccctctggaggcagcagcccctcccatctggagaggggagggctccttcctcgctcagagtctgggggagtggagcccacagcccacggctcgagctaatgccagaggtcagaccccacggccctcccgccgaggccaagtccagagtcgggtctgggaccccatggactcccccgcccaggtcctgccgggtcccgaagcctccttcctcccacccccatctccccccgcccgagcggggaggctttgtttctggcagagcgggacctcccgcgccggtgcgtgtgggtgttggggaggggtctctgctctcgaaggttcaggggctgccagggttcccggccagtggcccttgaccgctcgctttccttggagtcgctgaacccaggttactggaagggttcggggccaccagggactccggccagagcggccggggctaaatcgctttgtctcggacaaagagctcccgacgcagcgccagtgcgtccaaggggcgggcgacccacgggctgcgccgggaacggcatctccccgcgccccggaccagcccgggccaacaaagggccgcgtccgcccgcctcgccacccgaccgccgtgggagaaaggagccgctagcgctccgagggacaggccgcccggccccgggttctccccgggcgcagccgaggctcccggaagccggcaaggccgggcaaggccgggcagggcccggcagggcccggcagggccgggcagggccgggccgggccgggcctgggcgccccgctccttaagggggtctgcgcggcgctagcggggactctcggaccctggggcgcgaaggagccgagcagggaagggcgggcgccaggacagggaccagacgcaaaggcagggaccccccacccacgcacaagaccaggagggtccgcccggcgtccaggccccactccgggcggcgggcagggggcgccgggcgaagcgggaccgggctcaccgtgatccgggggatgcttttcttgccctggaaggacatcctgctcctgggggtctctggtaggggcggcacaagcgggggcgggcgggcgggcgggcgggcggggggacgcgtgagccgggacgcgtgcgtggggacggcgggagacagactgcgagcgcgcggggccgcacggctccgttccggtcccgcccccgctgggccccgcccccaccccggctccgcccccggcaggccccgcccccgatagggcccgccccagcccgagccccgcctcaccccgcccatcagccccgcccccgccctcagccactccttcgctttaaagcccccccagcgctggaaccgctgcagggtctgatctctgcaccccgggcccccgcgcagacccgcggacgagcgctgggtggggatttcaacctgctccagctgatgtgcgcggggtttgcaccccggggaggcgagggagagagtccggccacgtcctgccaggccccgcccgcgcccccgctgccctccagcgcggaacccaggtcccaggagacgcgaggcgcccaaggccccgggattccgagccagtcaaccccgggccgcgacgctctgggaaccacacccgtccaggaaggcaccttggccaaagccggctccttcgcagatgacccgggccagggtccgagcgccaggctgtgaccccgcgaggctgttccacgctggccgcgagagacggagggcaggaggggcccgaataggacagagagagagagagagagagacagaaggaggcgcacgcgctccccagggaccgggacgcggtggtgggcgggacctcgcgggggtggggggtggtcgcaggacccagaaggctcaggacctttacggatagggaggaccccgcaggggggagcgggggagccccacgcccggcgtcctccgggtgcgagggtctcggggagtccgagcccgggcccacggcctctgtcccgcggccactacctgctgggggtcccgggcctgggccacgccgggctgccctcggggacttgctgcggccgttgaggggtctccgcgcgccgcgcagactcgcctcccaacccgagggcccgggcggccgccgcccagagcgtccagcggcagcgtcttgctctcgaaggcgtcctccacgcagcggaacacgcagccaagcttgggccgggccagaggcctcgcgggctcctgaggctgccgcgcggtcacggcaggagcgggcgacagaatccggtctcggagcctcctgtagcgaggtctgcgcggcaggtgcactgggcggacctggaggccgcgccctccccccccgcctcctgccgcccggcagcgctgcgcggagctggctctgtccacgtagcgggtgctgaacgccccattctggcccctgggtgctcgcttagtcccggccacgcgtggctgctcgccctcgggacacactgggcgctgggaaggccgggcggggagcgcgcaccggagaaaccgctgtgggaatcccggccacatttccaggccccttgggccgtcccacgccagacaagaaagccctgactccgaaaccctgggcgagtgtggagggcgcgcgggggtggggtgtacccgcccacgcaaactgctgctgatctcccttaaagccgagttagaggcttggggcgagacaggagtgacgggcgatgctgtcactccatctgtcattctacccagcctgcagcagctgaattcgaacccagagacttcaggcctttgcgttgttaccgcagtccgcatttcaaagccagagtttggccactgagtcaccatgacctcgagtactggcggggcccgagccagcagagctaggtccagcagcttcccaccccttcgtcctcctctgggctccccctcccctaaatgattaatgcaatgtctgttactcacctgtgtgggaccgtccacggcaaatatcaccaactgttcttatgcacgtgcagaagttccgtccctttcctaactgtctgatctcttccatggttcacatttgaccaacagccacaggagggagcctcccaggtggtcgaccggagccaggtgctgccaggcacccgactgcagagcttgccctccaggtgatctcgcaggtgagaactggggctttcctccacagtgggcggaaggcgcggactccgtttctgg

SEQ ID NO: 913587 - DNA, 4001 bp, Homo sapiens
ccctggttcagatgcacagagaaggcacccttaacatacagaaagtctccctcatcccctagggtacactgtcaggggatgcacgtctcccacccttccataaaacccaccctgcatgggaacttggggataaaatgtgaaatgcaggcaaatgtgtggccttcccttcctaggaatgctgacagagctagcagggcttaaacactggtcctcattagcctcctttagaaaatcctattggactcttaagagcttttatgagaaaaacaaaaacaaactttctgaggctcagccactgctcagggcagcctgcagcaagactgacaagcatcacctgaagtctcaggtctcctagcgcctcacaacatataccctgccccttgtctcccacaactacttggcttcccaaattctcccaccacaataataaatcaaacgagtaggttgccaaatgccagtccgacggttacaaaagtcccaataccccagtgctgagactgctgctctgcagaaggccccattaaagcccacagtgtggcattggctcacctgatggctactaattggccccctgatgtgaagaccccatccttggatccctcgggtcctgagcaggggcatgctgaggtcccaactgtccccttctcaccaacccacgcccccactaacaactgggtgcagaagccagactggggatcctgaggggaaatttcttctcaggcctggagacactcaaagatggaaattctggcctggggagtggggagtggtcgacatttagggttagtgagtcacagagaaggagccatgctaggtcagtccgggcaggtggtgggcagggccacctggttccagggacggccaggaggccgggaagggaattgagctgcccagaatccagggcggaagaggcccctgcagtgttctcgccagcggccccagtgagagcagcccagcgacgggcccttgtaggctcgtgcagctcgtgatctgggccaggacgcggcgggtccactcgcctttgctttctgggatgtttgcagaagcaccgtgaaagattgatgcggccccctgggttgcggagccccaattagaggcgtgacaccagcatctgtgctgggaggattcggccggtccccgcggcacgcctagcccggggcgtcctggcccaggcggggagggagctgggaggcaggtggcgacggggcggggagctggagcgggcctggagtggggtgtagggaggggtccagggaggcccctactcaccggcaggcggctgcgccccccgcagggcggggacccagccacccaccagccctgctgccgctccggccctttctggccggctctggcttcatggagaccctggggcgcagcgcttacttaccctctagctgtggcgggcagtggaaataaaacatcgccggctgtcagatcggctggacggccgagacctgggagggtggcagcagaacggacccgcgcgcgttgctcctgcctggctgcaaagcaaacagcgatagagcttcaagtctccctctgccagcgctcccgcccagccctagggcgcacccggcgctcccctcctggaaagtccctcccaacgccctcatctcactgcgggggacaggagggaaggcggcagccccgtcgcaagcagcaaccccacagggcagtccttcgggtgtgtccacctcccggacggccgtgccctcaccctggccccagcaccaaaccccgcagcgtagtttctggctctctggggtcccagccagaagccctgcacccgggccaccgcagccaggtccggctagcgcgcaaggccatctgcgagctgcagctcaggccaggaaggcagccgagccccaaggcccggcgctcggggcccggcgagtgggtcaggagccgagcatacctcggcgggcggcggtcgaggaggtcggagcgtgaccgcctccgatccgcaagccctgctcggctggcggcgggcggggctcggcgcggctggcgcccgcaggaccaaagaagtgactcgggaagtggccagatgtcttgctgtctgtctgcagcgcgcgccgccgctcagcactcgcctttataatctcacgcataattggccttaatctgattatttccagcgctgtctacagcgagtaacttggataggtctattgggccttacaaatggcccacgtggtgttaaaaaaaaaatccgtcatttctcagcaaacatcaggaatgctttttcctcttttaaaagagaacgatacaaccaccaccaccatcacccccaaaaacatacattttccgaaaacacactaggccccaccccccacctcatgtcccctcagaggcaaacctttctccgagagagcctggtttgggctgcccttatcaaaggcctggtgactcccgggctgcaaattggcaaagcgctgctaattgtcgccgccggatgggttttggggggactctttgcacacggcttccctttccaaacgatcgtacaaaaggaaagtttgattttgttctcagcaaggggtccctgaatttatgttcgcttctcgatgcaaatgatatgcggtgggaccctttgcaattacttttaaaatgcatccgaggcagacactcaacggagagagaccgcccttctctctgcctgggtgaaaattaaactctaaagtaccgggctgaaattttcaagtcaggggcgcgggattggatcaaatcacataaactgcaaaaaaagcaagtctaatggcgcataattggttctgtaatagcattacaccaggataatagcccgttacggccccctgcactattaagtgcttccctggcggaaagcctttatgatattaaagggggaatataatgatattttggttattaaatgcgtgtaattaatttatgcaccactgaaaataaagttggtattatgacccactcaagatgcatcagaagatgcaagtcagacaactgttgataagttctggtgtctgtgctccgtctagactgctgattttattttgggacgatggcttcttggacagactacataaattgaatattttataaacattctaatgctgcgttagggagccttggcgaggtggtgggtcgggtccctgcacggcccgggatacagccttgatcttaaagacgcagcgctttggaaacaaaaggcctggcaggcccgccgctggacaccagcgctgggcaaggagcatcgagctgcaggacagagcgctgggtcccggccgccgttgacgcccctccgaaaacagccgggaggaagaccagtcccgctccggtcgaggcaagtcaggatctattccagtgaagcggcccttcctgggctcagtcgctccagagcagagtctgctctgcctcggggaaagaatcacaggaaacttccgctcgtttcagagcggagagagctcggggcgccatttccgccagggccaccgactccgagagtccaggcagccggcccgggaggagcggctagcaggtcccgaaggcgggtgaggtggcaggcaggggccggcagggcagccgagggcctttcctacgtcatgccaagagggctgggagcccctagagctgatcctcccttagcccaggtcaagagactggctcgcgcgcgctgtctctctccctgtctccctcagagggcccctgctctctggagctcttgacaagagcccgaggctcctcttgccgcctaggtctgccgaaagtcccctcgggttccctcctgccctaggcagcagttccctgcctgtgcgctttgggaacccggtggccgtgaagtgaggtgcggacagcttctgggccgcctcggccaagatgctcaggcgcacctgggggtgtgtgcgggaaccctcagcggcagcagcccagcccggggtgcagtgttggccccagaaaccaatgaggtccaaacgccagtctcagttccccatccctgacatcgaccgaggcaagttcctatt

SEQ ID NO: 913588 - DNA, 4001 bp, Homo sapiens
aaattagctgggcgtggtggcgcatgcctgtaatcccagctactcaggaggctgaggcaagagaatcgcttgaacccaggaggtggaggttgcagtgagtcaagatggtgccactgcactccagcctgggtgacagagggagactccatctcaaaaaaaaaaaaaagtaaaccctttatatgtgtgtatatgtttccttatgttggcaatagcccacacaaggtagtagaagtatgcaagtaaatttaacactggttagtcaggggtagaattaagaggagacaaagggagattatgcagtttgtctttataaccctctacctcatttaacctagtataattaagcatgtcatatttgtaactttttcaatttaaaaaaagaaagacgaaaggcaagggatgcttaccctggatcttcctatggctagacgattatctccaggtattaagcagcaagatatgtattaaaatcacatataggccgggcacggtggctcacacctttaatcccggcactttgggaggctgatgtgggcagatcaactgaggtcaggagttggagaccagcctggccaacatggtgaaaccctgtttctactaaaaataaaaaattagccaggtgtggaggcaggtgcctgtaatcccagctacttgggaagctgagacagaggattgcttgaacccaggaggcagaggttgcagtgagccgaggtcacaccactccaacctgcacttcaacgtgggtgacagggtgagactgtctcgaaaaaaaaagaaaaagaaaaaaaataaatacaataatatatggaggggtcctacagcatctgcatctgctccttggtgagatggaacatggctggagtccgggagagtggagggaggagcagttaagaacaagcctctgggttgggcagagctgcattttaatcccagctctctgccactgactgagctgtgggacttgggccagttatttaactgctctgtgcctcagtttccctatctttataatgggagtaattagcctctatcactgggttatcaggagagtaaaatgagatcatgcatgcaggatgcttagcacaatgcctggcatacagtgttcaagaaaggatagtcgttatcattattaatattatttacagtaggtgcatctcagttgtgtagggagtggggaatggtggttataaaaatctaaaggaggtgacagtgacctaaatttaggctcccatacttccaggcatatattgatgtgttcctgcaccatccacctaagaactgattttattcttgagggtattatagctagctaaaataaaagactacatttcccaggctcccttgcagctaggggcaggggaagtctgggatgggactttgctttcggaagatgcccttctgctctttctttccctccaccctcctgctgtctgggtcctagagttgatggctggggtcctggcggcaatctgggaccctgcagcacctggagggaagaagccacgtccccaggacagtggcgcagaaacacaggagtctgagtccctgatgaccctgcagtggccgtgccagccccagcccacctccctctgcacttatatgtgagagagaaataaacctctatcttgcctaagactttgtttaggttttctgtaatgtgaaggcaagcccagccctaactaattgagttctcacagaacgactacaaattccaaagcccatggctaggaggtggcgcagggcgtggcctggggaggggctgctgcctgctcccaagcgagcctgggcctgggcacttactcatcgccaatgtagagcttgggccagacctcgttgacgtgggtgtactggggactgcccttccagaagagccgctccagctcaaaggctccaggggtgcagtagtcctcctcctccccttcctcctccatcttcggcgacagcctcttggcagatgagtaggcattcttgaggcttgtcttcacttctccagatgtcattttagagccaagggattttctctcctttctgcagctggttatgagagagaagcaggatgggggttagcaggggacactgaggcagggaataggctttacaaaaagaggtgggaataagcttatcttaaaatttggaaagagtttccccaacctgctatgccccggcttcctcttcccaggccacacaggtaaacaaggaaggccatgatggcagttaaatgacacttccccaatgttccaatctttctagagaaggagagctggggtccttggacgtgggccaaggcgggctctggagctaagaaatcctgcaagcagccagttccttcccacctttctttagactttactcctttggttcctactttttcctttatctgactgaaacctactggtttgggccatttgggacccaaaataggaaggcccagaagattcctgacattccaggcctgtggccctctcagtgtctgcagggagccgtcagccagtggaaagagtacatcgccaaggccatacctgcccgggcctgggtctgggccacacgcacatcagcaggacttcagaagccttgagaggggaggaaacctggctgcatgagggttaacctgtcagaagagctgaaggcaatgctcacactctcacactgggagcctggccatcactgtgttaacttaccaaggggattggaagagatgccccaagatagaaagctgtgcctcgagactgaaatgtgcatttggagagcttgttaggctctgccagtggaatgtgggagaggactttccattgtccccaaggagaggaatttgcagtggaattggacattgattgtttcctgagctgagtaaatgatgcacctatggtcagcctgggaaaggagactggagagaaggaggaaaaggtgggaagactgagaaccatggaggtgaatgctatttgtttatttatttgacaaatacttatataacacctattgtgtgccagacactattccaagtgcttgatgattgtaagcccatttaatcttaacaacactgagatagggttatcctaataccctatcattagccccattttacagataaggaggatcatgaattgaggctgtctgtagcacagggtcttagtgtcagggggagggagatgggaggtgcagtgtgaggaggggcaggccggggatgcagagaatgtaggaaagggttcatggcttcaaagaccattaggaacatgtcaaagggactcagaatacaacttgaagaagcttccacttatcaaaactggaacaatttgaacatgaaaaataaaaataattccagtggatcaaaacacatcaaacacttaggtcataataatactgaaggccaggcgcggtggctcatgcctgtaatcccagcactttgggaggccgaggcgggcagatcacctgaggtcaggagttcaagaccagactgcctaacatggcgaaaccccatctctactaaaaatacaaaaaattagccgggtgtagtggcgggtgcctgtaatcccagctacttgggaggctgaggcaggagaatcgcttgaacctaggaggcagaggttgcagtgagctgagatcgcaccactgcactccagcctgggcaacaagagtgaaactccatctcaaaataataataataatactgaaaacagtccgggagcagtggcttatgcctgtaatcccagcactctgggaggctgaggtgggcagattgcatgagcccaggagttcaagaccagcctgagcaacatgacaaaacccatctctacaaaaaaatgcaaaaattagctgggtgtggtggtgcatgcctgtagtcccagctactcaggaggctgaggctgaggtgggaggaccactggagcccaggaggctgaggctatagtgagccaagatcatatcactgctctcctgggcaacacagtgagaccttataaaaaaaaaaaaaaaaacccaaaacttattatgcacggttggaagat

SEQ ID NO: 913589 - DNA, 4001 bp, Homo sapiens
tagtcccagctacttgggaggctgagacacgaaaattgcttgaagcccagaggcagaggttgaacccaggaggcggaggagcagagatcgcgccactgcactccagcttgggtagcactgagactctgtctcagaaaaaaaaaaaaaaggagaaaaaaagtactttggggcagacatctaggtaccaaatggtgctttcccaaagttgagtgttgcagagaaagagctgttctgctgtttgggagaaatggctttcagcctcagggttgctcctaactcatggcatgaccttgtattccaggcctcagtttccccatctgggaaggaatcgggttcgacaaaatgctggagcactaagcagaggacttttttttggcggggggggatggagtttcgcccttttgcccaggctagagtgaagtggcatgatctcggctcactgcaacctccgccccccatgttcaagcaattctcctgcctcagcctccagagtagctgagattataggtgggtgccaccatgcccggctaatatttgtatttttagtagagacgaggtttcaccgtgttggccaggctggtcttgaactcctgacctcaggcgatccacccacctcggcctcccaaagtgctaggattacaagcatgagccaccacacacggcctaagcagaggatttttaaaaagcagggatgggagggcactgatgactgagaggaaatgaggcatcctccccatgaatgagcaagatgggatatgggcttggaccccaagtcctacccccaggcgtgttgagggcacggtggatgaagtcagccgcagaggagaagtaggcactgatgtcaaaatcagggaggtcgtgggctggcacccccaggtagctcacactgctgccgtagaagtcagggccgccctgacagtagaggcccttgtgggcggcgttcagcacgtgggtgatgcccagcttccacagctcaaagcggttgtttgccgtggccctggggagggcaggaagggcacttgatgccggccaagccatgggaccaggagggaggctgtgcctggccccctgctgcagagggaccgagccattagggtccaaagagagtccaaccccagcaagctccaagtggggtctgactccacagccctatacccagagccccgcactttctggtggctgagccggcggtgtgtgtgtcgggggatctttagaccctctttgcttcctcaatgcatctgtccctgccttggccaggacaggaaggaagggattgcttcagccctggaacctggctgcccctcccttcttgccccatgtcctcccacgcatatccgtcctctactggctaccacctcatacctgcttctaacctacaaatgtttagaggcaacaccttctctgattcaccttcagtcaggcttctccaccgtctgtatccagaggagggaggctgggcccagaaacagggggctctctgtctaccttatctcatgccccaaatactatttcctgggcctctgcctctacacttgacagttgtcctggaaatgtttcctggaactcctgggagactccctgctttcaggcaggcgaagtccctgctctccctggtggccatacctggtcactgcactgacctcagcacccccgggggtcctggagaaggtccctggcctgggatggtcagagcagagctatttctccttgtttccaccctcctgtgtctggtaaagcgaccaagaactgcctctccacgtccccacccccatgccccttggccagctaccactcacgcatctcctatgaaaaggttgggccaaacttcgtccacacggctgcaagaagacttccctgcccgcaggagctcctccagctccaggatgctggggcaaggcgtggctttgtcctctccccccagctctgggagagaggtctcagccatgggccagcccgcccacccctctgcctctgtggtcactcctctctgcctctccagtgtcatttctccttcccagagattgacagggacaggtgacagaagcaagtgactcagcaagtcacaggggcctctggagtggacaagaccttttcctccccaagcctccccccacccccaaactccatgagaacacagaatcagagagacctctgcaagtcagctaccaccctgaacctcagtttcttcatctgtaaagtaaggataatcacacctacctcagagaatttgaggattagatgaaacaaaggacatgctgggtctgacacatagtaggtgcttagaaacatctgtggaattagtagatgtagagccctgcctaaggctattaggttctgaggactgagttaaagtagagatccagggtgcagaggaggtggctggttccaaggatgaatgatagaaagaactgaaagaagtgtacagtctaggtgggccacaaattgggcaggagctggattggatgtctgttggatgagtctctgaattacggaggtcagggacagttttctgagttgtagagtcagagaaatatgggtaagagacatggagagcttcctttaaagggtgcccacaagattcatggggggagggggaaggtgtttttttttgttttgttttgtttagacagggtctcactctgtcacccaggctggagtgcagtggcatcatcttggctcactgccactaccacctcccaggttcaagtgattctcctgctttagcttcctgagtagctaggattacaggcatgtgccaccatgccacactaatttttgtgtttttagtagagatggggttttgccatgttggtctgactggtcttgaactcctacctcaagtgatcagcctgcctcggcctcccaaagtactgggattacaggtgtgagccgccgtgccgggccaatggggcaaggtttgaacaatggtcctgtagtgaagatggctaacttctcagaagagaaggctgaagagggccttgtatgtcaaatggggagacgggaggtgagtgttgccctagactttgagagccaaaggggctaactgtcatcagaaacagtgggagggagattcctctgcctataagggctttgggtcccaaaatagaaactgagaaaggtcaacctgtccttctgccagagctggttatcagcaagagagatgagatgtctcaccctctctcatgtgacttctcagtggccctaatggagctgggaagggtatgagctgcagtggggaggttcccagctgcccttggccttaagaccagtttgaagggaaaggccacaccagggcatcccatggaagcagtctacactcatgtctatcccattcagaaccattgaagtcggcccggcactgtgtggggaggcaagaccaaggaggggctcgtgtccaggttacagctgggtttggacttggtttatgccaatgctagacctggcttgggaggagaccttccctcagggtggtgcagcatggtggagtgaggaaaatacaggatctgatgttagagagatttgggttggaatatcagtttgcaatatgtcaggcagtatgtttctttacttttctgtgctataggatcccccttgcagaattagcactaggattttttttttgagatggagtttgctcttgtcgcccaggctggagtgccatggcgtgatctcggctcattgcaacctccatttcccgggttcaagcgattctcctgcctcagcctcccgagtagctgggattacaggtatgcaccaccacgcccggctaatttttgtatttttagtacagacgaggtttccccatgctggccaggctggtctcgaactcctgacctcaggtgatcccgcctcagcctcccaaagtgctgggattacagacgtgagcctccgctcccggccttagcacaaggattaaatgagatgtttatatggcgtttggcatagacactgtcaaagagtaaatgggcaataaattataacaatgatcattgggggctggc

SEQ ID NO: 913590 - DNA, 4001 bp, Homo sapiens
tgagccaccgcacccggccctgtgcacttttcttatgtgcattctagttccacagttaaaagcagtaataatataaaaggaaagaaacatagggaaagagacggtgggaggcaagcgtgccacctctgccctagagggctctgagagaggctcatgcccccattcccgtgtgaacctcacacccttccgccatccccactcctaacgtgggtcttactcacgcatctcccaggaagaggctgggccagacctcatcgatatggttcagtgtggcagcctgacggacccacagcaagcgctgcagcgaagccaatgtgggcggctggtagggagatgcctggactgccccatggatcttgggcctccggaggtcctgcttctgcagtgagtccatcctggaacagagtggacaccgcagtggctggaggcaggctcccagagggtggatccagctgatggggaagcccatggtgcagtgcctaggtgccacggggatgctgcaggaagggcttcatctatttcacatgaggtattaacaagctcagctggggctgaggcctagaacccttccccagggaacaagggaatcaagcctttgtcactgctatggagctgggcagacctctctcctgccctctgctgagctgcagatgtatgaagctttggccaaggggcccttggagttccctgtttgtggcactagtcagtgcagatctcatccctaaatcagcttggactttgtagggatgaaagccccagatggctgtggctctcagggcacccaggaagcccccaccaacctaagcagctcatctcaagccccctcacctgctacttccagtactcatcctcagacccccgtcccctcccactttcaggggcttggagatcagagcctatctccaggtaagaggccaggactgtgaactggtatttgttagcaactccgcatggaatgagctaatgcctcttataagcctgatgcctctggctgggcacggtggctcacacttgtaatcccagcactttgggaggctgaggcaggcagatcaactgaggtcaggagttcgagaccagcctggccaatgaggcaaaatcctgtctctaccaaaaatacaaaaattagccaggtgtggtggtccactcctgtagtcccagctactagggaggctgaggcaggagaaccttttgaacctgtgaggcagaggttgcagtgagctgaggtcacaccactgcactccagcctgggcaacagagcgagagtccatctcaacaacaacaaaaagcctgatgtctcactcgtgggatatctgttcctattttacccaggaggaagctgaagctcagaatgttttaaaagtgatgcccaaagccatacggctcatgagtagcaaggctggggttttagtccatccccaagcctttcagttaccatctttggggcctccagagagtggtcactaacccatctgcttcctcaagggagcctggtactgctgagccacacacctgcctacaggccctgggttttcctccttacccccacgactcaggccagcactggatgtcaggccccacccgggtcaggtagcttgtttcaggcatctgctggctgaaggagtcagggaccctgcggagctggattttcagcggcaccagaatatgggcctggtgccgtgttggagagggggtcctgtctttgctaactgcccctgatcccctggaccagtgactagggaaggtgcatactgggaagaacatcttttccctttggtaggcagtgccaggaccagaaaaagaaacaggcacccaggaggctgccggcttggccaggctcacccagtgggaggctgtcgggcaaggcggaagtgaagaccaagctgtcctcctcatcccccactgtgacctctccaggtggctgagtggcctgccacctacctggggcatggcctggggccgggaatgggggagtgggtgcaggggcaggactctgcctgagcggaacagggctgggcaggttctgcccagaacacaaacactgtgaagcggctagaattccaggtgctggctggggcgcccatggggggtggggcctgagagccgactgaggccttgtggactgcagtgggccctccggtccctctaaacccccaggcctcctctctgcttggtatctgtttgggattgaagaccgttggttccataaacctccatgaagatgggagtctacctgaagaggtgggaagagaacttctgaggcagggaggagagcctggctcccccagcactctgccataactcattctgtggccacgagcaagtctttgctcccatctggaccacagtttatcttcccatgctagggatgctggacttaattttcaggatgctctgggggtctgacccgagaatgagagaggagtgtctggatatgcggtcactgcagggcagagggcagtgtagtgtggtggagttggggaagcccccaggacccagaggagtccaacagccacactggtctggagccatcaggtggggctgcaccaccccaggcaggagatggggctttgggaagtgggacaggctccgggctcaggcctgcggagcttggcatggggtgaggctgccccctggtggccaatgggtgtgtcacagcccagccttgccagggagcaggcagccaggctccacccccaggaggctccagaggggtcaaggatttgggggctggtaggccacagtgcatgcctctgcctccgaggggacctaggcccaggtctgaagaacggggctctcccctggacttagcgctatgcctggtcaggctccacctaatgccttgctcccgatgctcagggtgttgccccacctgtccactctaacccactgggacccagcccatcccatcagtcagagtcaggcccggccacccccccagggactcgtcctttaagccccagtccctcccaaggaggggaagtcggtggttgtggcagctccgccggtttctgacacctgagacttggtcttcggagggccctgcctgacactacattccatgtctccttgtccccagctgggtgaagcacaggcccaacgtccagcagggccagggcccggccgagctcccctcccactccctgcagtcttccttctctccctgatcccgtgctcctcctcgcccccttcctgcctcccccgctcagcagagcagctgcctctgtaggcagggcttttcctggctgctcctgtgctgctgctgtttgcaagtccatgcacttcttttctgtgtttgcatctctcctccctgggtcactcccccgtttgcctctgtctcccatcctcccccaggaagctcatgtgcctttgcagcctcccatgacgctgctctgtgtgcccaagacatcgggcagaggcacaggcttccttggggcagggggcagctgtttgccatccacctctcagctgcagtttcagatagtcccctggactttcttcctgcccatcctttctgactccactccagggaggccagacagaagtgtggccacaggccatgtggggctggagatctcagggcaggaccagtgaggagtgtggggagaaggcctgcagaagggtggcgtgtggctgccagtggggaacagctgtgggtctctgtgctcagcctgagggtcttggggagggcagacctgggtagaaatctcaggtctggtacttgcagctatgtggtcttgtcttcaccaagccagtttcttcagtggggctgctgtgagaattccatgtaataattaatgtaaagcacctcccacagggtctgtcttatggtagatgcccaataaatggcacgtcttactattattatcactactataattactcttaccctttccagccccagccatatcctatgtggagggtaacttccctacgggacagtgagatttcttctctatctctgtatttcttgatatttctttctctgtccagcaataattgtt

SEQ ID NO: 913591 - DNA, 4001 bp, Homo sapiens
ctcctggaacctctttcatactactgaggcagaaacttctccaaaccacaggagataaaaaccatattaggaagagaaagaaatcaggaggcacgctgaaacctctgcagagccagagggccaaccctctatcccctgggggataggctgttagaagaaggacgattaccatctacctctgttaactctccaacaggaaatcaacaggggaccagtcagcaggaggtgctagcagagaggggaactgtctccagaatcttcctggcccggactgtgtgaaactcaagttgcatggctttaaaacaggctcctaactcggcgccggctctctgcaccgagctctgatccccaacactgttacatcccaaggtgtccgcgccagggctggcacggccttggggccctgctggggctaaaccctcatctctacatgtgggtcaggtctccccgggtgtcatttgaggttacaaaggactcaaacacaaagcaggagcagtcataggaagtaacccagaaaaaaccaatgctttggattttgagagtcaatcacccacccaccaccagaagccaaagttatcttcccggcaggtgaaatgggcaggcctgtggcggtagctccgggaggtgtcaaatcaaaggccgcagaatctccataccaccctgcccccgcgcacctctatttcgtggctggctggctgtaggctcagctcaggatgggtcccagggataatcctggggcggaggaaggaggaggtgaaaagggtggaaaggatgtgagctccaaactgagctagagaaaagacctaggaggggagaagaggccggagggaaacaataaaaagcaataaaatgaaatggaaagggaagggactcgccaggtcaaaaaggcaagggggtcggtgaagaccacagctggctaggcgggaggaaggggggcaccacggcgccacaccaagggagagtggatcgcgacctgctgatcccgccagatcagtctatcaggaaggccccgagccctgaccccagcgacagcggcgaagctcgcgtctggaaagggggctcgtgcccggcacgagccgacggcccccaaactgctaaacagcagcagcccccgcagcataaccaactccacccagaccaccgggcagacccgctgccgggcgctttcgaggaacgcgggtggggaagagggggagctctgagtgctgacatttgcagtgccctcccaagcgcacaacaagccacagggtgcagactcctgcaggtggtgactctcccggtcccagggtgtaggagggcgccccggcgcagggaggggacccgggggcgccggaggggcgagcgtggcagggaccccgagcgctcacctttgaggaagtagacccgcgggccggcgggtaggcaagcgagtagcgaggtgaggacgacacgcgcggcgctctcctctcgcagcttctgccagtggcggctgccctggtccagcaccaccacggccgcgacgccgccgccgccctcctgcaggagccgcgcgcgcgccgcctcgtcgggcagcacgtagcgcgccgacaccgcgccgccccgggcccgccgcagcaccaccgagttgaggttgacgttgagcgagccgcgcacgttcgaggcagcgaaggccagatagggccggcagtcgagcaccacgcagcgcgccgccgcctccttgcggagcatcttgcgcagctggcgcccgtcgagcgacgtgaccttcatgccgccgccgccgccggccagcggccccgcgccgcgcgccccgcgggtgcccacggccagggtgtccacggccagggtgtccgcgggcgaggcacgggagggcgacccgcggggctgcggccgcgacggagcccggcgcccgagcggcggcgcaactccgcgttcccgccccgctcgctcgatagccagcccggccgctcgccgccctagaagccggggattccgccggccgcgcagcgttttatgtgaatgagtgccgtccgtgacgcggctgcccatataaggccaaatatgggtgtttccccgcccctcgggccgtggccacgccctgcagggggcggggcagcgggggcgagggacgcgcggggcgggtgccggcgttagagcgagaggaagtggaaggcgcctcttcgttctctcttccgcgcttcgctgagggactcactcgcgcatcacccgcggctgccggtcgagtgtcccaggcgctccggggccgcggtgaccctcgcggtgcggaccgaggaggaagcgccgtggggggcggggcggcgccgcacgatccggccttcagcttcacggacgtgggctgagaacccgcccgcgccgcgctgagcagggccgagggagccggccagggccccagaggagtccggaacggattcccgtcgctaccgaggtctgcgcgtgtaaggagaggacgtcggagatttgcctcgaggggtggggtatagatgactggagaggtcaggcgcgggttggtcatcgctgaggctgggtgatgggtggccggattcgttatactgttttctccacttttctgtatgtttgatatttttcataataaagtttgtaaaagtaaaaacgggggttgggggtcggcggtgagaatagccatttaatcttcctaaatggattctgccctcaaaggattgacgctcttttctctgtcactctccaataatgattagaataataagttgtattttgaggagctgttttctggtcccggggagacccttggtgaactcagcagtaccatcagcatgtatcccacgatggagctcagttcagccaactgttgtccaggtggcttctggatttgggggattatctatggatcaagtttaatctcaggctgtctgcccccaccggtccccaggggcttcaggcctcccacccctattcctggggaagcagacacaattcacccattcagcaagcatttattgagggtcagccgtgtgccagggctttgctagctgcggggacacatggatggaaacaggtttctgcccccaagctcactgccaaccattttattgttagcctggctgggactgcttgatggaaaacagtctgcccgcactagacaagggcttgttgacaactgacataagggaatgaggttttcagaaggaagcagagatcaaattttgaaatcagatgcaatcaaatcagacaccaggacagccagcattgcctctgggtcacagatgcatccacccaaaggcgctgtcctcgccttgccagtggggtcttggtgaagacgtgatgcgggggccttctttctttttgtggttatctgtgccagccttccctgcaggctgctcttcctctagcacgttctgtttctgttaccggctctttccacccccggcatctccgcctagagccacacacatacgcggagcacccacgtgggccaggctttgttttggggctggcggcaccaacgtgagtaagacttatactcagccccagctgcccccagcccagagggaaggggaaggcctgtagtccgtggggaagagcgcccagtaggggtgtggcagggtggggcgtgggctggagaaggcctcccgaggagaggagagctgaggccaactccgaggaatgaattgtaagccaggctgcgaagcaggaggggagattccaggcagaggaaactgcttggggtaaagaaaacaaaaaacgcaacccccccagcatggtgcgtactggaggtatgtgggagactaaggcccttctggtatttattagcagattaagcagggtcaggcaacagagggccttgtgctgttttgagtcatttgggtcttagtctttggccgggcagtccccaacgagggatcttactcagtgacaagatccggatagcatttgggaacatcgctgaggcggctctgtgcgggatcggtgctttatttgagagtggtggtggggtccggagtctgggggatggatgggaggatttc

SEQ ID NO: 913592 - DNA, 4001 bp, Homo sapiens
cctgcacaccagccagagggtcctcaccagacaccagaaatgccaatgccttgattttagacttcccagcctccagaatggtgagaaataaatgtgtattgtttttaagccacccagtgttggtaatttgctacagcagcgcaaactaaaacaaaaacagtctctgccttcatggagcttatagatgagaaaggaagataaatatttaaatcaataaatatgaaattgcagttaaaataagtactatgagaccagacaagaggagtagctgatcaagtcaggaaagtaaaaaaaaagcttctttgggggtgacatttgagctaagcttacatttactgaaaaaaaaaaacagtaaaattaacacgacaaagaagagaagagtcttctaggtatgaggaaaggccctgatataggaatgagcatggcaattacaggggatagaatgccactgtgtctaaacttgtccctggacaaatgcatctagcattttgcataaaatttcagagacagtgacatcctggggtccgtccataacccccaatttttattctatggatgaaccccaggatgtcagtgtctctgaaattttatgccataactatgtgcatatgccatatgacagtggtgggagggcaaaatggtataactcctatggaggagaatttgacaacatctagaaaatcacatatgcattcaccctttgactcatcaatcttgcttcttggatcctatctcaaagatatagttgcaaaaatatgaaatggcatatgcacacagttatttgcagcattatttacaatagtcacactgaagcaccatctaaatgttcatcaaattggggattaataagagcaacacaatggattattatgcagatgtacaagagaatgaagaaactagagagtgatctctaagacacagaataaagaaaacgaggtgctgaaattgtatatggtctgtcatcttttgtattagcaacagcagtggggaaaggaatgtgtatgtgtgtatatgtaaacatagtcataaaaactctaaaaacggaaaacaaactggcacaaatgaacctaattccaaatgaggttgatattggtgtctcaaccatacagagaaaagaattattacaactgactttggaacacagtatcttcactgtatttcttcagtaggatatacctgaaagaccaaaacgctacacagacatctcaaagtcatttgaagtgaagttaaaaaaaaaaaaaaaaaaaggtgcacagactcctgttgctgctccagaaggataaaatgtgggaagggaggaaggggaccattatccctaaagagaaaacttctggcctaccagcggggccaggtcaggggaggctctgtctcggatttctgggcatatcagtgggacccaggcaaggcctgccaactcccttagcatgttcctgtctgtgaaacgaggataatacccatctctcctgtggtaagcaatgttatttttcacatacaccaataggcatcttggctcaacataagaaagccctttcccacagaaacagctgcctccagcgtgaagaaggtgccacagagatggaaggagattccttacccacacctgggagacagctagccagccagccagccaactgggcgggggcacccgggcaggggtgccagatacagtattgtatctggcaacctcccggggcgctcagtgtggttttcccacccgggagtctggaagggtctcccgcagcccgcaggagacgcagcgctccccgctcagggggagcaggaggacagctggccgctttcgggagccccaggcgcgaagcggcctctctccgcctcaggtgagtcctgctcgacgcccaaggcccaacggtcagaaccgcctctgcccgccggacccagcgaagctaggggaacaaatcccaaaaacagttcgggcctttccggtgcgctcacccctacacacgcgcctgctcgccacccaggagcggcgtcccgttgccaggcaacgagagctcgcgcctcaggagccagtgtaggcgccgcaaagcggaaggggcgcgcggataggtgagcagagggcacgcggtgggcagcgaagggggaacgcgcagcagagaggagagggcgtgcaggagtaggagcaggcggcagagtagagggggcgcggcagagtagagggggcgcggcagagtggagggggcgtgcaggagtaggagcccgccgcagagtagagggggcgcggcagagaggagggggcgtgcaggcgcggggcgcccggcagagagaaggggtcgtgcggaagggggcgcgcgccaggggagggggccagagaggagggggcgttcaggagtcgggcctgcggcagagatgaggcggtgtgcaggagggagagcgcgcacgagggggcaacgggcagagaggagagggaatgaaagaaggggagcgtggcagagagaagcgggcgcgctccagggggcggggtccagggaggagggggagcgtaggatcggggcgggaggcagagaggagcgggcacgcgggacgggcgtgtgctcgtgaggggtcgaggaaaggcgtatgtggaggcgcgcggggtgggtgagccgaggagacttgctacacagaaacctggaggagtaggggcacacaaaagagcaagggaccctgactggcagcccggcatgctctgggagagacaaagaggtggcgggctttgaggaggaaccaggaagggcagccaatcggaaaagggtggaagaccttccagagtccctggaagaccgtcactgcaagctgctaatagcttggcagtttcacaactctgcacctttgctcttgctggtgacctctgcttggttcctttcagaaccaattcgggtgccccaccaccgggaagccgtccagtctccaccaggcccaaacccttgcagtcttccctggcctagtcgtctgtgcatgtgctagcctttcctgtgctctctttcagcttatgggcggggcagtgccaggcaagagaggccttaatagatgttagttgagctagtaaatgccagattgggcgtggaaaaatcaaagggaagcatgagggcaggtggcagaactctctcaatgaataagtcaagaaatatttacagagctcccagtgtgccaagcgtgggcggtatacagtaaacaaagacaacccctattcttatcaccttgcctactgagtgcaagtccaggaactgtgtaagcagaccctcagaggagctctgggaaacactgaaaaatagcctctccccccattggtgagtgtaccctaagttggtctgagtgggctttaaaaggcatccccttggccaggcgcggtggctcaccgcctgtaatcctagcactttgggaggcggaggtgggcggatcacctgaggtgaggaattcaaaaccagcctggccaacatggagaaaccccatctctactaaaaatacaaaaattagccaggtgtggtggcgcacacctgtaatcccagctcctcaggaggctgagacagcggaattgcttgaaccaaggaggcagagattgcagtaagacgagattgtgccactgcactccagcctgggcgacagaccaaggctctctcttaaaaataaaaaataaaaggcatccccttgactccttcccctccagccctcagattatggctctatgctggctctactgtctttgtaccatattttagcgactgttgggcaaacacatttccttcagatcattgttgaaaatgggcaatttagagtagggggaggtatgccaatacggcttgccacatgtaaccagtgtggcagccaccccctgactagagaatgcagagttggtgattctgccttcggggaaggacagttctacagtgatccaggcaaagtagattggtaactacaggtcgcttggagattttattaacatgcaggttctgaatctgtggtgggacctgagattctgcatctcaacaagtcccaatgtgtcc

SEQ ID NO: 913593 - DNA, 4001 bp, Homo sapiens
accaattctggacacattgggacttgttgagatgcagaatctcaggtcccaccacagattcagaacctgcatgttaataaaatctccaagcgacctgtagttaccaatctactttgcctggatcactgtagaactgtccttccccgaaggcagaatcaccaactctgcattctctagtcagggggtggctgccacactggttacatgtggcaagccgtattggcatacctccccctactctaaattgcccattttcaacaatgatctgaaggaaatgtgtttgcccaacagtcgctaaaatatggtacaaagacagtagagccagcatagagccataatctgagggctggaggggaaggagtcaaggggatgccttttattttttatttttaagagagagccttggtctgtcgcccaggctggagtgcagtggcacaatctcgtcttactgcaatctctgcctccttggttcaagcaattccgctgtctcagcctcctgaggagctgggattacaggtgtgcgccaccacacctggctaatttttgtatttttagtagagatggggtttctccatgttggccaggctggttttgaattcctcacctcaggtgatccgcccacctccgcctcccaaagtgctaggattacaggcggtgagccaccgcgcctggccaaggggatgccttttaaagcccactcagaccaacttagggtacactcaccaatggggggagaggctatttttcagtgtttcccagagctcctctgagggtctgcttacacagttcctggacttgcactcagtaggcaaggtgataagaataggggttgtctttgtttactgtataccgcccacgcttggcacactgggagctctgtaaatatttcttgacttattcattgagagagttctgccacctgccctcatgcttccctttgatttttccacgcccaatctggcatttactagctcaactaacatctattaaggcctctcttgcctggcactgccccgcccataagctgaaagagagcacaggaaaggctagcacatgcacagacgactaggccagggaagactgcaagggtttgggcctggtggagactggacggcttcccggtggtggggcacccgaattggttctgaaaggaaccaagcagaggtcaccagcaagagcaaaggtgcagagttgtgaaactgccaagctattagcagcttgcagtgacggtcttccagggactctggaaggtcttccacccttttccgattggctgcccttcctggttcctcctcaaagcccgccacctctttgtctctcccagagcatgccgggctgccagtcagggtcccttgctcttttgtgtgcccctactcctccaggtttctgtgtagcaagtctcctcggctcacccaccccgcgcgcctccacatacgcctttcctcgacccctcacgagcacacgcccgtcccgcgtgcccgctcctctctgcctcccgccccgatcctacgctccccctcctccctggaccccgccccctggagcgcgcccgcttctctctgccacgctccccttctttcattccctctcctctctgcccgttgccccctcgtgcgcgctctccctcctgcacaccgcctcatctctgccgcaggcccgactcctgaacgccccctcctctctggccccctcccctggcgcgcgcccccttccgcacgaccccttctctctgccgggcgccccgcgcctgcacgccccctcctctctgccgcgccccctctactctgcggcgggctcctactcctgcacgccccctccactctgccgcgccccctctactctgccgcgccccctctactctgccgcctgctcctactcctgcacgccctctcctctctgctgcgcgttcccccttcgctgcccaccgcgtgccctctgctcacctatccgcgcgccccttccgctttgcggcgcctacactggctcctgaggcgcgagctctcgttgcctggcaacgggacgccgctcctgggtggcgagcaggcgcgtgtgtaggggtgagcgcaccggaaaggcccgaactgtttttgggatttgttcccctagcttcgctgggtccggcgggcagaggcggttctgaccgttgggccttgggcgtcgagcaggactcacctgaggcggagagaggccgcttcgcgcctggggctcccgaaagcggccagctgtcctcctgctccccctgagcggggagcgctgcgtctcctgcgggctgcgggagacccttccagactcccgggtgggaaaaccacactgagcgccccgggaggttgccagatacaatactgtatctggcacccctgcccgggtgcccccgcccagttggctggctggctggctagctgtctcccaggtgtgggtaaggaatctccttccatctctgtggcaccttcttcacgctggaggcagctgtttctgtgggaaagggctttcttatgttgagccaagatgcctattggtgtatgtgaaaaataacattgcttaccacaggagagatgggtattatcctcgtttcacagacaggaacatgctaagggagttggcaggccttgcctgggtcccactgatatgcccagaaatccgagacagagcctcccctgacctggccccgctggtaggccagaagttttctctttagggataatggtccccttcctcccttcccacattttatccttctggagcagcaacaggagtctgtgcacctttttttttttttttttttaacttcacttcaaatgactttgagatgtctgtgtagcgttttggtctttcaggtatatcctactgaagaaatacagtgaagatactgtgttccaaagtcagttgtaataattcttttctctgtatggttgagacaccaatatcaacctcatttggaattaggttcatttgtgccagtttgttttccgtttttagagtttttatgactatgtttacatatacacacatacacattcctttccccactgctgttgctaatacaaaagatgacagaccatatacaatttcagcacctcgttttctttattctgtgtcttagagatcactctctagtttcttcattctcttgtacatctgcataataatccattgtgttgctcttattaatccccaatttgatgaacatttagatggtgcttcagtgtgactattgtaaataatgctgcaaataactgtgtgcatatgccatttcatatttttgcaactatatctttgagataggatccaagaagcaagattgatgagtcaaagggtgaatgcatatgtgattttctagatgttgtcaaattctcctccataggagttataccattttgccctcccaccactgtcatatggcatatgcacatagttatggcataaaatttcagagacactgacatcctggggttcatccatagaataaaaattgggggttatggacggaccccaggatgtcactgtctctgaaattttatgcaaaatgctagatgcatttgtccagggacaagtttagacacagtggcattctatcccctgtaattgccatgctcattcctatatcagggcctttcctcatacctagaagactcttctcttctttgtcgtgttaattttactgtttttttttttcagtaaatgtaagcttagctcaaatgtcacccccaaagaagctttttttttactttcctgacttgatcagctactcctcttgtctggtctcatagtacttattttaactgcaatttcatatttattgatttaaatatttatcttcctttctcatctataagctccatgaaggcagagactgtttttgttttagtttgcgctgctgtagcaaattaccaacactgggtggcttaaaaacaatacacatttatttctcaccattctggaggctgggaagtctaaaatcaaggcattggcatttctggtgtctggtgaggaccctctggctg

SEQ ID NO: 913594 - DNA, 4001 bp, Homo sapiens
gctcacacctgtaatcccagcacttcgggaggctgaggcgggcagatcacaaagtcaggagattgagaccatcctagctaacatggtgaaaccccgtctctactaaaaatacaaaaaattagccgggcgtggtggcgggcgcctgtagtcccagctactcaggaggctgagacaggagaatggtgtgaacccaggaggtagagcttgcagtgagctgagatcgcgccactgcactccagcctgggtgacagagtgagactccgtctcaaaaaagaaaaaaaaaaaaaaaaaaaaaaaaaaagaaagggaagagacacacattggtgagggtgtggagaaaagtgaactcttctacactgttgatgggaatacaaattggcgcagccattatgcaaaatggtatgggtgtatttcaaaaaattaaaagctaccatatgacccagtaattcctcttctcagtatatattcaaaggaaatgaaaccagcaccttatagagactacttgcactcccatgtccattgcagcattatttacaatagccaagatttggaaacaacataaatgtctgtcagtggatgactggataaagaaattgtgagctgatcacagtggctcacacctgtaatcccagtactttgggaggccgaggcctgaggatcacttgaggtccagagttcgagaccagcttgggcaacatagggagacctcatctctagaaaaaatgtataaattatccaggcatgatgatgatggcatgcacctgtggtcccagctactcaggaagctgaggtgggaggattaattgagccctggaggttgaggcagtgccactgcactcccacctgggtgacagagcaagaccctgtcttgaaaaaacgtaagatgtatttctcatgtatatcttgtatatatatatctcacatatatgtatcacatatatgtatatataaaagaatattattcagctttaagaaagaagtaggtcctgccatttgtgatgacatggatgaaactgaaggacatgatgttaagtgaaataaaccagacatcaaaagaaaaataccacatgctgtctatgtagaaatcttaaaaaaaaaatgttgaatacataaaaagagagaatagaacagtggttaccaagaggtggagtgggggtaggcctggaagaagaatgaggagatgtaggtcaaaatgtacaaaattgcaattgtgtagtatgaataaatgtagagatctaaagtacagcatgaggatgatagccaataagattgtattgtgtactggaaaatttttaagagagtagattttaggtgctcttaccatacaaaagtaactgtctaagatgatggatattgaaattgcttacctgtggtaagcattcactatatatatcaaaacattatatgcatcttcaatttacacaataaaaagttaaatcttgaccctgagctcaaaaattcataatataactgttaagccatggaactgctgtgtggtaggacatcaggatatattcagcttctgtttctgacaaaaattcacagaattgatggtccagtttacaagagtgaatgaaggtcactgttgacactgctggatcaataacacataatagattcaaatactttcacagagtagctgctgttgagtaatatgatgaacacttcccggctttaaacactattttctcatgagctttgtaaatttgttcagctcagcctttttctattccacatgtatttttatcactgtcagctatgacacatcttagcagatttcactgcaggttgtattgaatcagtgtttctacacgactttgaaaatgctcttgtctgtaattgttccatgaagactgtattagtccattttcaagcagctgataaagacatacccaacactgggaagaaaaagaggtttaattggacttacagttccacattgctggggaggtctcagaatcatggtgggaggcgaaaggcacttcttacatggtggcagcaagagaaaatgaggaagaagcaaaagtggaaacccctgataaacccatcagatctcgtgagacttattcactatcgtgagaatagcacagggaagaccagctcccatgattcagttaactccttctgggtccctcccacaacacttgggaattctgggagatacaattcaagttgagaattgaatggggacatagccaaaccatatcaaagactattcatagaggtttggtttttcagtcacttcaaactcagcattgaccctttccataaacaacaactgagcagtgttgggaacatctgtctgcttatcaggagccaaggaaagccactcagaatcatgtgccttgttattagttgactactgatgttgctcccagtgtcaactctgagcagctgctctcaccaaaaggctaaaatcttagacaagtttgttttttcctggacacattttttttggccactgaaataaaacatgttttaattcactcatcattggtaaatatctttccttgctttcataacaaatgagcctcttggaaccctacttttgttgcagacttattttcatttttaatttttgtaaataaattctgctgtgataattctgtttttgttatttttatttttttaagacagagtctcgctctgtcacccaggctggagtgcagtggtgcgatctcagctcactgcaacctctacctcccagattcaagcaattctcttgcctcagcctcccaagtggctgagactacaggcacctgctaccacgcgtaattttttttggtatttttagtagagacagggtttcaccatgttggccaggctggtcttgaactcctgtcctcaggccttccaagtgctggtattacaggtgtgagccaccatgcccagccaattctgttttacattttctaattttttttggcctttgtgctctgtgagctgggactattgtgatgagtgcttagtctggtaatgttgatatttattatattcttttggtacagtggcactgtatagcaagaaacatgttttgccatttaatttgatgacaaaataatacacactctagtgtgccttaaaagtgcgacattcaaaattcactatttttcttttttttttctcaaaattttgtttagagatgggggtctcgctatgctgcccaggctggtcttgaactcctggcttcaagtaatcctcctgcctcgctcctgagtagctgggattacaggaataagccacccatccctggctttcttgttttgacataatggatataatttttttaaatgtcacagtatagtgataccatggcactccaaacactgctgttacaatgatgttactgcggtttgtagtgtgctgggcagccaggcaaagtggtgagtgcaccacatgtggtctctgttataactactacactctgctatggcagcacaaaagcgctcgtagacaatacgtaaacaaattagcatggctgtgtttcaataaagctttaaggatgctgaaatttacatttcataccgttttcctatgtcatgaaatattatttcttttaaattttttctatttaaaaatgtaaaagccattctttctttgtaagctataaaaaacaggaggtgggttggctttggcccacaggctttattgctgaaccctattctagtgtgacagatatgctgagttgggagcaaatatattgttggttagtaatgatttcagatgatattcttttttcttcttttcttttttttttttttttttgagagggagtcttactctgttgcctaggctggaatgcaatggcacaatctcggctcactgcaacctccacctcccaggttcaagcgattctcctgcctcagcctcccgagtagctgagattacaggcatgtgccaccctgcccagctaatttttgtatttttagtagagacagggtttcaccatgttggccagtctggtctcaaactcctgacctcagatgatctgcctaccttgg

SEQ ID NO: 913595 - DNA, 4001 bp, Homo sapiens
aatgaactgattcctagcagagagagaagcatttaaaaataaacaagaggggggacatcttgaaatttttgtcaaatattaattaccataattaattaagacagaatatgattccaatcacaagacatttaataaagcatatatgtcctgttctaatgacaacataaactattttaccaatcgcttcattcattccaataaatatggaattctcattagcatgtcaaggaaactcaatggaaaacaaatacacgagatccatttgtcagtgcccttgcctctgaagcccaggacaacccaggcccagcagtgaaaactcgtgcagaggcataaactttctcacctgtttggtcattgaatctatgaggcgaacatacagatcttgctctgttctgactcctgcaaaaaaacagagacaaattctcatcaggatttgagtgctgcacctcggggagggcacacggagcacaggaagtctgtaactcaggactgctgccacggtgatgcagcagaacttaggcaatccctttgaaagggagaaagagaaccccaccacttctcgcttaattttttttttcttttcttaactaagaaccttaaggctcttagggcttgcatttcaaggtgcaaggaacttgcctggtggagagcaggcctggtagctgtgtgcggtgggcccatgtggtcgtttatttttagaaaagaaaaagcaccaaatggaaactgagtgagaggctgaactctttctaatgtctctcgaggatttaaaaaaaaaaaactcgttcacaggaagtaagttatgctccgtttatggagttacccccatcctaataattaacattaatttgcaaaattgaaaaaagtcacttaaaagtgatgttctgctggagcccgtatcgatctttttcttactttctacttcaagccccaccggttaatcatgtgaagtgccatcgacttattgatcgtttatgttttgttttccttctatgccatgagaagatttcgtgtttacatccatgtcattttaatctcaaatctttatgtcctttcaccagcgcagaaaaggagagccagccgctgcaggggcggcgagcacgcagcaggcacttaccgttgctgtacaataactggagtttatagtggatgccgttgttggttttctcgttgtttggctcctgaaagtaacgataaataattgcatttagtgcgatcggtgtcaggcgcggccaccacgctcggtccccctccgcgaccgaggctctcggcctcacacatggcaggattcctagctcgaagcagcgcggtgatgtcactttcctgctggaagcccagcgttctcctcgccccgagtaagtccgagggcgcagagaagttgcccagccctcggcggtcccgggcggccgcacgtggcggcggcggggtggcctggcggagccgagcccgccgcctaggggggcactcgaacccccgcgcaccggcaccgcctgcctcccgcttctagaaagagagagggtgtgatcgtgtgtttgcacttactttctctttctccacaaagtccacaaaagcggtcctttcaatctccaccggctgcccctgcctatcgtagagcgccagcacgaagtggaagaaattggatttccggaggttggaaggcggctgcttctcgaagtgcgcccgcgccagccccacgccgctgcgggaggaaagagacagcggcccggtgaggagcgcggcgccggccggcggagggggccgggccgggccggggccggggccagggcgcgcgggggcggccggtacgtacctctgggcggccgtgttggcgtccaccacgcccgccgtgtgcatccacgagcgcaccgggttcatgccgctgcccagcggctcctccttcatggtcgtccccccgcgcggaatattctcctgaatcccaaacatgaaaactgctggcggcggccgcagctcccggccgaaagcgtttcctcgagcagcggcgctcggggcttggcggcaggcggctgccctggccgccctcgccctgctcggcgcctgcggtccggccccgccgccggcttcagcccgtcccgggcaggcgcgacatacaccagcggccgggcgctccggacggccaggggcgcggaggcggctccaccggcggcggcggcgcttcgaaggagcaggacgcggtggccgcggcggcgcttgttgttgttgttgtttgcaggcgcgctcaacgtggtgtcatcctagccaggcggcgtccgcggctgcaggacactgcgggatcgcccgcttctggcgcggcccgcctgctccaaagacaaataaacggggcagtgagtgctgcggcgcagtcccgggcgcaggcggggcgcggcggggcctggagcggcgcgcgcagcggacggaggcgcacaaaactcagccctctctccccgaggaatggaccctttcccgggagccaaaactcgaagcccccgggagcggcgctgtcagagggtgacgtcggggggcggtgcctgcgccatatatgggagcggccgcccctcgccgcgcccctcgccgccgccgccgccgcgctcgccgactgactgcctgacggcgccgcgagccggcccgagccccgcgagccccgcgagccccgccgccgccgagcgccaccgagcgccgccgccgccccccgccacgcaccgcggctcctcgcgtccagccgcggccaaggaagttactactcgcccaaataaatcttgaaaagaaacaaacgcagccactgcacaattgcagtttggccccttaatacctccctgcaaaacctgccacacagtcgaacacgatgggcggggcggggggctgtaaaatgctgaggcgccccaagttgcccagatgcatgcaataaatgcaaggggctgcagcttgtcctggggccgcccgaaggagaagtgggaagaggcaggtcgaccgcagggagggcgccggagggaggagcgggcaacggactgggaggaggggtgcccagggctccccggccaaggctggacgcgcagctcagcctgatttctaagcagacctaaggctgctgcagggccggccggtcccggtctgagccccgccaggtaccccaagcttcctaccccggcggaggccgccgagtgccgggcagggaatcacgtcggaggcagggtctgccagatgctccctctcccccggtggccgcggcagaccccggcccctggcctgttcttacgcacagcgagtgacaaagaaggctccggtctctccgggccgacgggaagcgcgcccggcctctccggcgacccggagccgggtgtctggctgcgcgacctgcgcggtggccagaccgccctggagccaactgctccaaaaaccaagcggacgccgcgggcgctgtggcccggccctcggagccgccggacccgggtgagcgcgcggcgcgcggcttcccgacctggtttctaggaatcgggagggcagccgggcgcgggcagactgtgggccccgcggcccagctcctgtagccgggactccgcgcccaggagcgcggcccgcccaaaggacgtctgcgcgacacggagcagagacccaggggacgaccaggaactgtcctaggcacttccctgccaagagaaatcaggcccttttgattaaaagaaaaaaaaaaaaaagattgcagggcgcaagtgtgttgcagggcagcctcctcccgccgggtctggggcagcactcccttttcccgtgaattggcagcgtgtgtacgttaatattttaattaatcgggaaagtcgaagtccgattcacgttgtctggggacccccacgcctcttggaaggagtgagaaaaaagatgtgttggaaagagatctattttgctggtgttgggggttaatgactattgccaaagataagtgaattatcaaagctgttgcgccagtcccatctcaaaatccattacggtgccggccgtctaattaaatacgtaag

SEQ ID NO: 913596 - DNA, 4001 bp, Homo sapiens
agccgggcgtgcgcctatagtcccagctttttgggagactgaggcgcgagaatcgcttcagccgggaaggcagaagttgcagtgagccaagatcgcgccaccgcacgcccggcttcgtctacagaaagaaaataaatgtggaatgggagatattgctatagccacctttggaaacgtaatccatcacatatttgggaatgaaattcctgggtgatataatctaactacataaacaatgttttagaaatgaaaatagcatctcaatagtttaacagagaactaaaaggaaaataattcataacatgtatttcaatatgtaaatgctcagatatgactacactacaagatccattaaaatagccagatccttgcatcgacttaatgattacattttgatttaagaaaaaataagtcattccataaaagagatctcctgaaatgaacagaggtacaggaggacactagaaccataacaaaaaatagtgctaggataagtgataatgcatcagatttatttcaacataattataaaaaataatcaagacaaattagagaagaaatacaataaccttaaaaatgatctgggccttatctatgaagaataaaataaaaactccccacgtgactacagaaaacatttcaattatttcaaaattctacatgtcaaagcatatttttggcctccagtacttaaaaagactttggagatcacatctttcagtggccagagaatattggatggactcttttaaagaataaaagattatagagaagttgcgatagatgtcagagacagaccaagattgaaaacaataggcaacactcagatactattttagaatgtgattttcacataatttctttttatatgtatatataaggattagttcacgtatttgttattcaaatcccgaaatcccataaccgcgaaggatgttaagtgtatatggatccatgtcacttcctctggagattttctgagcagatgccatttgaagtacagggaatgtaatagttgatcctggtataatgtcaagggcttcaaatccagaaaatgtggaattccttcttttggcccagtagtttgctgctgttgctaggtttgggaacatttgtggtgatagcaccccaataacagggtggcgaagtacacccccaaattcaaagaaatctccaagtacctttttagccagtggtttcttctgctcaaaaactggaatctccaacacaacagcgggtaaagcagtggaaccatccacacactgatccaggaacattctcacagtgtagtaggtcatcatctgtgctttgctggcaactactttaacttgatcaagtagctcgcacgcaggggattcaaattctccaaatagaaatgtgaacattaatcctccaacccatggtcttgagttgatccaatctatagctggccctgcattatagctaattaataaatcagcactttcactatgcaaaggtcttccaatggatatcatcattgccttgaattgtctctgtacttggaggctgttggtgcatatcgggtcactcgatccggcagcaatgcctatcagatcacagcagtgacgcagaattgatgacatctcaagggcagtgaaggtaggcaaaacatcttcaaatttgctagcatagagagtacctgtttccttgttctcattcccaatcacaatattagaccttttgctcacaccgacactgagtagtgccttgtgtaatccatcgaatataaaacacaaaaatactaagcttggggttacaaggtaaaaatgagatctctgtgctgggtctagcatagacttagttgctttttcaatgaccttaacatctccaataccaggttggggctccaatgcatctgctggatactgtctgctcttcccagagagctcaaatctcccttgaaagtaatggaagctgctcccatcctttgtactgtcttgtgggctgctggtctgtgggttgtttcttgggcgggacattgtgggtgattgtttctgtgattttcacacaattttgtactgtactaaaaaaatatagagaatggcaatacaacaaaatatttttaaattacatttattaataaaatgtattatgacttctgtatctcatttacttcttagtaatattcagttttttagtctagtaaaggaatttccaaatctccttaattacacaacataattttgattttcatgcttctacacctaaatgtgcagctgcactaaaatcctttcccctgtcaactgtgaacaccagagctatgcctatagagagaagagtcaaccactcatttcgagcacaaaatttaaggtttccttaaatttaaactcaatcatcaagatcagtaatattgtaatgtcatcttttaaaacatcgaagtaatgccaataaaaccccctataatgaacaaaacaaaacttctaacaaagccaggatccacagaaagagttagttgtctgacaattcttacgcaatatctttatgtcgtttaagctttcctcgacataaggaatttttccctaaataaggagcctttttgtgtagcttcttttaaaacttttcagtatgccttcacacagaagggctgctgacttagatctgtattaaaagtactactgccatatttgtctaggatattgctcagggcatcttttgaaactagcagggcaggaacatatttcattgtgcagaaccaaatcaagttttggggccatcaggcaaacctggtcccctcctctaagtgtcagtgataccctatatcaaatcattgtgtcaaccccagaatgccctcaggtttccaaactcgctggccaagtgggtgctgcccagagcaactggagataacactggaaagggaatggaatcaaaggaacacaggttgtacaggtcttttgaaaactgtcttggacatacatctaaggttgatttgaattttaattaagtctcacttaaaggctctctggggtttttaaaaattaaagagcttttaagatataatattgcatgccctgctttaaaacctagacagtgataaaagcttaaagctgacgcaatcaccatgctaatcacaatattccatgcaaaagttctccaatggaagggatataacattacatggtcattcattcctttcttttctcgtctcttaatgcaatgaaaggttattatgttttgtcatgttcttaactgtcttgttccaaatataggcttttgatttgggtggtaagttgtgcatctcaataaatatttttctttgcattaattcacaataatccatttttattccccgaaagtccatttggaggtagaaaaaggtgagatttatgaaaagaaatgttcaaaatctccacacacttaaaaacatcctaaaacttcatggatttttctgtggttcccaattctgaaagcacatataaattatagcatttttgttatttccttatgtttacacaaagacaaaatctaataggtattaaatcgtgttaacaaaaaacaattttttttttgagacagggtctcactttatcacccaggctggagtgcagtggcgcaatctcaactcacagcagcctcgacctccctgttcaagtgatcctcctgccccaacccacaaagtagctgagactacaggtacttgccagtatgccatctaatttttgtttgttttttgtagagatagagtttcgtcactttgcccaggatggtctcgaactcctgacctcaagtaatctggcctcatcccacgctaccccacgctaccccacccctccgccacagcctccccaagtgctgggattacaggtgtgagccactgcacctggcctgaaaacagtttaaggtgagcatgtgagcttttccctccatctgtttggcgtgctaattaagtcacttaaagctgcttgtgttttaccatgtcccttcttaatcccatgtctcaaacatttagttaatcatgcaactaaacttaactagcagttata

SEQ ID NO: 913597 - DNA, 4001 bp, Homo sapiens
tcacttccatccagttccacttgatcttcagttccatccatgttgttacaaataacagaatctcatttttttttttatggctgaaaagcactccattgtgtgtatgtgccacattttcttcattatctgttgatggacacttaggttgcttccaaatcttggctactgagaatagtgctgcgataaacatgggagtgcagatatctctttgatatactgatttcctttcttttgggtaaatacccaacagtgggactgctggatcatatagtagctctatttttagtttcttgaggaatctccaaaactgttctccatagtgactgcactaatttacattctcaccaacagtgttttatccaaatccttgccagcatttgttattgcctgtcttatggataacagccattttaactggggtgagatgctatcttattgtagttttgatttgcatttctctgataatcaatgatattgagcaccttttcataaacctgtttgccatttttatgtcttctttgagaaatgtctattcagagtttttatccaattcttaatcaattattagactgcttcctagagagttgtttgaactccttatatattttggttattaatcccttgtcagatgggtagtttgcaaatattttctcccattctgtgggttctctctccactttgttgattgtttcctttgctgtgcagaagctttttaacttgatgtgctcccatttgtccatttttgttttggctgcctctgtttgtgaggtattactcaggaaatctttgcccactctaatgtcctagagagtttccccaatatttccttttagtagtttcatagtttgagggcttagatttaagtctctaatccattttgacttgatttttgtatatggtgggaggtagtgggtctggtttcattcttctgcatacgggtatcagttttcccagtatcatttattgaagagactgtcttttccccaatgtatgtttttggtacctttgctgaaaatgaattcactgcagacatatggatttgtttctgggttctctattctgttcctgtttttatgccagtgccatgctgttttggttactataactctgttgtataatctgaagtcgggtaatgtgatgcttccagttttgttctttttgctcaggatagctttggctattctggctcttttgtggttccatataaattttaggatcttttttctatgactgtgaagaatgtcactggtattttgatggaggttgcattgatacctcttaattttctaagggttttccttatctcttaattttctaagggttttcctaaataagagtactagtttattcttgctgccaggtgatgcttggtaaagaaagaaatggcggtggatggaccaccctaactccatgattccaatcttactcagctttctaagagactcgtaaggaacctgcttcttcttatccagacacccactcaccacagtctaaccaaatcatcattttgcctttcaacccagagggacagacagtaattttacccatccaccccataacgccaaacacacgtcatcatgcagaatttggtgtcagaactggaagggactctatgatcactcaggctaatacctcactgtacatatgagaaaacccagagtacagaaaaagaagcgaccaagcagcaggggcttgacttggagtctagtgctctttccccagtctaggctccctcctgccatctaacaaaatgaagccaatttctcttacggttctagggcctctccttcgcgtctctgctgtggcacctttccttagccgcctctccgactgcgagagctgatcgagagctgccaccggccgccgaagcctggatcaggctctgtcccgacgcctgaccggaacctgaagccagcggaaatcctgagagaaagtctgaaacccactcagtccccgaaaccttgtgtgtcgtcactgctgtgcgtcggcgggagcattttgcgagtgtccgggggccttcgtcacttccgcccccgcggcaaagcagggaggtcggaggactggagaggtggggaccctggggaggtggctgctcggagtctaggtgacggggcgagacggggccggtaggtggcgggaggggccgggccggagccggcgggagggccaggcccggaggcccccaccctggcgtgcctgccccggccgcggctgaggaggaggaggaggaggaggaggaggaggatgatctccagatacactcggaaggcggtgccacagagcttggagctgtgagtggactgctcagccaccccagccggggcgggcggcgggcgctctggggaccctccttgaccagtccttcgttcctttcctttcccagggctggggagagatttttcttcggaattctctcctctcagccctgctggaccctgccccttcttcctccatctccagctgagggcgtgtcgcccttcgtctgaaattcctgaaatcaagcactgggtctgctgaagcatttgtagcatccgcagtgcttcaggtcccattgttaatggccatggtagctcgagaagttattaatagctaactgagggctccaggaaagtgctcacttgacactgtgcaaagctatttacatacatttgctcattcctatcaatgatatcagattgggaacattattttgcacattctacagataaagatcccagaattaaagattgtagcatgccaaagatcacacagcttgaaggtggtagagctgagaggtacaaacctgatgtcgatctgattccgaagcctgtggtcataaccatcacacatactgcctccccacctctgcaattaagcaccagaatccataaagatcagttttgcttttgagactttaaagagcaaatatttctggctttaaaaagatccaccctcacggccggccgtggtggctcacgcttgtaatcccagcactttgggaggctgaggcgggcggatcacttgaggccaggagttcgagaccagcctggccaacatggcgaaaccccatctctactaaaaatgcaaaaaaaaaaaaaaaaatggccgggcatggaggcgggggcctgtaaacccagctacttgggaggatgaggcaggagaatcacttgaacccgggaggcagaggttgcagtgagcagaggtcacgccatcgcactccagtctgggtgacaagagtgaaactccgtctcaaaataaataaataaataataaaaaaataaaaagagctgccccctaccctgaccgaagtggtgtataataatttagaaagtaataatagtgtcatacatttattaatgctttacacttccaaaagggccttcactttttttttttttttggagacagggtcttgctcagttgtccaggctggagggcagtagtgcaatccttgctcactgcagcctccacctatgggctcaggtgatcctcacaatgtagcctcttgagtagctgagactacaggtgcacaccaccacaactggctaattaaaaaaaaatttttttttggtagagacagggtcccactatgttgcccaggctggtctcaaactcctggactcaagcggttctcccactttggcctcccaaagtgttggcgtgagccaccatgcccagctcacttcactttttgatcttaacaactctgtaaagtgggtatgattatcttcagtctttcagaagatgaaattatatcagaaatgttacatattttaagattatatagccaaaaagtcaggagttgagcttgggctttaaccccaaattccaattttttttccttcatggagctatataattttagcaaccataaatttattaattaaatattaacttttcctttcatttagctatgtaattttagcaaccataaatatattaactattaatattaattattaactatttaatttattaaatattaattatgcacatacatgataattgcaagcatgctattt

SEQ ID NO: 913598 - DNA, 4001 bp, Homo sapiens
gtggaatgacatcacaccccattttttcaccatctcttttcaaaccaagtggtgagtagaaacagagtagaaaccactttggggcagagggacctctctgaaccctggtgagacctactggccgtgtggccctgaacaggctgtcacctctctgaacttgcttcctcacagtaaagtgggcataaaattatccactttgcaggccactgttaagaattagggatcatggatgcagggagcccagcacagagctggccctgggtccatgacagcagtgctgctgggaggaggagcatggaaaagggacacttgaagagtggtgggtcgctcaagttcttgctcaagttcacctgcttagtgcccaacataatgctgctttaatgcttggttaagaagtttcctttcctactaaacaaaccctagcattcatgtgagagtgtttcagtcaccacctttgctgattcatatttaattctggagaactcgaccggcctcctttttgccatctggccgccatgcccagaagtcaggcttccaaccagatgtgaccagatttacagaagcagaaacttagcaatgggcaagaaagaccctggcctgggccctgctctggcctgtgctcctgtagttgatgagcaaggggtccacagggaagggaaccatcccctttccaaaccctgcggccattactgagaccctggaattccctgcccctgctgtgggcaccccaagcccaaaggtggccaagagcagctgtctgtagagcatgagggctggaagggtgtctgcagatctgtgcacccagccccttgcagagcagcagaaaggacgggtgcaaaggtaggaaaggatgagaggagggtgaggagaaaaggaaaacgctgaagccacgggctggctctctacccctgcggggaaccacctggtcatctgaggattatcagttcacaggcggccttctaggtcttcttcggaaggtgaacatctcagggtaggagaagacgacgttttatttaatagcttgatttagaactgaaacatgctgaaacacggtacgcaggcctccctttgcacccttgccccggccaggcaagcacccggctcaggcctggagggggtagggccctccaccttcatgactccatcgcccagattccagttggcgtacaagcacatttttaagagttttgggcccgtagccacaagggcagcgctcaggaagctgtgcactttgtcctatttactgtcctggcccccagccccgcgcctctgtgtgagggccaaggagcagctcgaccaagcccacacttcccctagggccgggtctggggcccagagccctcctctccaggcctctccgcaggcccagcgactggaggcccagtgaccccgcaggctgccctgagggctttggagccccgggcagtcccaccgacggccctacaatcccacctgcgcgtctcgctgccaggcccgggtccgggacacggggagttccctccccaggggcgtaaacggggctccggttccccgggtcctccccgggtcaatggcggcgccctgaccccgactcggcaccaacgcgaggagcccgcgcggcccggggctgaccttatgccgtccagctgccgcgcgctggtgggccgcggctccgactcccgccgccccgccccggccgggtcccggctgcagaagcgggcggggagctgggcccaggggccgcgccggagacacatgggcccacttgccccgaaggcccgcaagacggcgacggcggccatagcattcgggatggccagacgccgcaggatcgcgctgcctggccggccgcaggtgctgggcgctccgagggcgctgctgtgagcagggccgggacggaactcgacggaactcgacggtggccgagacccggacggaaccgcctgacaggcccaggcttcgcggggacgccccaggccaggcccagtccgtactacgccccgccccggcacgccccgccccgccccggcacgcccctccccgccccggcacgccccgccccgcccccacgaggcccgcccccggctcgccgctccccgccgcgccccgcacggtgaaaggcgcgcattgaaaacctgcaggccggctccaggggttgtttgacaaggcctgtgggaaagtttaagcgaggggaggagtaggatgatttctttttgcaccaacaccgggaatgtggcgtttgcctgcattaggaaaacgagcgtcaggggtgattggcgctgcactgttagcaaccgctcccctacctgcctgggaaacgccccgagcctggagggcgagcacgtggggggcctggctgcgcggatgttgactttttaatcctttgtgtcctctcatccagacgctgggggtccacactttaagtttctgcctccaggtatctggaaatggaaagtgagttcataaacaaaataaagttaaatttccggaacacctgagcttgatctcccagtcatgccaagtgccaccgacgaggccgagcacgggggagcacgggggtcgcagagcctgataaaagtgaccgcccccagggcttagggtcactgctggtctcttactaagatgactttcgctggctgggaggagatgaggaggccccactccacaggggagctggtgcaagagggaactgatacacggggtttcgggaagacgaaggagctaggagagcactccgagcctggactgcgcagatgaaaatggaaagacggctgggcgcggtggctcacgcctgtaatcccaacactttgggaggtcgaggcaggtggatcacctgaggtcaggagttcgagaacagcctgaccaacatggtgaaaccccgtctctactaaaaatataaaaaattagctgggcatggtggcgcgcgcctatagaccgagctacttgagaggctgagacacgagaatcgcttgaacccgggaggtggaggttgcagtgagccgagattgtgccactgcactccagcctgggcgacagagtgagactccgtctcaaaagaaaatggaaaggctcagaggccacttccacctgcttctacatttaataataacaggtcgctctttgtggagccccactctgccagttcctgtacctatgccgtctctttcaacattcggggttgtccaggcaggtatcattatcgcagttcccaccaatttcaccagccctgttggcaccaggcctagtagttacagagtcaggacggggctggaggtcagatgaaggatggcgctgtggatggagggtcccctctcatctgaagtcctaggcctgcgttcccattcctttcatgtctccctcctccctggttttctttcagagcctgcagcccccagtttgagcgtggtgagcaaagagggacatgcaggtggacggccaccgcattacccaggcagaagtcgatagaacttactgaatcttgagtccttcctcaagcagtgcaggactcttttcaaattcaggctgcttctcccggcctcctctgcttctcattaacttttgcaggggctgcctttctttcttctctcttgttcagtgcctttctaatctattttccacgcaggctttctccctgacacaatttgatttctaggtggctagcaggcttctccctggctttgatttctgcacttctttcctgtgccacatgtctctgctgcacagatgtgtctttgctaccttttcacatttcctttaaagacccgcagatgcctgatggaacactgcagaaataactcaggatgaagacacggttcccgggaggccgtgggaatgaatgaaggaagacttagaccacctcagggctcagggaaagaaatgtgaagtacagattttcagcttcttatggagtggtttttgaatttattttttatttattattattttttaatttcaggcctttctaaggtagacatgtaatgacatggttcagaggtgcaatggggaagatggtgaggcctact

SEQ ID NO: 913599 - DNA, 4001 bp, Homo sapiens
tgagacaaggcaccaggaaacaccttctttcaacaaatgccaacaggtgagggggtgtaaggcagctccttgcacttggtaccgccccagtgccaagacctctggccaactggacgcagggtgggggatgtgaaaatcctgggtgttcctgcagcattaagatcaggcacaggtccggagcagcaggccagcccgaaaatgggagacgcaggcgcttctcggttggcctgctgcacaggacctgcgcctgctgggtggacagcaaggtgggaaggagacaaaggacaatggcgttccaggggtgagaaggtgaacctgaaaagacaaaggtagcctgtgtgttggatgcttgcctccgttagtggcagagcagggatcatagtccctgtgctatgggtttcttttttttggagaccgagtctcactctattgcccaggctggagtgcagtggcgcaatcttggctcactgcgacctctgcctacagggttcaggtgattctcctgcctcagcctcccgagtagctgggactacggtcacacaccaccacacctggctaatttttgtatttttagtagacatggggtttcaccatgttggccaaggtggtcttgatgacctcaggtgatccacctgcctcagcctcccaaagtgctgggattataggcattagccactgtgccccgccgtatcctgtgggtttctaggggtaactggaagatcacaggtgaagtgtctggcagcagtgcccgccatgcaagatccaggaaagggctgctgtcagggtggagaagccgaaggccaaggagagcatggagatgaaaccaacacaactcagtggtccactgctacacagggtgagggaggaagaggaagcaagagttcttccccagcccaaggcatggcccaagattcctcagatactagagccggtgatggccgctcatgagtggggccccgggtgagccacgagggaggaagagggcagccccctgtggctggggaggaggtgtcagcttttcccttaggaccctctgaggggtggccctggtcaggaggcacccaggacaaaatgcacctgcatctcctgttctcgggctggccggctgcacaggagctacgcctgctcttagagccgagggaacaccccggatttttacaacccccaccctgcgcccagttggccagaggtcttggcactggggcagtaccagccagccgccgggcctcccgcaggacgtggcctggtgagagtggcctcctgcagagccaggcagggggtgggggtgcgggccagggtcaggtgggtggtgtcggtgcggggtggcgggtggtgggggggtgttaagcctgggtcaggctgtgggtgcgggtcaggtggggggtgcagcactaggcgaggggggtgttgcaggcctgagccaggcaggggctgcgggtcggggtcaggtggtaggtgcggggtcaggcaggagagtgcggagtcaggccctggggatgcgggatcggacggaagaggggtgcggggtcaggccggggggtgcggggtcaggtgggggggtgcggggtcaggcggagtggggtgcgggtaggggtcaggccggagggtgcggggtcaggtgggggggtgcggggtcaggcgggggggtgcggggtcaggcggagtggggtgcgggtaggggtcaggtgagggtgcggggtcaggcggaagaggggtgtgggttggggtcaggtgggggatgcggggtcaggtgggaggggggtgcggtctgggatctggtctgggcgtgcaggtcggagtcaggaggagattcgggccgccagctctcaccgcgcactcacccgaggcgaagggacgccaggcgggacagcgaaccgggggcctcagcgggccgcggacgcaggacagcaggacacgcagggcggccatggctctctggactcctcgcccggccccgcggagccgccccctcgcctatagcctttcagggctcgctccgcccacaggccagcgccgcgagaccaggcggccctcgcgagatcagcccgggcagagtgagcgggtcgctctccgccaggccccgcccccaggcccgagctgccgctcgcggatctaaggccgaggggcgtccccgggaccccgccctgggctgggaccagcgccctccaggccccgccgcagtcgcccgcgcccccgcccccgccccagccctcggggtcccagctggccccggggagaccgcgcggaggcggaggcaacggcggcgcctgccgggctctgcgccgcctccccccgcccgcctgcccgcctgcccgcctgcccgcctgcccgcctgcccgcctgcccgcctgcccgccggcgtctgtagcagcggacacagcgcgcccaggcgcagggccaggcacggtggcagcggcgtgggcactgaacgccacattaggaggagttttattttcatgcacacaagacttcaacagatttaaataataaaaatttcattcatttaagttattttatttataccttttaaatatctagacaagtattgtggagcatccatttgtgtacttgcccggattctgcaaacgccagggtggagataaaaccaccctggataaaatggaatggaaagcgaaactgctattgtgaccggtggagggtgtccaggttcttgacgtcttgaacaaagaactggacaaaacgcacaaacaaagcacggaaagaaggaagcaacaaaagcgagatttatggaaaacaaaagtgtggccgggcgcggtggctcaggcctgtaatcccagcactttgggaggccaaggcgggcagatcacctgacgtcaggagtttgagaccagcctgggcaacatggtgaaacccccctctctactaaaaacacaaaaattagccgggcgtggtggtgcacgcctgtggtcttagctactcgggaggctgacgcaggagaattgcttgaatccgggaggcggaggttgcagtgagccgagatcgcaccactgccctccagcctgggcgatagagccagacttcgtctcaaaaaagaaacaagaaaagacaacgaaaataactccacactgtgggagcggctgagcatagcggctcaagagccccgttacagattttttgggggggttaaataccctctagaggtttccattggttacttggtgtacgccctgtgtaaatggagaggacacttcttgtcatagcggaagtgtttccatttgatttagttctagggagtcagcatgaattggcctccagaccctgttctcctgcctcactatgttcaagaaaataattcaattcaaaccaaaaatgaacatgcaccaaaattttatttcaagaccgagggtaaaaatgaagacatctcgtgtaagtagaaacaaatcaacaacaaacctcaacaaacctttagtaaacgatgctctatactagtgtagttaaacctctgggacagacaggcccaaaatgaaatggctcagacagaaaagaggtttatttccttccttccttctccttcaccttctcttctttcctttctttcttgtctcgctgtcacccaggctggagtgcagtggtgtcatcccggctcatcatagcttgcgcctcccgggttcaagcgattctcctgcctcagcctcctgagtagctggaactacgggtgcttaccaccatgcccggctaatatttgtagttttttagtagagtcgggagttttgccatgttggccaggctgttctcgaactcctgacctcaagtgatccaccggtctcggcctcgcaaagtgctggaattacaggagtggaccaccgtgtccgccaagaggtttcctttctaacgacccaggaggccgggcagctcccgtcctccatcaagtaatgtagccacaaaagcacaagcaacaaagggagaacatatgtaaattggatttcaccaaaatttaaaacttttatgtctgaaaggacactaccaagatagtgagagga

SEQ ID NO: 913600 - DNA, 4001 bp, Homo sapiens
aatctcgacaagttaataggcattacaaactgaatttaaaagcaaataagagttttaagtgagggtggaggggcaggtaaaaatgccactgattaatatttaccttgaaaatggcttgcttttcttgctgttgccaagaatggtagttcctgctggccctagtttggcactctctcgtaaccagttggcaggtgggagtttcaagtctgttttctcttcaaggcgtgcaaatgctgttcgaggaggggcagaagagtatttcaccacagctcggctcttcacttcattgcctccaagaaataaagctgatccctaattaacacattgggtgaaactttaatgaaaattactaagaacgaaaaatctcacctttataaaaagaaaacaagaacctgtcacaccaggcttcacaaggaacgtatgccacatgttactaacagcacttaataaatttgagcataaatggtaacatttacttagttcttttacaccaacttcaaagaaaaaagatgagtcaaggagtatgatggttatggttatcagctagaaaatggaccacccacatctcttttaaaatgtattcatgtaaagtggagaagcagaaaccaaggagactcaatggtatcatgttaactagatgcaaactttagtaaagcctattttcagtattaaagatgtattttaattctttttttttttttttttgagacgcagtcttgctttgtcgcccaggctagggtgcagtggagcaatcatggctcactgcaacctcggcttctggggtttacgccattctcctgcctcagcctccctagtagctggaattacaggcgtgcactaccacgtccggctaatttttgtatttttagtagagacagggttttgccatgttggccaggctggtctcgaactccccgacctcaggtgatccacccacctcggcctcccaaagtgctaggattacaggcgtgagccaccgcgcccggccaaagatgtattttaattttaataacacatcattcataaaatagtctggtagaacatttgggctttttgttttaatgcaaatatttagtaatcgatgcatcggttcatgcatgcatgcatggttcaaatactcttgagtctctaacttcatagaaaggcattgggggttcgttcctcacagcctgcacttgcacactcccaaagcaagttcggcgtctgggttcaatattctaacctttcacgcagtacctcttctgcatggcaaacattttacaccctttgtgaattagttcggtctcattctcggcgagtcactacctggcaccgtttcttccctcctgctttgcacgactgtgccacgttttggaacgacatatttacatgtaccctccttgagaggaaagatcgtatctaattcacctgtcggctaccagaactgcttttaatacgaatacctgccgactggagcatggacttcaactccctgttttgggggtgtcagggaaacatggagaagcctccagaatctgccgggaaccgtggcatccctccccggtggagcgggtcctccgctcccacatccctggcaggtccccctccgcggaggactcacctgtgcagaagattcctcggattctccctgggacaggaggctgagccctcctcgagcggcggccccggccggcggaccctcggctccggcctccttggcatcccccatcacttcgatccagggcaggcgatacgacgggggagcggaggagcagcagcagcaacgcaggcccaaagcagggtaagcgccagagacgctccgcggaccgcacttccggtctctgccaggaagaagtagctgtgactcgccattaaatctcgcgatctttgtcccgaaggcccggccccgcctcccgctgcgggtgccaccttcgcggccagggcgggaattgtagtgcgcctgcgcttgtccgaacctcttcgggagactacttctcgcggtatctgactcctaggctccgccctctgcacgccgctcacggtatctgacgctcaggctccgccccctgcatgtctttgttggcaaacagttctgggggtcgtccgatcctgcaggtagtgtccgcgtgggaggggaggtgcagccgtcagcgctgccggcggctcccgttacgtgaattagtgagaggttcaaacttcttccccaggcttcagtgtcacatcttttcacacgggcaccccgagggcccggactggaaaggcgagccagccatctcgagactgggcgctcctgcccgccttttagtgcccatgtggccccatcctgggtgtgggagcggcggggcttccggggagggcgctgggacgcgcggacgaggccctccccgtttagggaatgggtggctttcggagtcttctgggggcccggcatgcccgctgcttgcggggcgtcccaggtggtgcaggacccgtgagacgctgaacctggggcctcgtaacgcctaggtttccattcgggcgctctggatgggtccgagactcggcatttctcacaggttcccaggaaacgatgccagcgctttgagtagcgaagaggtggagaaatagcccgggccgtttgcaagctttgaaggtccaggctctctttcacactcctcagtgtcatctcaaactgtcaaacgcagccacatccgttatacaatacatgttttgtagtaaaagtgttttgttgtgccgtaagatacagaaagtgtttttaaaaattaacttggctcttgcaatttggctgtctcaatttgtaattcacgtttggctcttacaactcactgtcctgtccgttttcaggaatgctcctgatgagtaagcattcaactcacaaattgctttcaaatgtaacaaaacaattttatgaattaaatttaacaggccgggcgcggtggctcacgcctttaatccctgcactttgggaggccgaggtgggcagattgcctgaggtcaggagatcgagaccagcctgacgaacagggtgaaaccccatctctactaaaaatacaaaaattagccagatgtggtggtgggcgcctgtaatcccagctactagggaggctgaggcaggagaatcgcttgaacctgggaggcagaggttgcagtgagcagagatggcaacactgcgctccagcctgggcgatagtgagactctgtcttaaaaaaataataatagtgaattaaatttaacagttaatttgatataatagtgtattttgtagacatttacttcaacatgtattgattttgatttttatcatttcatttgaatattgcagccaataattcttttttggtttttgcaagttatgcattgttttttatggtgaaaagttgaacataatatctaacactaggaggaggatagtcaaatttggttttggtagaaaataaaccctgtgcaaccataaacttgtttttcaggaatatttaagaacatttaaattgcatatcatataatgttaagtgataagtgaaattttaaaaagccaatatgcagcctagcgcggtggctcacgcctgtaatcccagcactttgggaggcagatgcgggtggatcacgaggtcaggagatcgagaccatcctggctaacacggtgaaaccccgtctctactaaaaatacaaaaacaaaattagccaggtttggtggcaggcacctgtagtcccagctactcaggagcctgaggcgggagaatggtgtgaacccaggagacggagctggcagtgagccgagattgcaccactgcactccagcctgggcagcagagcgagactccgtataaaaaaaaaaaagccaatgtgcaatatgatcttaattttaaaaacgtctccatttctgtctctgtgtccacaaaacagacctctgagccgtaaaatgaagtgatttaaaatttattctttacatttattgatttgcatatattgaactagccttgcatcccagggatgaagcccacttgatcatggtggataagct

SEQ ID NO: 913601 - DNA, 4001 bp, Homo sapiens
tgaaggtctggtttctaggtgcagagacgggagcaaagctgctgggatatgggagatccaacgacctcttctctccagtcatgtcaatgttgatcatgccatctggggaggggaaaggcagaatggaggtggaacaatgaaaatacagccaggactcccttctcacccccgctcacataggtccatttccaaggccgagagtctcagcactgtagagctgtggcaaagtccaaaaggtggggaaattgaggcccacagactgtaagaagaggccagcccaactgtggcaacccattgacagtatggaactcaagaactacctccaaaaaagcagaatgagcttttcccaactcccctccacccccagccatctgtggctctagtccccaataaaaaacacccaataatagcaacaacaatattttaaaaagcctcatccgcccggagcttttctccctcttttttgcctgggggttccacggctgaggcaccaagacaaacaccacccaagaatcgacctatcccagtcagtgccgtgatggtgccaaaccgagaggagagcccgagaagggggtgggtgatttcccggctgctccccatccccggcgccttgtgcctttttctccctccctctcccgctgcgcttcagccgagggctgctggagcgaatgggggatgtagaggaaggagtccgtaggtttccgtgccctcccaatcttctccgcctttcccgacagccgcgcgtccccgcctcagcccaaggccagtggcccggcctcgaggaaggcgcgggggccgcgagagacgactttccacagcatcgccaaggaaaccggcgtcgccggtgcccccgcgggcctccctcggcagtccgggggctgcttcccgccgttgcgcgccctcctccaccacccactcgctgcctccgccggccggagcccccgccttactaaccccctcaacttcgcgggcggcgggcaggtgggggcgcgcctccaggccgcaagaagggagcgctccgagattttcccggggtcggctctgcccaggagggagctaccgacgctttcccctggcgcttctccgccgctcggctctccaggcgcgcagctctccccgagagccccgaactttaccgtcactttgcccctgccccgggagaggggaggtcgaagtgctgccggccagagggcctacgcaagcctcgaaacccggggggacgcctcttccacccccatccctgcgctcgcccggggctgggcgcgccggggcgcacgcacgccggtttgctggcgacctggcgcatctgcccgcgcgccctggtctcagctgtcgcaggttcctcctgcacccacttccagtcttcaaagccagtgcagtcagcaccgtccacctggagccccaatcctctcctgcgattcccgcacacccactgcaccccatccaccacctccgggccgcgcaggtccgggcctgcgaagacacgcggcttacctccggccactccgttcatctggtcaaaggggcctcccagttcggcattgggaaagatggtcaccgacgtggcggcgaggtcctccaccgggtagatgttgtcagacagctggtgcacaaaaccactgagagttactgggattttgtctacggccttggcggtcatcatttgctcctcgcacaacctggagacccaactccctcgctacctggagtgtcagaaaagccgttttggagaggggttggactgagcctgggatggtatctccttttgccctccacacttaaaaacaaccaccacacacaccaagaaaaaaaaatcaacagaaataaaagtagcaaacaagttgctgttttttaagaaataagaaaaatgtctatttgccactgactctctcctgtctgtgttccggctgctgggaagccaggagttgctggtgtagtgttattataacagtcagtgagtcccctcgccgagctattaatcaattgctcctcgctcagttagacggaaagtgttgctctaagtatttatgggcaggtcttcaatacccgtgacgtcgctgcccatatatggactgaggaacagggctgggccaggcggcttttgccgtcacatggctgatttgcatacacgggctcggccgcgcggactccgccgggctcgcgacttccagctcgcaggcggcggggatcgctggggtcccgggcgcgcggccctagctgcagcctgggtccggggcgcagggatcgcgggggagagggcgcgccatggacccagtcacagccacagcaggagagcgagctgctccaggctgcggctcagcctcccggggcggggaggaattccggttctctgggactttccaaaaaaggcgaagatccggtgccggcggctccgcctccctagcccttgtttgggagccattccggaaaattaaacttcggaaagaaaccgagcggagccgagacactacagtcaaacccctactcactttcttggcagctcaaaaccgcaagcaaaaggaggcagcgaagaaaaaaaaagctacatgcattcacggaagctgactgcttttttctgaattacttggtggaaagaagtggctggtgataagagtgaatgcgtattgcttttttggaaagtctgttctatttatacaggagcgaaaacggaacaggtttgggttgtttgtttgtttaagtattttgggcaccttgggactgggagggtaaaccctaggaggagcagaattactgtggggagcttcgagagaaatcctcagccggagacaccctccttcctctgcccgcgcgctccccgccccccttcagctgctgcgcggagcgggcgcccttcccggcgcgtctgggcggtcggctgcgtgggggcgtccagatggaagcttggacactcaccctgcccctccagacacacatacacacacactcacactcgctccacttccgctacacactcccgcccccgctgccctcttcacacacccgctcacacaccttacactacacacctccctgttgactgcgtccgcgcgccgtcgttgccagcagtgtcccggcggcagagcgggctccgggctcgctggacaggaggttctatgaagacactggcctaaccttcactaccggtccctgcagccacagaatccccctgacccccatagcccaggatccaggaccgcgccctgcccgcacccgagccagaatacacgtactagaataaatattttctctccctccccaaaaaacacctcggtgagcccagcgcggtcctcagtgacggccgaaagcatctctaatcactttcaagacgccatccccatcccccaacccactcgttttactttgcgagaccccggtagaaacccttctgtttcgttcccaaagcaatttttaaaaacttttccaaagtccaaatagcagcaggttctggcttgctgggcgcaaagcttctacctcccagtgcgccccagcccgcaatggatagccgggcctgtccggggccccacaggaggctggtcccgggtgcccaagtccagcgcaccgccgcctgcatgactcattcatggtcgtttgtgcaggttgcgaactgccccagagccctttcccgctccaaagccgcggaggccagggataacgcgcagggtcagcctcgcaggcctgtcctgtccctttttcaccccgggcccggagcggccctagcttagtgtgggccggggcgggcgggagccacggcgccacgccgtggaggaagcgcggcgctgcaggcgggtcttcagccgctcacctgcctcgaccgctgcagccgtgcgccagctctcgccgggcccagcgcaccgcggtcagggccctgaggctgccgggagcggtctctccctctgctcttccactgaagcgctgcttctccccctccctccaaaacagccggtatccagcggccggccatctctctgacttaagtcacccagagcacatttgggaaagtt

SEQ ID NO: 913602 - DNA, 4001 bp, Homo sapiens
tgcccgcgcgctccccgccccccttcagctgctgcgcggagcgggcgcccttcccggcgcgtctgggcggtcggctgcgtgggggcgtccagatggaagcttggacactcaccctgcccctccagacacacatacacacacactcacactcgctccacttccgctacacactcccgcccccgctgccctcttcacacacccgctcacacaccttacactacacacctccctgttgactgcgtccgcgcgccgtcgttgccagcagtgtcccggcggcagagcgggctccgggctcgctggacaggaggttctatgaagacactggcctaaccttcactaccggtccctgcagccacagaatccccctgacccccatagcccaggatccaggaccgcgccctgcccgcacccgagccagaatacacgtactagaataaatattttctctccctccccaaaaaacacctcggtgagcccagcgcggtcctcagtgacggccgaaagcatctctaatcactttcaagacgccatccccatcccccaacccactcgttttactttgcgagaccccggtagaaacccttctgtttcgttcccaaagcaatttttaaaaacttttccaaagtccaaatagcagcaggttctggcttgctgggcgcaaagcttctacctcccagtgcgccccagcccgcaatggatagccgggcctgtccggggccccacaggaggctggtcccgggtgcccaagtccagcgcaccgccgcctgcatgactcattcatggtcgtttgtgcaggttgcgaactgccccagagccctttcccgctccaaagccgcggaggccagggataacgcgcagggtcagcctcgcaggcctgtcctgtccctttttcaccccgggcccggagcggccctagcttagtgtgggccggggcgggcgggagccacggcgccacgccgtggaggaagcgcggcgctgcaggcgggtcttcagccgctcacctgcctcgaccgctgcagccgtgcgccagctctcgccgggcccagcgcaccgcggtcagggccctgaggctgccgggagcggtctctccctctgctcttccactgaagcgctgcttctccccctccctccaaaacagccggtatccagcggccggccatctctctgacttaagtcacccagagcacatttgggaaagtttctcgctcgcgctgtgcgcttttttccaattggggatgaaaaggacatggaaagaaatcgcagcaaggttagcaccctagtagataccccaccccagcaaaaatgtgcaaagtcctatttctcaagaaagaaagaaagaaaagaaaagcaagaaaagatagctgcgttcttaccacgtgcgccagcccactccgcctgcgctctggcgggtcccgcggcccccgcgctgaccatgggcaagacgacgcctcggaagggagtccgactcgcatctcgggccctgagtccgaaagaacgggggaaagccgaattatgcaaatgcggatccctgcgatggggctcgggttacggcccccgccggccccttaggtgaggcacccaccggcagcaagcgcgggcgaggcgactgctcgcgcttcgctcctctctgcgcacgtgggcggaccggcaggcgggcgagttgcccgggccgccccgcgactggcgctgctgccaaacccgccggcggtcgccgcgcgccaccccgagggggagctcctggacgcccgagtgcccggccagcagggcgcggagggcaggaccggggctgggggcggggcggggtgcctgagcgagggaaaaccgcgaggtcttcggctgccacctttcccggaggaggatgccagtagaaggcgggtggaggagggggccccatcaaggagtcttgaaagcacattagagtaaatgagagtgactgaccctctgaaattcttgtgagctttccaaggactcacacctccccctaagagctacgctgcatcagcctggggtgcgcagggaatggagtgggggcggggacgggcggcagctgcggggaggccagggaatgcctggggccagtcctgggaggcctttattgaacctccgctgaaacaagtcagtagataactctcgtaacctttgtttttttgagtgtctcttgaagtaccaacccttaaatatgggtagtgcagataatggaacagaatcaaggcgcaccctttcaagccagccaccctgtggataagctcagaaagctaaagtggcttgcctaaagtcacgtagctggtaagtggtcgtgtccaaacttgcagctgggtcttctgaatccaagtacagcgcacagtggtcgctacatcgtgccctcaggaaaacccaggtctgaaaagtgaacacttctttgaggattgggagcctgactcagcccactagggaagaatcaggccgcctccgccaatttcatctcctttctttgccatttctgaggagagcaaagctgaggtcagggctttctacaggcaaggaggaagggactgtcatggacacgccccctgcccactgtaaagggagaatttgagttcttgggctctccagacctagactgtggatggaatagccaggctggcacaaagccagcatactaataggcgctgtcataagagaagctagccccacagtatccttcctggagacaagaagaggtgagaaaagaaagaagtgcggacaagtaaaaactccaaagggtttactgagcaagatactgtgctggaggtggaggggtgtggggatggagaatgtgagagttgaatacaaacatgtaccatggtccctactattaagcatttgaacttttttgttttgattaaaaatccaacaaagaaacaactttctttaaaatagacctgtaaaaatgcccgactaaatggggcactccaagatgtatcagggctattaaaagagtagcaaactcatgccagattccaatttgctttgtccagattccagagccagaaagtaaaataacaacgatgcagagaaaccctttagtaggcttgctcctggggttgcgggagagtgtttagggtgacaagcaggggtggcaacctgagggtcctagctggaccccagagtctcctgagtgattttcaggtttttttttttaacccagatttgaaattctcatttacagtgtggtgacaggatcaccatcagccaagagggatgtcacaaataatttgttcatatttgtgttttgatttattaacattcttgcacatcattataggctctacctattgtaatgtcatttttgttcccttccatactaatactgttactggagtggaagacaaaagaaggtcagaatttgccttaactgtggacactcatgagggtggggacctcaaacttgaatggcatagaacatgtgcacttcggtgaaaatcagatcaattgccaactctgccatccacctaaagtgcccctgcatgctgaaaaaaagtgataaatggttctctacgtttcagcatctcactactaatctggtaatcccagaggctataaaccaagcccaggctacgccaatcagaactgttgtgaagcttgaggaaagcattgctttgcaccagtccaatgtacaacttaagtcacgtgtcattggcacaaataatctggacaggaggagataagagctctatgatctaattttgtagaagcagcagcacaagcagcagcactggcccaagcagtgggtgctcaggttccctttagatatttcgtgtgcctctctaccaggtgtccatcactacaccaaaccccagggatataatggtgcctaaaattaggcctggttcccaccccatggaattagcattgtgcatcacacaaatacatgactatgaacaatgacagtgtttgatcccaatgaaagaaaatgacaaaggacccagttgaatctaggaggttgaggaagacttctctaagcagagatctgaaggatgtgc

SEQ ID NO: 913603 - DNA, 4001 bp, Homo sapiens
acatatcttttctatatgaagttcttatgaaggttccaaaaagagaagcgataaaggaaacaagacccgaacacaccaaatatataatatgtaggccattataatgctttggcctactagcacggggaaaaaaaaatacctgttgggcaaagcatgcaaatgactgtaaaacatcgacaacagccatgcagagtagtaatttcatgcaaatcattttgtatactacaaattctaactttcgaaacgacgaaaagtcataaactttgctacagtttggtttatagtgacaaagttccatttcaatctcttctttccgatgtattaataaacatcctaaaactgcttgtctgttctaaccattagatcactggttatcattagaatgaattagtgctcacatctatgttgtagtttcaataggtttttaaaacaattactccattccacacaatgtggaattatcctattccacagaccagttccctccccgacaaaaagtgttacttttactttaaaaagtatatgaccaacatatctctggttctgccaaattatcagtttatgtgctgactcaaactgccattttcataagatgaattttcaaagaagctaacaaaataagctctccaaacataaaactgtaactcacaaggtatattcatctacaacatgggtaaaacccgaaacttctatttcggtgaaggaaggatgaaaataagagctatccatgccctaacgattagaaaaattgtccggttagaggggaaaaaaaaaaccctacacaaagtttcttaagcccagagcctagccaagaacatgtgcatccccagaacgccaatgtaataaatgccttggagagatcggggcacacaagtttttccctcaagcgccaatggctgaagtacacatatagaaatagaaatcgcagacagcagcactgtggcagaaaaaaagagaaaaaaggactgatctggatgtcaagagacgttggttttaagtctcttggctcaacaactcccggagtgaccttggggaaacctctctctaggcctgtttcgttatctttaagaggcgacctgaagtccctttacattaactctattccaacttccagtgattcgaaacaggctttaggactgcttctaatcaatgccaggaaaaatgaaaaaacaaaaacaaaacaaaacaacaggaatcaggttaaatgggtcagaggcccctaagtggatataaagcagctgggtaaagggtaagtggacgccgacccagcaaagcactgagcgcggcttggagagcgggggtggctgcgggaaggccgggggtgggtccgtagggctcccggcccgggcaggaggtggagccgaggctctcgcgtgcattgtccccgggagggagccatgtttcttactccccggcactcccagatggcggccggggacgcgggccctaagcagaccaaagccccagggacctggagagccagaggacgcaggcagcaaggagggagctccagtccgggtaggggctgtctcccgggctgcggtccccgcgacgcacccggaggcggcagggggaaggaaaggcccctggggcgacggttccgggctacgcgcctcccagaccccagtcgatagagtgagaaggaaacccatgcccaaccaccggctgggacagcggcgggcaggccgcatcggtctcctctccccgcgcgggccgggcggcggagcagtgggaagcaggcccgcgctctcgacctcggaggcctcgggccgccccagcccggcgcgccccgatcagctactcaccgttggcgcgtttgagggcattttccggcctctgaaaataggccggcatcttggcggcaggctcagctcacccggcgtcagcgaactctctagtggcccgggccgggagaggagacgaaggggaaccagcgtaaggtcccacgcgcctcgccagcagtcgcccgcgcccagccggccagagacggaaaggaaggagccacgtgacctccccgcggcggccctgctgccgcccaggccccggatgtagggggcgggtctccgtgcgcgcaagcgcgctggcgtcacgcacgccgacagacgtggcggcgccggagtcctaggcgcgcaaggtccagttcccgtcttgggcctgtcctggatagcgttagggagacagttcacaggctcttcaatcttcgagcgagaattagggtgggaagggtgagtgtggggtcagagtttctgtctggagaacaagcaaacgtctgcagattggttttcaaagcgacttgtgcggagtcgtgcagttacagtaaggtcccatccagcctgggaatcgcctgtcttggctacgtgaaaatgctgagtttaacgaaaacgcagtgagcaggtgtcatcaggtcagcgccgctcaaccgtgagagacaatcatggggaagagtgacgcctaaaataaacaagcaaggttcttttatatcttggtaaagtaaaaagtttgtgtcacagggattgccttgagaaatggaggctctcagagggggcgaatggggacagcgacctggcaaagggcgaaacgccctggagcacagcagacttgcttggtgtttgaaaacacacggaaaggagtgtcgtcactttttacatacagcgcacgtcacaaacaaattaagaaaaattagtgttagtgaaaaaaatcaatctgagaggcccttttattgttgcttaacaattttaatgttcgcagacgaagtactttacctagaatttgaaaaccatttgaaccgaatctaattctcaagcccttggtacgaaataaaggtgagctcagaaggaaaaaaattttttttttttttgaaacggagtctcgctttgtcgcccaggctggagtgcagtggcacgatctcggctcactgcaagctccgccttctggattcacgccattctcctgcctcagcctcccgagtagctgggactacaggcgcccgccactgcgcccagctaatgttttgtatttttagtagagacggggtttcgccgtggtctcgatctcctgacctcgtgatccgccctcctcggcctcccaaagtgctgggattacaggcgtgagccaccgcgcccagcccagaaggaaaatttagaaggcagcagtgaaatagattattgtcaatgtattacacatttaatagacgagatatgtgaattaatgaatgaggaaatcggccgggcatggtgggtcgcgcctgtaatcccagcactttgggtggctggggcgggtggatcacctgaggtcaggagttcgagaccagcttggccaacatggcgaaaccccgtctctactaaaaatacaaaacttaggcctggcgtggtggctcacgcctgtaatccaggcgctttgggaggccgaggcgggcggatcacgaggtcaggagttcgagaccagcctgaccaaagtggtgaaacccccccccccgtctctactaaagttacaaaaaattagctggacgtggtggcgaacgcctgtaatcccagctactcgggaggctgagacaggagaatcgcttgaacccgggaggcagaggttgcagtgagcctagatcgtgccactgcgctccagcctgggtgacagggcgagactccgtctcaaaaaaaaaaaaaattagccgggcgctgtggtgggcgcctgtaatcccagctactcgggaggctgagacaggagaatcgcttgaacccgggaggcaaaagttgcagtgagccaagatcaggccactgcactccagcctgggcgacagagggagactccgtctcaaaaaaagaaaaaaaaaaaaaaagaatgagaaaaccacaggatatacacacaaaaagcatttccccctcattacttctgcctccacaaagatggttttgttttgtttttttatttttcaacatgaactgttctactacaggagaggtttttctatttatctaaattgatcactataaagaaagaagatttgg

SEQ ID NO: 913604 - DNA, 4001 bp, Homo sapiens
ggaggctgaggtgggaggatcgcttgagcccaggaagtagagagtgcagtgagccgaggtcgtgccactgtactccagcctgggcgacagagtgagaccctgtaccatgctcaaacacgagttggtcttgaactgatcatatcggggggagatttcttccatgagttaagccacctaagaactccactattctgcaaagttaacatttccttaaacccagctctccatatatattactgaacttctgcctgggtcatttaaaaagcctttcaaggcagcccgcccagcccccagagcggcctggctgaatttctctgtaaagctccctcctagattttatcccttggtgttggcaagaaggtctccttactccacaggccttgctattgtgcaactgatttaaggatggtccaggcctaactgcatcggattggttgtagtacagctcctgagccctgcccacaggaacaaggctagcaatcctctagaccgcaggagctgcgaagtccccaccctctagcaagaggccaccccagcaccaaaagaagacaaagttctgaagttaaaaaggaggccccgttcccttcaataaggctcctcaaaatcgctttccaggctcctccctctggaggacagcccagttagggcacagacaacctttgagctctcttcccgtgaccaagcttcacctctaccccagtattacttatttgtaaacagttcctggtcatgctttgaaaagcaatgccagggaaccaccctctctctggattgcctctctctagccccttccacaggatcaagcaaccaccccacccaactggggtgtccttgacaaaggtccttcaatccatttccaaaggcgtcgctgccgaaagacaccctaccttaaggctgtcagcaccctaccacccccacctactttcccttggctattacttgagctttattttatcacgctctcctcccggcctggggactcccctcacccgtggggcctcgtccagcaaagtaaacaatgctgtcaaagcgggataacgctgggcgaggcttccagactccgcattccagcctcctcccggtgttctaaaagcagcaaaaacaagccatcgcaggatgccagggccgaattcctctcccaaagttcttttttaaaaagccccggagccagctccaaaatcaagcattaatttgcacaatctacgacaggcaatgcagactgtaatgcaaggccaagtggagccaaatccgcccgggaaggaggcagagaggagagagagaactgggtcgaatgcgtaagcctgccacgaagcggaaacaagagctctttttcgcgacaggacagccacattcccgagtggggcgcgcgccgactcgagctgcgggcaagagcgaacacgaagtaaagggtcccgaacgctcgggcgggcccaagggcagcgtccccggggcttcggtggagctgggggcgggggcgaagcggccgggcaccgaggcgccgaggagttagaggaccgcggcgggacaccgggcgcggcggacggctggccggcgctcacctcccggtgtggtggagaagagcgtccccccgggcgtggtgcaatagtcatgaggtagctgcgcggcgtcgctgatggccacggtgcgggtggggatggcgcggctctggctgggctggtggccgctgccggctgacgaggacatggctgtgggcgcgggctctcggctttgtccggcgggcaggcggcggcggcggggccggggctgcttcggctcctcaggcggacggaaaagcgcgctctgcgcgctcctcgctcgcttcctcccgttccctcgtcccgctccgctcccgccgccgccctctcagccgccgccgccgccgccgctcgatcctccggcctcagccagcagcctcaggagcaacagcagcggcagcagcggcgacgacgacgaccggaagcgggcgaaggcgggagccagagggagttggggaagctggtcggccggaggtgacgtcgccgcggggcggggcgaggcagtgaggggcgtggctgaagttgttgaagggggcggggacgaggggcagggctgaggaagagagtggcttaaccccagcgagcgggagaagagccagagggagcgcgagctaagtgtttgtgagcctggtgaaggcggacaaggaaaactttcttcttattgtttgtcattgtcggttaacaccactttacttgagcagacttgagtttctcatgcattcctatgcattaaaaatgtaattttacttttaattgttcattattaattcaggcactacatgcacgatgtactgtattttaaaaatcaaacagagcagaaaggtttatggtgccactttctcccagtttccgaactcccctcaaccgctgtaccagttaattgtgtatccttccaaagaccatcactatatacacacataaagcaagatctaaacattaggaaaaggaagaaaccaagagccactcatggcaacaagaatgagtattattgtattagagttaaaatgaggcacaggagagggcttagaccatgaggtacctgaaaaatctagatctggaactctattctttcctcgaggggttctcaaactttgggtctcagtacctctacattcttgaaaattattgaggatttccaagagcttttgtttgtgtggattatatgtattgataattattgtattagaaattaaaactgagccgctgctgatcactagtgggattgtacctgtgaatagccactgcattccggcctgggcaacagagtgaggccctgtctctaaaaaacaacaacaacaacaacaacaaaaaacaaattaaaactgagaatgttttaaatgtttattaattcataaaataataacctattacatgttgacattatattttttaattatctaaaacaaatagtgagaacagtggcattattttatatttttgcaaacgctttaatatctggcttaatagaaaacagctgtattctcatatctgtttctgtgttcaagctgttgtaatgtgttgattcaactatatgaagaaaacccagcctcacacaggtatgtagttagaaaagaaggttgtctcagatccccgaggggctctccagatcacactttgagaaccgctgcactagggcagcactacttctgcccacaacatgcccaaggtgggactgggaagacactcatgggtaaggccaacatagctaccatcattcccattttgcaaatgagagaaataagggtaagagaggttgaggggaaaacagctattgcttcactgctcagagggtcaaacaggtgcttggcaagaacatagacaaaagaacttacaacagcccagggcaggccagggcattacatggtactgattttgtggtgagtgccccaagaatccagaaaaaaaagtcccctgcctgtcctgccatctggaagctgccagagttgcagagggctgagtttaaccttgaaagactctgagactttggacatgccaacagagacacttctagtggaaggaaaggggaagatactagtttacatttgtgtagagcttacagtgtgtggttgataaagtgcatcagtccagtaggggcacagtaactcacacctataatctcagcaatttgggaagctcaggtaagaggatggcatgaagccaggagttcaagaccagcctggataaaaaagcgagaccctcctctcacatttctacaaaaataaaaataaataaaaaattatccagacatggtggtgtgcacctatagtcccaacctactcaggaggctaaggcaggaggatctctttagcccaggagttcaaggctatagtgagctacgattgtgccactgcactccagcctaaaaagaccctgtctctaaaaaagttagttaattaattaaaaaataaagtgcatcactctttgaactgtctttatttacaaattttgggggtgttctggggacag

SEQ ID NO: 913605 - DNA, 4001 bp, Homo sapiens
cctactagcacgttatcttgctgtagaaaagatgggagtctatttctggggaatgggcaggggtcctagcacacctagacaccctccataccatccgcaattgaggttatcagtgaggttcagtccctacaaaagtcagggtgtttcctgtccacctctattcctggcgtgtgactcttctgggtcccaaccaaagccagtggacttcagtaggggtcaccttcactagcagaccctcagtctacttgttttccatctagtcctccacatggtgcaaaagctgctctgcttctttgcatctcagttagtcccttctgaaattcagtgaggaaactgagggaaatgagccccaaatgtgaggctgaccctcgtcctgggttccttcttctccatcttggcctcatgtctctttattgccattttagcaatttggtgctttcagtcatgggttttagattctgccccatgtccccattgctctcatgggagatcagaagcttcacacgcactcatgtctactccagagcagaatgcttccttagcttccctccagactcaggttttgtgtttctagttcccaagttcacagcaggagtagtgatgtcctcactggcttctcatttgcgttaaactgtgaactcctttagggtggggacaggaccctgctcccattgcatcctctgcacctcacaagacactccttgcttcaggccactccagacagcgtgtgctgaagggtgccctgggtggtcagaaacaagtgcatgaactttctctttgaagtgtttttgtccctgtttcctagagttcttggcattttacacgtctttctttctttttttttttttttcatattaaacttgtagttttattcaggtttgattttaacaaatgtgtcggggagagagcccgcagggaagggtaaagcccatgggggcaggcccttcccagatgcctgaggagggggcaggtcccctcccctctcctcttcttccctccccatctaaaggggtttggggagagacacaggcaggcgagggggctggtccccagtctgttgggtggtgctcagggtaaagggctatgggcaacaggggaccagaccaaggatgagtggggagggcacaaggaccatttgccagaatccaccgctttctgattccagattgaatttaaaaaaaaaaaaaagactaaaccacaagcagcacccacccccttctcccccaccagggctgtagtgtgaggggagaagaggagggcagcttcaccaaggccatggcttcgctcgctcctggccaagggagctaggtgaagggcaggggctccctgacagattgagggggtggggaaaaccaaaataaaacgtcaaataaattgtgtaggaggagtccaacctaggaccaggccagagccaggccaggctgggggagggggcctctgcaggttcggaggatcactgctgccaccactgccaccttgggagccagttattttgccatggccttgattgcaacagctgcctcctctgtcatggcagacagcaccgtgatcaggatctcttctccacagtcgtacttctgctcaatctccttgccaaggtctccctcagggagacgaaggtcctctggtacctccccgctgtcctggagcagtgataggtacccatcctggatgccaatcagctggaagtcattccttttgatgttggggacatccatattatgagttgacgggcagatatcttcatatttcttcccagtaaagatgtcaataccaaccagatggaccttggcgtggccgtgcttgccagtcttcgaagcagacatctccacgatcttacatggccagcctttgagcaccacaaagccattcttacgtaatgctgagcactgcattgggaaggtggctgaggcccctgcatctcctgtctcgaagtccaaatcatctgccattttaagaggcttcgattccaactggcgcaaacggcactgactcgaccccgtccgctcgccgcgagcccaaccgctgcctccgagcccgccgccgccgccgccgccgccgcctctacccaggcattttacacgtctttcatatgaaatcaagtatcaagtgagatttttagaatcagaaccatgaatcaagtagtgtgaggcaacacagcaaacccacctttttaggccatttccttttttctgccctcagtctgtgtgaaacaaaccttgttaaagtctctggacaccagaggatggtttgcagttgtcacctattttcaggacataacaccctgactaaagagccattggatcatttccaattcagtagatgcacccagcactcagattggccttttctctcaaccaggatctttaaagtcgatgagaagagttccagtcctgaatcatggacatgtgcagtagtgaaccgcagggctaatgacagcatgtcctggaaggatctctctgaggctgattgtctgggttctggcatcagcctctgatggagaatcaggtttccctgtgggaggagtcagacgaggagtgatcctctgctccgtccttatgggtttagttgtgatgagctggtgaggtctggttttctacactgaactaaaatgagctttcgctatgtcaggcaaaagactgaccccagaagcacacatagcgcatctcatagaagcttttaatagttcatatttactaaagagtaggaatacagagcgatgaagatgagctggaaacgacaggtgacttgccagcaggccagaatgtgctttttctttgtcccatggaaggtgttaattctccctccagttgtgaggatcagttggttcatttatgggaaggttgtcaggggacctttgaatcacggccttcagatgccgcaaggaatcccacacaggccagtggatcacgtgcatgcatttctctcccttctcgactcaggaagctgagaatgaaagaacgtgaacgagaagaaaaggggaggcggctgtcagaggtggaagaaaccatgaaattggctctagaaaaaatacccatctgcaagtgggttcggaaaccgacaccagcctcttggggaagcgctggtggagtgttttgttttaaatctttgtacaatgtttagacccagttaacacagaaatggaaacaaatggtcagaagcgatacctagagagagagacaattcacaccagagaacacaagtaccttaagatttactagtgttcaaaacatgtgaagtagccaaacatctcctgactgcaatgccagccagactgtgtggaaactcggttcataccagccgttctaggggtgatgcgagttgtcatcatccttaggaaagtgtgttgttgtaggatcaacccatccttcaaaaggactgtgcctatttataagctcagctgtttctgccctgtgaaatatggcaaggatattaattccaggagaatagagctttatgataaaagatgcccaatgaagcatgaattagggacatactgaaaatgggtaaggaaattgtcaactcagaacccagcaggcattaagtaaaagaggaggaagcattacagcaacagttttgatcatactgtacttttatagccatgtgaaatacattttctatgtatagatagattgtgtaagggtacaattgtgaggacaacaggaacatggcagattatttaaaatcatactaaagatgatgctgtgtctgatgaaagtgattctaaaccatagaaaaacgattcaagacagacaagagctgcagcagtgggtagaggactcctacagatgagaggtaaggagccttccttcctgcagttgcaggatccttaaacgctcatcaagatgatgccactgcccctagaatctgtcaacatacattttctcatgtgttggctttttcagatcgccccttctgctgcaagaaaggcctcaacaactgggtaagtttgttcatttttcccttgcttttcggccaagtcgggacatggatgtattttt

SEQ ID NO: 913606 - DNA, 4001 bp, Homo sapiens
tgagatcctgaagccaatctggtagatccaatcagtagtctagaggagacgagggctggagaaagatcagggaatgcagggggatgggactgaaagttgagttaaggaatggggttcttgggaggggttaggagcctgggaggagatgtgtagagggataggggaagactgaaggagtttgggggagaaaatatggggaagttattggagggtcttgagagagggtgttaggaggtgacactattagaggctggagaaattagttgcgagtacagactctacgaaggcaagagggacaaagcagagaccaccaggtaggggtctaaaagagaaggaaaacaggataatataacagaagagggtgaaggctgggaggggaactaaagccgagaatgagatggggagagtgttacaaggcaacttggggacaggatggaggttgatgcaatcgggaaagcttcaagggatagaatggtggtctaagatctagagaagaggcagggagtgggatggggtcttacctgaagattgcaaggcagaaggaccagaggatgagaggcccttgcaggttgaagcccttgcgttccttcatgtagttctgccccacagcgatgagaaccaggtagatcagggctatggggaatgaggttgccctggcaagcagaaggcagagggatgggctcatgggtgggtgctgattagagaaatgcccactcatctctccaggtgagtgctctgggttggagtcccagttctgccacttactagctatgtgacattggaaaaaccaacttaattctctgagccttggcttcctcatttgtagagcgcgaatactacatctctcctgggggtattaacgtatacaaagtatctagcacagggcaggagctatgtccaaggtttctgtgattattgctctctcagtggggttagaggtgggtgacggctgtctggcccgcgcctagaagcagcccagggctgtggtgtaagaagtgtggcaatagcttctccctggttggggctcctagaagcataccagggctgtggcgtaagaagaatgtggcaatagcttctccctggctggggtatggcaaattggttggagcataaagtcagcctccaaaacctctggggagctttaaggcaaagccagagagctcttcctggggaaagcttggaagagctctctgacttcgcctccttctccacagcaggaacggtggagcacctggggaacgatgggataattgtaaagggcaggctgtcccccgggccctgcactgtgcacacacgcgcgcacacacagccacaaaggacggggaagtcatctagtaaggcttcagatcaacctcacgcctccaagacccttctcactacacgctctctttgacttctgtatatttccacgttctccctcatcctcttatttctgcttgcttgctttcagctctaatctctttgaggtgccacatactacctgcacctcggacaaaggtagtgtgaagccagtacaagggagtcccataactctgctctgtaagaaaatcattgtgggcattcaatgccaccccctcgcgccccggccccggggccctggcatggcctttccctctcccaaagtctcaccaatactcctcgaaaaagggcctcatgtccttggacagctcgaagttatagggctggaacagctgatttacttcatgtgagacattcatggctgtgaccatctagttttgcagaagtcaaggtccaaagcttggaggcgctgggtgaaaggctggggctccgaggatggcgtgaacctcggggcgagacggaacagagccgggacagaaggaactcctgggcaaagggaggagggcgtcgaacctaggcatgtgcgcggcggcgcagccagctatcccgggcgcagccactgcgatatataacgcggacttgcaaagctgcctgcccgggctggcgcgacctctttcctgcgccccgccgctatccaatctcgaccaagatacgcctctgctccgcccctgggacgcagtccgcattctgattggtcatactcaagggcccgcctgccaggcgtttcgcacaccccgccccaagtcccgtcgtaggccatcgcccgcccacttccccagccttttctcccgtaaaacgtccaccccatcctgtgcggccttgcgggttcccttggaactgtcaaccgtggcctttgcctcggtttgctttaatcttgacctgcttagcagtgaagagagaggaaaggtgtccttaggctttggtgctcccacccagaaatggaggcgtcagtttccaggctccctgagatcctgggaaacccaggcctgtgatgagcaaatactaacctgggcaacgcagagcttctgtagtcccttccacctcctagcttcgagtctgcggttgtgagtgggtggaaggagatgaattttaaggagttttattgttgaggttgttgatgttgatgtttgggttgttgaggctgttgtggtttctttatagtttcctgaattcctgaactgctccagactgacagtaataaccatggagagaggaaatggggtcaccctctgggcttctggaattattgtcttcaggtttcctggaggcctcttagggtttagggagggggagagccagtgtatctccccaaggcctgttgttttctctccctaaccaaatctacttctttctcgcctgtgtaaccagccccaaagaaataaatgttctaaaacttttaaaagttttacttggctgtcccttatttctttcctaggttttatgaaagcgaaggagaaatacaaggcttgagggcagtttgagataaggtggaaatttgcaaaaagtgctaagaaacatagatataaaataattaaaatcaagatgtgggtataaatggctatgtgcagtaaagctctagagccagaggatccaagtaggaaccccagctctatttcctgaacctcagccactgtctatgcgagggtgtagtggaagtcctatcagtgccatctaagtgactcaaaagtgcatctctttgtctctgtacctcatcacttctcacctggtcacgttacctggttgcactgcctctttctctaatacagtgcttctgctcttcactgcattgcaatcagaaaagagttcctatacctggctgattaccagattcctgagcctcaactgcagagattctggtcctataggttgtctcagactgtacttggaaaaccactactttctgtttgctcatccagaaaacagctctgctttcctgcttaaaaaccttcagtggttcggccgggcacggtggttcacgcctgtaatcccagcaccttgggaggccgaggcgggcagatcatgaggtcaggagatcgagaccatcctggctaacaccgtcaaaccccgtctctactaaaaaatacaaaaaattagccgggcgtggtggcaggcgcctgtagtcccagctactcgggaggctgaggcaggagaatggcgtgaacctgggaggcagagcttgcagtgagcagagatcgtgccactgcactccagcctgggtgacagagtgagactccgtctcaaaaaaaaaaaaaaaaaaaaaaaccttcagtggttcctgatggctccatatatagcctgacagctaatcaaaaggtgatcaatacatgtctatggatgaatgaataaataaaagaatgaatattacaagaataatgccatctaggtcttacaagacccaagttcaagtcccagcacccccattaatgagccatgtgattttaggcaagttacctagcctttgtcacattctacttcagaaaaaaatgcatatagtcatactcgcctgcttatgtcacaaggttgtgattagtatgcaagccagataatgtagataaaatgatattgtggactagacacatggaaatggcaaggtgaatcattatgggaggtttacaagtgcatatggagaatatatactcagt

SEQ ID NO: 913607 - DNA, 4001 bp, Homo sapiens
aaaacacacgaacagatatttccctctaagacagtttcctgaccaggttctttttttttttttttaaagaaagaaagaaaaacaaaaaccagaccgaacctgccttcccgctgtggctgctcggcgccccaattaagcaggtcgcggcgagagcgccaagccctggagctttcctcccgcacgggttcccgcccctccccaggcctccgaaaagcaggaaagaaaaaacaaatcccatacttttctcccggggcgcgaggatcctctcgcctccagaagagggtggaagactaagaagccgcgggtctggactgaaggggcgcaaagtgggtggtgaacagggtcgaacgcagtcgaaagcaagcctggcggccgagtcctgtccgcgcccctcggagccaggacggttgggggcattgccgagggtaccaggagcctggggatcccgcgggctctgggctccgcggcgccgggcacgcacagcccagcctgctctgattcgagcgcactgggggacaacttctccgttcgcaccccttcccaaagggtcaagcggcccgcaggccatcactccaaaccagtcgtagcttcggagactggggatcgacaccacgcccggccccgcgccgcctagtttcccaacagggcgcgctggcccgcgagccggaggaacctccgcccaggccttgccaagcgcccacccggagcaggccgggggcagtgaaggatgcggcgggagcggcgcgctgcagttccgcgacgtggcacgtaccttggaagcgatgacccagatatcggtagcggtggatgagccaggggtagaaggtggacggatcccgctgctgcgaggcgaatagggggtgtggcgagtgcgaggagggtagggggtgggcggccagggcgtgcggcggcggcaccgggtgcactggcacggcggggttgggcgggtgcgagaccgcctcggcgaacaccaagtccgggttggagtagacgcccctaccggcggcggcggcggcggccgagtggaagccgttgaggaacggatttatggggctggagttagcgtagctgagtgccgcgggacggatggggtcctcggagcgcgaggcgggcaggggactgtccttggccaccagcgactcgatggtgaagcagcgcttgggcgccggctggaacatgctgcgccgaggagcgggcgccctgggctcccagctcctggcgaccgccgcacgctgcctccgccgcccgctgcccgcggcgaggacggacgagaattggggactcgtttgtttggggtgggggtgggggtggggggaaggaaaggaagaaagaaaggaaaggaaaggaaaaaggaaaggaggggggagggagagggagaggcaaagccgaggatcccgagaatcttgcaccaaacgcgcccaacctgaagagaggggggaaaatccttccagaagaatttgcaggcgtggattggggtaattttttttctttttttttctttttttttcttttttttttttttttttttttttggcgagatggcgtggggggatcggagttagaggcagggaggagaaggggggaaagttctcgggggaggcaaaaaaaaaaaaaagttttttctcctctgcaaaaggcgggcagggcgccctaagtccaaggacaatccatggaagtgttcgcttcttcacaagttgtgcaaacgatttgttagttcatgagcctaattagtgcggggatcacataaacagcttcctccgaagcctggtaaatggcttgatgattggtcgctattactcgccctgaggtggaaggggggagactctttaaagtgcgtcagagggaggtgagcgcctgggaacccggaggcctggatccgggccgagagtggaacggagtcggcgccgccgcctcggctgagccttctgccgcccaccgggcggccgggcttctccgcgccttcgcccctcgctcccagctcactcgctcctgcggcgcccgctgcggcttctcctcctccttcgcctcctcctcttcctccagtttcttcttctcctcctcctcctcttcttcctcctcctcctcttcttcctcctcctctttccccacctactccccctcagccaccgcctcctcctccaccagcaccactccctccggggcaccccggtccctgcagagtccctggccggcgccgcctccgctgcggccccctgaatcccgagcctgcctcgcccaagctggtaggacagaaggacagacagattcctctagcctagcgctccgccgctgctgccttacgcggccccgcgtcgggagaactgggatcgccccaagagcaccgcgagggtaagcgggcaggggctggttcccgggctaaaggcgccgttcggttataccaatccccacacttagcaaaactcccagcggtttcctaggccaggagggatcctggagtgaggggtacggggtcctcccaccccatcaaccacgcttagcctcgaggtcccagggtcggtgcgttcgcgattcttgacccggctcgttcgtttgcgagttgagaccgggagctgccgaccccgccggagcagtgggcttccaactctctccctctctcgccccacggtctctagcgttttctgtctgggagggtgctcacctccttccccaaaacaattccttctggaatatctgggaccggcagtccaaggtcaggggagagcccgatatggtgctactgtactattaaggttccgtcgtaattatttttgtcagtgtggtcaatgttattattattatagatgatattattttattattattatttctattattattattatgccatctgttgtcccggggttggtgggggggtggtggttgctgtgcaaacccagtgcaactaacgactacggatcgcatctccggtcccgggccgtgtccgcattttcgagctcgccttcggttttgggatgattttaggaccgagttccctcgtccccattggctcgcgcggcggcataattatgatcacatccccaggctgctggcgctgctctctgtttattggtggttaaagatctattatctattcatcagccgcctcttttttcctttttttccttttgccaattacattcttctaaagtgaagtaccagcaggtattttgcacgtttacaattaatgataaaaaaaaattctagcgtcgtttaaaactattactcccaggcccctgtcatttctcctaagaacgcagaattgcctgtgtttggtgactaggttgccgtgaaacctgggaagccgatggcaatgggaggagaagagtgaagtccaccgtgagccaggctgcactgccaccagatgcatagttgaggggacaggtctcaggacgagctacctgcttcctcccttggtttcatctggtgtatatttatgtttgtgtcaattactcctttattccagatataatgttgtgttggggcaagtgtccaaaaacctcttttgggaaaccaggcaagagaggagttgggagcagtgttttccggggttgtcagggcaccagacagattcgtgaggaactggcagagatcatctttgttgcccccaccccacaccttcccagggaacacacatacacatcttcacagatgagacaggtgtgcgcctcagctttgccctcacagtgggagacacctgcctttcccttaggcttcgaagttctgggctggggtcctagcccagtattgtccctctgtcagttccaggtggctttgctttctcctcctcccctttttccaggcccaaagattctgggctttggatccagcccttggggtaggggtgcacttaaagatgcacctcccttgggcctggaccactgtcccccaaaatattgtctacagtttggaaatccctctctcaattaggctgtgaggttacaggcctctcctctaaccccagctaggccagcagggagcctgaagacatggcagagggggga

SEQ ID NO: 913608 - DNA, 4001 bp, Homo sapiens
gctggaacaggctccggaggaggaatgctggtctccattctcataacacacactccaacagggagccaaagaataccatgaccagaaattggtccacactgctctaatttctcaaatagatccgcagcagaaaacacagttctcatcctcaacaggtaaagtctattgaagaaaaataatacttgaaagtcccttagttacaaataaactgaagaagtacattatcctctccccacatactctccacataagcataaatacaccgaaaatacgatgccgttttccaagagggaacttttccagtttctgtcatcttcaattataaagtttgaatggggcttgaacctaaattgaatgctagagacttcactctgttggcagggtagaccccacccaagcagtgctagggaaagatgatgtaaaacccacgtgtttttgtttttttagagacagggtcttactctgttgcccaggcttgactgcagtggcacaatcatagctcactgcagcctcaaactcctaggctcaagtgatcctcctgcctcagcctcctgagtagctaggactacaggtgtgtgccactatgttcagctaatttaaaaagtttttttttttttagagacaagatctcaccatgtttcccaggctggtcttgaacttctgatcttaagtgatcctcccacctcagcctcccaaagtgttgggactacaggcaagagccactgggcctggcccttatgtttctttagatgagacaaggatatctctaaggccccctattaggctggctgcccagatgcaaaacctgtgaacacaagaatgtcagtattacctggggagccacctccagtcacccgctctgtcttcatgctccgtggtgaacaatctccataagaagttcataggtgttggacacgtgtggccaggccctgggctttgaaatcgaccctggtttgcagctatatggttgatgctgccagacacatccagatatggaaaatcaactttatcccaggctttcttgtgccgctcctccagccgcctgctctgttgggtgcagctccttctgttccattttgcttcatgggctctggaaggaggagtaacagtgcacagatggcaaggtggaacctcccaacacaaactgaatctcttcctccttctgctcctcattgcctgagcctactgttctcccccgccaccaccatttctattttcaggaaaaaaaggaaaaaactttggtgatctacaagctttgggtgacttttcctttgagcaggataaccagagcagctaggtgattttccaaatgctggctatggctaaacccagtctcaaacaaaatcggaaaatcaacatgtttctcttcagattttccaacaacccctttcttcatctctctccaacctacaagctgcccttctccacctgacatcccagtagtgggtgacttccagcagctggaggcacttcccaccttccccagacctaggcctgcacattcttctctcccttcatctctgtctcttcagtctgagaagttagtctgaggcgtgactgctgcatcatcaatgactgcgttagaaaccccagcgattcactgctatgttctttatatgtaggatagttactggcacatggaaggcacccaatatgtatttgctgagtcagactgcaaaagtgtgcaactggctgagactcttgggggtatttgcacagagaaataacgtaacgataacgactactagctaactgccatttactagtcactttacacagtctaaaagcaggatctcgacatttctaacagcttgatgacctcatatttaatgtggttttgtacagaaatttccctggaaccccacacatgacattgtttggagcgactccttccttgcttacctataagcctaatcctgcgtattgagtcattctcttcttgagcaagtaggacttgttgctctcttgtcacttttccaccagtgttcctctcttaagggagagaaaaagttaaacatgcctgcttttcagtgtctatagacgattgtggaatgtttgaggaaaaccttggactttttcacagccactccctgtctgggcagcctcgggtcagcctcctcctgcagtttttctttctgtttttcccctctgtgtgtccctcctaagaatgtggtcctatttcctggagcaggagcctgtctgcaggcatggctgggaaggaagccctggccatgagctgggctgatggcacctctggagctggctttccggcagctggtgacacagcgggtctggcctcattcattactaattgttgacgctgtgttcggaggaacgtgttagtaacagcacgtaccttgatcagccacactcaggcctgggtggaggagataggtggtgactcacacagtggtggaagagggcctggtcacctgggctgcccgaaaatgacaggaaaggcagggccaggaaaggaaatccccctgcacatcacctccctccccttcccactgcatgctccacccctgcaccacaggcacttgcttctcactcctctgtgtttttttgtggtttttttttttgttttttttttttttcagatggagtcttgctctgttgcccaggctggagtgcagtggcgcaatcttggctcactgcaacctccgcctcccgggttcaagctattctcctggctcagcctcccaaggagctgggactacagatgtgcgccaccacacctggctattttttttgtattttagtagagatgggtttcaccacgttggccagaatggtctcgatctcctgaccttgtgatcttcctgcctcagcctcccaaagtgctgggattacaggcatgagccactgtgtctggtcttttttttttttaagagtctcactctgctgcccaggctggagtgtagtggcatcatcatagctcactgcagtctcaaactcctggactcaagaaatcctcttgcctcagcctcctgaatagctggaactacaggtgtgttcaccatgcctgactaagtacttaaaaaattttttgtagagatgcggtctcactatgttgcctaggctggtctcaaactcctgacttcaagccatcctcccatctcagcctcccacagcaatgggatcacaggtgtgagccagcatgcctggctcctgtgtttttacttgtcattccctgtgcttataatgctcctccctcaaatctgtattggtttagtcttccttgtgcatcaaagccccattcaaatattttctcccctttgagactttctcctgttcccccttgcaattgagaagccctttgtgcaaaaccacactctgtagacaattactaaattgagtcatagttgctctgatgtgtcccagttgccagcagatttggactacttgaggaccggggctctcccgtgtccatctttgttcccactttacctaaccaggagctgccaataacagacactcactaaatgttcatgggcagattgtggaatgaggcaggcacactctgcaagggacaagtgacaccggctcaataggtcggacgtgcgcagatggtttgagagcaaagtctgtaactctggagtgttttccatcttcaagccccctcaaaatctatttgctcttcccagaaagattcttgccatatatttggtggttggagtggtcttgtcaccggccttcaagaacactgattattgtttgaagggtacaccgccattgaaagagtagctgatttcctcagccaccgtgcgtgtgtcaataagattttataaagtacctgtctcagtgctcagctttataagaaatgaagtggaggattcaaaaggggtagaagacatagactccactcctgtagaccacaaagcctcgtccaaaagagaacatggctgaaatgagaacatgtgaatcaccaatggtagacctgtggtggcaaggggagaatcactcaatgttttcaaataaagaaattcctgcttgtcatt

SEQ ID NO: 913609 - DNA, 4001 bp, Homo sapiens
tttagtatcttcatctctcattatggttttcaatgataaattttagtgttcatatttcagttccccaaaaagacggtaaactctgaggcgtgggagatcaaaagccaggcagttgtcagaatcttgccagtgtaaattgactttaacctaacagaaatgattcttttggcatcacatttgggtgcctctatttcctctaatcataaatctttcttctactcatttcttcatagtaaaaccaagaagtctgtgctatcactccaacagcaccaagaacagatatactagtgcaatattatacacataataggggctccattaatgcttgccaaatgaataaagactgttcctataaattttttttgaaaaaaaaaatcgtctagatgcagtaaagctttttaatttgccaaagaacagaatacctacctaataaaataactctcaaattcaatattctatagaaatacaatctaccaatctgttatagaggagttttatctcatgtaatatgcaggaatttgaaaccaaaagttggtgcaacaatagaaaatttgaaaataaattctgcaactgtgccataacttactttacattcctctttccagtctctagatgttgatatgctaatggagatgtaatacagttactgctctaatttaaaccagatacttaaaattgaagaagctgcctacttgttgaagctattaccctaatactagtaaaaataattgaccattagatctaaaaggggccttggatattatctggtacatttatctcacagatcagtaaacaaatgaaactttattctaaagttcacaaagacaattaattgctaggcccgatttttagtccagtccttttcaaatgtggttttgacttgcatacggacaaggatgatggtaaaagacaggaaacatttcaagtcctaggagaaatgagattttctccactactttctttgctccccacagatttaagtaagttctaagaagtccctacagatgggagtaactgaagtgcttcctttgcacgtttttgagatttggagaatttaagaggttctaagacctatgtaaaatttcaactcaattacatattttttggttcattatctatccaccaattcttccttccatttaaaccattagatctgaaaaagtccttagaaactgcctaatagtggtagatatttcgtttcactgatcaaaaacctgaggctcaaaagcaaatgtaaatttatatttcataaaaatcttgggggaaaagtcctatcctatcccattagagagggagtagtgcagttagaaatacaacaccgaactcctgaaaccaaacatcaagtatccttaaacaagataatagaattgtgatttttttcttttcaacatgaaacttcatactatgctgtatatcacatataattaaattacacaataatcacataccgtattaataagaggttaagtgtaatataataaaatggtcatctcacagcgccagactgccctctctgtaaaactgtgagatgctgaatacctagatatttcgaccttttctctaacaagttatcctccaaggctacttcatcgaggcaaaaatacattttatttattattaaaaattccagtatatgtatgcttaattaatactgagtattccccattcttgtttcaagtgatagtctttgcttatccacatacctaggaggctggggaggctccttcaagtcactgggtatgaggttataaatgcactcagaagagcacgttggatccatggccaccaaatgactccttaaaagctactctccacaacttttttctccctgtcccagtatctccgtccctttcttcactgcttcccctttctttcttcttcgccttctgaaggaccacaggttctctccttcacatcgtccccctttaaccccctcttagcagtcctctctcgggaagaaaacaccctatttctctccggattgctaagcgtcgttgactgtgcggttgccgtggaaaccgttactaggcaacgaggaagtggcaggcagcaccgcaaactaggtctcccctcttccctctttctgcagcgccttctgctagagaagctcatttggaagccactgtttttacgtgcctttgaaagttaacggggtgaaaatgatgtccccttaaaaactgtgctcttttctatttctgtgtatctggggaaaaaagaaaaatcctagtagagacggcaaagcgcagctggtgcgcaggcgtcacccaataaggtttttgtgagcaggccccaatcgcggtgtgggcggagcgagcggctgagaccacgaggacgcaaggccagcgccgccagggagacgagggaggggaggagcctgaggagatcggagtgctcggataggctacagtgagaaaggagagtcacgtgccctgcgcgaggccgctcggggaagggcgtggagcggaggcacgctggccgccgcaggcacaggcgcagagtccactgcgcgggggcgggaccggggagctagctgcaggtacggtgctccgtctcctgtggaggctttagcggctcgtggacactgctcccccatttcctttcatttcccccgtcttctcagtgagatttccttggtgagttattggaggagaaaggaaggaaaactagaagccagcccgctcccatcgcatgcctttccccgtaccgtcccttcccctttccgctactcgctggtcatctcaactctgcgcgcatttttcctgctgcttctggtcgaggctcctcggaacgccgcgcagccctgcccgccacgtgtgtgagtgcgcgcacggggcccgcggcctcctccgcctgctgcgctcgccctcccgcccctgctcccgggaccgccccttgggcggtcctccgggtcggctctgcgcctgctcttccccgggtcgggactcttcctctaggtcgttctccaggaaccagtggacctgctctttgtaaatgagcagcctaaactaagaggagaagccttttaagtgggcctttacgtttttgtccagtttttggtgtcccttgttggaaaattgtcttctgagaagcggttttattcctttttgttccacctggtcacccgtaaatctatgcacatgggcctgccgtaggaaagtcatttagacgcttttacccgagtgtttaaaagacattttggtaataggatttggggaggaagatggatgcctctgaaccaccggtacagaggccactctgcccgaaggaaataaagcttcccggagaggagagaaaacacacttgagtctgggtttctcactgcctggttggctggcggagtgattaaaacaacacaatggcctggtgaaccttttagttcctgtataaaaaggctttactgaatgtgtaggtccttactttgggctcttactgaatttcactacataagaatacgttaagtttttcttttttttttttttgtatacagttgattttaatttttgtcccagacgcttagggaaaattctccagatttcttcacatcagattgtcttccaaaacattttagatagatggatctgtagatctatatttagatctagatccaaatctatatcactttgcccctttcttttcgcccttgagtattttatgtttgggatttctgtttagcaagtatagagaaaaaatttggcgggaaacctcctgtatgtacgaagattcgaaccaaggactcatggaatgataacgccattagccaagtggatagtcactggctaaagcttatgaattttctaattagaaggaacaccttgagactatttgtgttaatcagttcctgaaatagcaagtaagggcaaaacatgatttctgcagttagcaccaactggcctttggtagccttgatgttctggggttactgaaataaaataatttcactgatgtctgtatatttattatgctttaaaaaatgctaaacaatttgtgcaagacctcactgt

SEQ ID NO: 913610 - DNA, 4001 bp, Homo sapiens
tttttctgtttttctttttgagacggagtctcgctctgttgccgaggctggagtgcagtggtgcaatctcggctcactgcaacctccgattcccaggttcaaggagtttgcttttttgcctctgcaattcctgaacatccttcgaagtccaagccaaagccttcctggatatacagcctccaaggatcttttccatccctgaattcctttaataggcatatagggatctgcccctcaatctagcacacagtcatctatcaccttatcttttgctccaattattttatgtattagtgacttttgtcccaaactaagatgtaagttcccagagagctgtacaaacgaatatcctggctgcctaatagaataagaagatcattatactggggaacaagagtccatgtttttagtcctagcttgtacactaagtagctgtgagacaaagacttggtgtccctgtaaaatgaggacgttagaatagattgtgttcaagaattcctctagcaacagatagtaggaagagaatggaatgagagtcaagcattcactcattcatcctgcaggtagtttctcagcatccactgtgtgccatgcactctgctgggtactagggacacaaatgtggtttgattttttttcttctgtcactatgtcctttgggaaaatcatttaaattgcactggccacaggttctttatttgtaaaatgggaatcatcatttttacctcgtcgcagtggtactgaggattgagttacagtacgcagcacaaggggctcagtaaaccccacacctctcccctttgatagtataggccatgagtgggaaaaagtcattcgcggaacatcctttatatcaactgcctcaatacgacgtggttttgcaccctgacagcacatctgcctcttcataggactccttctgcttggtgttcacattgcctccttgctttgccttgccatagtgcaaactcctaggggccccagccacactgccttccttactacttatagatctggaagggagaaaacgtctttgcttcagctgctcactgcttaacgctaaggtatgtgccagatctcagggctgggcagagacccggaaggtgagaagacaaggcttctgagcccagcaggggctcacaggctgcctagggaggctgcctcaagagactacaatacacgaaggaaatgctgtaggaacccagaaggacggttggtccagggctacgtgggcaaggctttggtctgaattttggagtttagggcggggctggtcagatattaactggcatcccggcagaggagccagtaggatgaggccccagaataggctgaagccaagttgtagcaaacgccaaggtgttcatcctgtgatcaaagaggagctgcttaaggtcggtgagctgagctgagggcattaaggtatgtgttaaaaatgacaattggcaagcatgggcggtgggccggcccacaaacggagaggcctcttaggcagcgaggaagcctgccagcccctgggctgccgctgcaggtcaaatacgcctagcgccctctttcctccagctgcctcctttctgccactttctctggggagatcccttcacccctgggtgtccttcccgctccttccctccagaagtctcctccgcacacgcaggcccagggcccgggcggctggcatgcgagattctgaggcgcaggcgcaggcgcaaggcgttgccgcagcgcggggcggggggagaggggttggcgggaggagagcgcttgtcccaggtccctaccaggtgcccgtagacgtcggcaggctggaggtagaaggtggagttgagcagctcttccagcctgcgcggaacgtcgttctcccggtagtactccatcgcctgctgcttcagcttctgcagctccctagtggtcccacagctgcggccgccgccttcttcctccatggtaggagatttaaggctacagcggggtttagcctggggtcccacgagcgtccctgctgtcgctaggcaacgcaacgtgatcccgacccccagatctcgcgtggcttccaggcctaggttcttcctgcggtaaaagtcgttcccttttattggagctaggatggtatttgcgctcgctgctctgtcttttctccctgcggcattaggtccgggggttgggctcctcctagactcccgagactagggccctcccggcttcgtttttcaccacttttccctggcgattttccagagggggaaatctttaacgacctcatcaagcgcgttttgccggagcgcggcagccttagctccgaattccggctggggtcgcgcgctcgggtcccagtggcccagcgtcttgggccaccccgccctccccacgcgcccccttgctctctgctgttagtgagctcctccgggttgctaaggccgcccgtgccaggcaggcccactctgttgggggagggatgtaggggctcagggcatccttactgagcggtggcgatctcaggaattctttcattcggctcatgtttattaactacctgctctgagccgagccgtgtgctggctgggcctgctatgatgtccaggagagaaacggccacttgcccttctctgggatattagtgggggtgaaatcaatggaatgaaaaaaaccagtgtgggttgaaaatatctggggtgaaccctaagggatggttgtggtttgggcagacctaaggatgggggatgattcaggcaggacttggggaggtaaaacggaaatgggggaatggccttggctcacgttccctctccagaatgctgcctatgtccttgcccttttcaatccgaagtgccttcctggcttcattgtacctgccaggtatcatgcgattacagaacttagtgtgcgtcctcagttctagatacttcctctgctgcaggagtgggcggcgacggacagggtgttcttgttccactcacgcctgtttatgtttcctacctaagcagatcagttacaagatctgtgccacactttcccccctctggaaaacatcatcttacctcctctgcctgtttcccgagtcacttagtacaaaatgaggaagtgagtgagaaagcactttgaaacacagttattttcaatacatgcacgtatgggtgcagatgcataaaaatgtgatgctataagtactgttacacaaacccagacatgcaccttccaaacttcctccgtgttctctctgctctcttacggaacgtctcactgtctgtgtgtaatggaccatcatgaacctgccttctctccttgctagatggaaatcccctgacggtagaatctgagtctgtgttaccttcacatccaccacggagcctggggccctgcaagggcagaggatgtgctctgctgaataggtgttgagtgaacccttatgcaaaataagctgacactattgctgctgtttccatttcacctttttgcctttcctcatacacccctggaagaaaggcacctgcttctctcctatgttcatccttgagtgcctgggttgagtcccacatcaaagaagccacgtccacaatccagctctcactccagccagcccttccttctgaactctttccccatttgcagcctggaccacaaagttcagccctcagggatgtcttgattcatttgacatctcaatggaagattgcgagtatcctgggctgggaccaccatgtcttaagagtctccccctataaccctataacccatttgcctcagttccaggaggacagcgacttgatttgtcttgttcgccactgtgtctgcagcatcattacattacctgatggaatagctgctcagtaaatatttgttgagtgattgaatgggttttacacataataaatggttaataagtacttaactcacaatcagatgttttggaggtgggtgagtaatgagtacaccaacctggctggagcaaagggtttcttttcaggaataatgagaaatagggtggaaaagtagtttgaggt

SEQ ID NO: 913611 - DNA, 4001 bp, Homo sapiens
ctctcactccagctgcagtggatatcctgtctaccttttttgtggacatttgtccatcaataacaaatgggtaccccaaaagtcaagagtcacacaaatattaaaccaagttttataaatgtttgtgctgttgagttaaagagcttacaagtactacagggactgattctctgacaaggaatcaaacccaggccacaggtgtgaaagcacagaatcttagccactgcaccacaaggtggaatgccttatttgtaaatcccacagggaattcaaagcaggcagtttgagtgtacaaaggattttaattttgttttgggttagatttttgcattttaattttgtcaagagaatttctaagccaagacactattgtgtctttctttattttgattgtcccataaatacaagtaagacaattgtttagaatgagagatctccaaaatcttctttttaagaaaaaaaaattaaagttctttctaatttaaaggatccatcttttggccactgatgattagaatttccaatggtttacaaattccagtagtgactcaacaataagcctcttcatgaaaagtccaggagataattttccaggtttagaataagtttttactatataaacaagaggtgttccttgagagcatatggaggagacagtctccatgatccccgaaaattcactgagaagtagacttaagataacaaagactcttgccgccacagcctatttttttttttttttttttaagacagaatctcgctctgtcgcccagtctggagtgcagcggcgcaatctctgctcgctgcaagctccgcctcccgggttcacgccattctcctgcctcagcctcccgagtagttgggactacaggcgtccgccaccacacccggctaattttttgtatttttagtagagatggggtttcatcgtgttagccaggatggtctcgatctcctgacctcatgatctgcccaccttggcctcccaaagtgctgggattacaggcgggagccacagtgcccagcccaccacagactattaaggctggtgtttgtgcatatggtgccactagtaaccaacaaatttgccagggaccaccagtcacagacccgttaatccactggcaccaggtaggccctcctgggattagaattttcccagcctaaccaggcaacaggagccccttacagatggaacttaagacaaactcccctgagagcttgacatagttggaacaaaaagtataccacttaaaatcttatgtgaccagccatttttagactggtcacctaatgtgacctgaaaatcatgctccctaaaatcgcaaggaccaagagaaaatgctctcaaaagtcaaggtcttatacggacatgaaataagacaataggagaacttcatctggtttttattttggggactacagcaaagtttatagacacaggtctagtcagaaccgcaaaactgatcagtctgcagtgccagctcaaatagagagtttatgggggtttaggcccatgtcctaccctatggcatccttctttatgacacaacaacacggaaagacaaagactatttctggaaggaaagggaccgaacaatgtgaatattcataccaaaaaaggacaccagagtcgctacacccaaaactagtcacacaaatccttttttctcattaatcaaggttttggagatgaaaatgagacaaacagtgatttttaccatcggctctaccagattccacagagggagagaggccgggagcctgactggtaagaatttcttacccttctgctggcttgtcaggtccttggttcccttcattgcagcttccagaagaacagagcagctttggtatcctgttcacagcaccaaaactggaggggccaaggaaaacttcccctttgccctctgaagtttcactgacaatcgctgacaaaaaaggcaggttaataggagaaaaggcatacaaatttatttgatcataattttacacgtacacaggagactgcagaatgaagacctgaaggggaggctgggcacagtgtcacatgcctgtgacctcagcactttgggaggctgaggagggagtatgccttggggccaagagtttaaggtcagccttaggaacaaagcaagattccatctgtacaaaaaattttaaaattagccaggtatgctgggcccaggagtttgaggctgcatgagctgtgattgtgccaccgagctccagctcgagtgacagtgtgagaccctgtccctaaaaaaagtgaaaataaataaaataaataaaagatataggggaattgtccacttttatgcttaggttcaaccaagtatgaacagccatgtagaaatataacaggataaaaaaagagtgtgatctaatgctatagactgagtgggagaaactcagcaatgctgtctatctagattcttcttgacctctgtgccttccttccttctggatgtgggacaggacccgctctgcaatgggattcaacagtctaaatgtggggtagaagcctctccagaatgggtttcaacaatctggaacagtcagacgaggcaggtcagatcatttctttatggccagtttttatacagaaaggctgggagaaagagaaagttaaagtgatatttttaggttttgttgctggcttctatgacccacctgggggaagaggaattctagtttccatttctcgggggagaatgagaggccagagacagaagggcaagagaaagtccgagagggcaccagcacagtaaagatccagggcagttctgcttcagaggccttcatttgtggctaccattttctgggatcctggaatagccacagctatctgcgaaagaggctgggcaatgtcatcttttggctatattgtgctcagtaaaaagttggggctctgtttatttgagagaagagagaacaaatgtatagtcagcaataaacagtttctgccatagagtcaaaattacacagattcaaaactggacaaaatgtgggactatagacagtctccaagggatgaaatgaggaagaagagcaaagaaaaaaagaaaaggagtagaaacccctcttcccttgttattaatactacttcccttgttattaatactaaatggctaaagaaaaatttttaaaaaggtttcaaagtgaaaacatacttctttcctctacaatgtattcattgtttattaatctcttaaaaagcaaggagatgaattctgccagagctactaaacatttgttttctactaaacatgtagacaccgtttattcaacttacttagataaatgcttgtaaacaataatttagataaattacatagttattttaatcatgagtatcattaaaaaaaattttttttaaaacagtctggctctgttgcccaagctggaatgcagtggtgtaatctctgctcactgcaacctccacctcctctgttcaagtgattctcctgcatcagcctcctgagtagctgggattacaggccagcaccaccacacccggctaatttttgtatttttagtagagacagggtttcaccatattggccaagctagtctggaactcctgacctcaagtgatctgtccgcctccgtctcccaaagtgctgggattacaggcatgagccaccgtgcctggcctatcatggttattataaaaattaatgatggtttaaaattacgtcttgggggctgtgcacagtggcttacgcttgtaatcccagcactttgggaggccgaggggggtggatcacctaaggtcaggagttcgagaccagcctggtcaacatggtgaaaccctctctactaaaaatacaaaaactagctgggcgtggtggcacatgcctgtaatcccagctactggtggggggggccggggctaaggcaggagaattgcttgaacccaggaggtggtggttgcagtgatctgagatggcaccactgcacttcagcctggacgacagagggagactccgtctcaaaaa

SEQ ID NO: 913612 - DNA, 4001 bp, Homo sapiens
tcctttttgcaaaagaccataataacaatacctgcttctcatagagaatggccatgagcaccaaatgaggaaaatgtatgtgaacttgagtgcaaagtacaaattccttcacagacttaagattttaccagtatcacttccccagtagcttcaaggatttgcaaacctgaaatccacaatgtcagggcaccagaaaaagcagagaaacagtattggggagtggaaaagcccaccagccctgcctcagaccacctccatccacactcagcccttactaactatgagatctcaaggcaagttatcctctcagtacctcaattatgccatctggaaaatgggaatgtcaatgatagcacttgtaaggttcatgtgacaagtaagtagcacatgtaatatgctaggtatagctcccaacacagaataaagacttagtcaacattaacagctatcattattgtaagtattaagaaatatgttggctactcatgctattcttccatgttctatacggtataagcatgtgggaatgttagaagttagagatgataaagaaggaggagaaggaggtttacaaccctatactccctcactgctgcagagattcttcctggctctcacacgctggcaagcagctggctctccgtcttggcagaaaatgcccaaaagaggtaaaagatagagactgcacaccatctgtgcaaaccaggctgctcttgtagtttttagacaaaatctaaatgtagtcagatgtgacctgcccttttaagatagaattattctatttcctccctctacccgtccccgtcccccactctgtcccccacataaaactcccccacatatctcaagaaactttcagcattttgaaagacatactctggggtcctgttgtgacagccttgtgccacattaacttctctgtcttgttcccagcaaagaagcctttgctaatttcacaacaggaaagcatgcaagaaattcgagaacaaaacaaatctacacgcagagcccagcatcttcaagcaaacaccctgaggtacagacccgaggctagatgagtccggactgcagatgaggcagctgcctcttaaactgcaaggggactgaaaaagtcatttgcctctaaaaaaaccaactctgaatacaaattgataatgaatattcatgagcccctccagcttgctctagagccacccttgactgcaaccctggactctgcttcctaaaaagtttcccaaagctctttctctgcctcctctcagaaggaagagggtgggaaagttcattcagggctttttgcctccagctttcaagtacttgctttttggtctgggcttttatttttccttctattttttttttcttaaggattcagatcaaatcaattttggtcttaccctttgtatcttccataagtagcagcttttgttttcctcctctttcctcgtctttcccccccccagcctctgcttgctgtggtccgtctccgtgagagaggtcctcaaggaaacagagatataacagacccttgggctcgtgggaggggctaaattagccggccccgtttcggaaggaacctcaaaccctgtctttttcattgactagaaaggacagattgactgaggagtccagcagctcattttcctaaagttactcgaagccttttccaggttgtaattttttgcatccttgaagcaatgtatattcaaatctctctctctttctcccttcttccctctctcccttactccctccctcttcatctctctctccctctcttcgttatagaaatccctttttctcccttgaaaaagtcatctcagctgcaagcaaaaaaagctattccttactgcaattatgaagctagataataagaaagttgttaccttgaaacccgctcgaaaaactgaaagtcaagaacagttcttccctccccataaagcctctggtcccatgaccagcaatcctttctcaaggctcattagagcaaagagcaacaggtgacccaagcgatgagtttcctgcaggagacgctgcgttattggttggaaggctgggtggaaccacagaggagctgctcaatgggaaccgctgcctggctatgaattgatgaaagtcatccaccatttcccaactttgacttcctacctttgaagtctaatgagcatgaattaccacatccagaccgtcaagattaccccaatgtagatgagagcctgaccaaattatttttaaactgtgtaacaaaattattttgaaatcaaaacaagggctaatcctttgaaaggaaggtaagtcctcaagtcccaaggcgacttggcagcttctccctccacaaggctgttgcaaaccttagcatttcaggtctgaaagatacctcagacattgagtctaaaagaggttagagatgtggagaggttaagccacctgctcatgctcacatacatggtctctcttatttgctaccatgttccccagcacctaatacagtttctctcacagcatgggctctcaataaatatttgatgaatggttgaaaaaaatgaatgaattgcagcaaagcagaaatgtagatctgttttcctgtttcctagttcttgatttttctacattgcttgtctggcatgtaaatttgtatctaaagccagttataccatataaatcattaaatttgtgagcccgaaggactgttttgactctatgtagaaactatattctccagcgagctttcagtcatactttaataaggacaaaggataaccttttagtttaggcatctctgttactttgcacggtgccacatggtatatactcaatacattttttatactttaataaatttggagctgtttaacaatactttatttctgaaatgctttatagttataggattttgcatgtatgataacaactaattacactgaatgaaagactcaatggatgtcttctcccgagtcagtttagactacatctctaataatgaatattggtctgatattcatcctgttatgataaaactggtttttggtgatatgatgggattttttgtaaaaaccaacaattggtttatgactgcctttgtactattgttttggagagaaatttgaaaagagcatgtccacaaaatagtgtgcgaattacagaatggaaaccaaaacatcaaagctagaaagagaaaagaatgatcaaagggaagatccagagtggctgaggggtaggcaggagaaacagacaaacaagtacctgagcttgtcaatgagagacacactttggtgggtgctgtggcaacggttctctactttattacattaggatattaggttctttttttttttttttttttgagacaagagttttactcttgtctcccaggctggagtgcaatggagccatctcagcttactgcaccctctgcctcccgggttcaagtgattctcctgcctctgcctccaagtagctgggattacaggcgcccgccaccttgcccagctaatttgtgtatttttagtagagatggggtttcaccatgttggtcaggctggtctcgaactcctgacctcaggtgatccgcccgcctcagcctcccaaagtgctgggattacaggcgtgagccaccatgcctggcctattttactacgttcttacattcttttttttgagacagagcctcactctgtcatccaggctggagtgcagtggcgtgatcttggctcactgcaacctctgcctcccaggttcaagtgattcttgtgcctcagcctcccgcgtaactgggattatagatgcgcaccactaagcctggctaatttttgtatttttagtagagattgggtttcaccatgttgtccaggctggtctcaaactcctggcctcaagtgatccgcttgccttggcctcccaaagtgctaggattacaggtgtgagccacagtgcctagccacagttctctattttaaacaaaattaaaattcaaggtcacttcagtcatgttgtatcagacg

SEQ ID NO: 913613 - DNA, 4001 bp, Homo sapiens
tctcctacctcagccttccaagtggctgggactacaggcgcacaccaccacacccagctaatttttgtatttttagtagagacagggtttcatcatgttggccaggccggtctcgaactcctgacctcaggtgatccgcccacctcggcctcccaaagtgctgggattacaggtgcgagccaccacatccagccccccagtccagacttttgacaactagctgtgactggtgtcaccaaactaaccccttctgacctcagtttctcctttttgcaaaagaccataataacaatacctgcttctcatagagaatggccatgagcaccaaatgaggaaaatgtatgtgaacttgagtgcaaagtacaaattccttcacagacttaagattttaccagtatcacttccccagtagcttcaaggatttgcaaacctgaaatccacaatgtcagggcaccagaaaaagcagagaaacagtattggggagtggaaaagcccaccagccctgcctcagaccacctccatccacactcagcccttactaactatgagatctcaaggcaagttatcctctcagtacctcaattatgccatctggaaaatgggaatgtcaatgatagcacttgtaaggttcatgtgacaagtaagtagcacatgtaatatgctaggtatagctcccaacacagaataaagacttagtcaacattaacagctatcattattgtaagtattaagaaatatgttggctactcatgctattcttccatgttctatacggtataagcatgtgggaatgttagaagttagagatgataaagaaggaggagaaggaggtttacaaccctatactccctcactgctgcagagattcttcctggctctcacacgctggcaagcagctggctctccgtcttggcagaaaatgcccaaaagaggtaaaagatagagactgcacaccatctgtgcaaaccaggctgctcttgtagtttttagacaaaatctaaatgtagtcagatgtgacctgcccttttaagatagaattattctatttcctccctctacccgtccccgtcccccactctgtcccccacataaaactcccccacatatctcaagaaactttcagcattttgaaagacatactctggggtcctgttgtgacagccttgtgccacattaacttctctgtcttgttcccagcaaagaagcctttgctaatttcacaacaggaaagcatgcaagaaattcgagaacaaaacaaatctacacgcagagcccagcatcttcaagcaaacaccctgaggtacagacccgaggctagatgagtccggactgcagatgaggcagctgcctcttaaactgcaaggggactgaaaaagtcatttgcctctaaaaaaaccaactctgaatacaaattgataatgaatattcatgagcccctccagcttgctctagagccacccttgactgcaaccctggactctgcttcctaaaaagtttcccaaagctctttctctgcctcctctcagaaggaagagggtgggaaagttcattcagggctttttgcctccagctttcaagtacttgctttttggtctgggcttttatttttccttctattttttttttcttaaggattcagatcaaatcaattttggtcttaccctttgtatcttccataagtagcagcttttgttttcctcctctttcctcgtctttcccccccccagcctctgcttgctgtggtccgtctccgtgagagaggtcctcaaggaaacagagatataacagacccttgggctcgtgggaggggctaaattagccggccccgtttcggaaggaacctcaaaccctgtctttttcattgactagaaaggacagattgactgaggagtccagcagctcattttcctaaagttactcgaagccttttccaggttgtaattttttgcatccttgaagcaatgtatattcaaatctctctctctttctcccttcttccctctctcccttactccctccctcttcatctctctctccctctcttcgttatagaaatccctttttctcccttgaaaaagtcatctcagctgcaagcaaaaaaagctattccttactgcaattatgaagctagataataagaaagttgttaccttgaaacccgctcgaaaaactgaaagtcaagaacagttcttccctccccataaagcctctggtcccatgaccagcaatcctttctcaaggctcattagagcaaagagcaacaggtgacccaagcgatgagtttcctgcaggagacgctgcgttattggttggaaggctgggtggaaccacagaggagctgctcaatgggaaccgctgcctggctatgaattgatgaaagtcatccaccatttcccaactttgacttcctacctttgaagtctaatgagcatgaattaccacatccagaccgtcaagattaccccaatgtagatgagagcctgaccaaattatttttaaactgtgtaacaaaattattttgaaatcaaaacaagggctaatcctttgaaaggaaggtaagtcctcaagtcccaaggcgacttggcagcttctccctccacaaggctgttgcaaaccttagcatttcaggtctgaaagatacctcagacattgagtctaaaagaggttagagatgtggagaggttaagccacctgctcatgctcacatacatggtctctcttatttgctaccatgttccccagcacctaatacagtttctctcacagcatgggctctcaataaatatttgatgaatggttgaaaaaaatgaatgaattgcagcaaagcagaaatgtagatctgttttcctgtttcctagttcttgatttttctacattgcttgtctggcatgtaaatttgtatctaaagccagttataccatataaatcattaaatttgtgagcccgaaggactgttttgactctatgtagaaactatattctccagcgagctttcagtcatactttaataaggacaaaggataaccttttagtttaggcatctctgttactttgcacggtgccacatggtatatactcaatacattttttatactttaataaatttggagctgtttaacaatactttatttctgaaatgctttatagttataggattttgcatgtatgataacaactaattacactgaatgaaagactcaatggatgtcttctcccgagtcagtttagactacatctctaataatgaatattggtctgatattcatcctgttatgataaaactggtttttggtgatatgatgggattttttgtaaaaaccaacaattggtttatgactgcctttgtactattgttttggagagaaatttgaaaagagcatgtccacaaaatagtgtgcgaattacagaatggaaaccaaaacatcaaagctagaaagagaaaagaatgatcaaagggaagatccagagtggctgaggggtaggcaggagaaacagacaaacaagtacctgagcttgtcaatgagagacacactttggtgggtgctgtggcaacggttctctactttattacattaggatattaggttctttttttttttttttttttgagacaagagttttactcttgtctcccaggctggagtgcaatggagccatctcagcttactgcaccctctgcctcccgggttcaagtgattctcctgcctctgcctccaagtagctgggattacaggcgcccgccaccttgcccagctaatttgtgtatttttagtagagatggggtttcaccatgttggtcaggctggtctcgaactcctgacctcaggtgatccgcccgcctcagcctcccaaagtgctgggattacaggcgtgagccaccatgcctggcctattttactacgttcttacattcttttttttgagacagagcctcactctgtcatccaggctggagtgcagtggcgtgatcttggctcactgcaacctctgcctcccaggtt

SEQ ID NO: 913614 - DNA, 4001 bp, Homo sapiens
tggactcactgtgggcacagtgaagtaccaggaggctgggcagaggtaggaaaaactgatcctgaaattagacaaacattagtaagtctgaaacatttctacaactgagtgcttaaatatcgttttaaaattggataaaaccctcctaataaaggcaaaaatccatgccaacagaagtctaaatgttcttgtcatctctaattttagaagaagctcatggtgcttctactatatatatcagaaaagccttatctgccctttttccaaactgcactttgagtgcaattcaaagacttaatctcatgttagtgaaaagatcaccagtctccctgggcaacctcataacattggagaatcagagcaactacagtattcccaaccaagaattctgtcaagaaacaggatggtcagaaaatttatttaactgattttaaaaatgttttaccagattatacaagcacatagtaaaagacaaatcagtttaaaaggatatattgtatagtgaaaagtgattcttgccctgaccccacaatctctcagaggcaaacattactacccagttgctgtgtaattttttttttttttgagatggagtcttgctctgttgcccaggctggagtgtagtagcgcaatctcagctcactgcaacctccacctcctgggttcaagcgattcttctccctcagcctccccagtagctgggattacaggtgactgccaccacacccggctaattttcgtatttttagtagagaccgggtttctacttggccaggctggtcctgaactcctgacctcaggtgatctgcctgccttggcctcccaaagtgctgggattacaggcgtgagctactgcacctggccgttgctgtgtatctttccagggatattctacggatacacaagcataaatatacaccaatatatttacagtaatatatctctgtgtgtgtgtgtgtgtgtgtgtgtgtgtgtgtgtgcgtatccattccctcggttttacacaaatggtagtccaccatacctgctgttctgcatctttcccccactttattttataactttcccttattggtgcatgtagatccacattaatattttttaaaagcttcaggttattataatgtatggataagtgtattcatctgtgaagttcactttgtatattgattcaaaaggacctcggtctgtctgcttttaaagttcactgcaaacaaaaaacaaaaaaacttctttgtttaacctcctcaagtggcacctagccttgctcagatgcgaatctgaatcaatgttacaaccttgcactttacagagctgagcaagccgactcactctaccactcctggtctatgggctagaaactattatttatcagccctcgaaataatacaactttgatcgtctctgcatccaactaaccagaatacaaagtccaagtgcagctccagggcaaacctcacttgggacagcctcccagggccccccaacctgcctgccatcctctgccgtgctcccagccggagggaaagtgtgcagccttacctagccatgggttcccttcggtggtctcaacgcctgtcaccttctttttcttttgccctgagaaggtggcctccttgtcccaggcatctcctacgtctgcagcctagaaagatttgatttcaggcttctgtccgactgagcccacgagacaaacctgcacgggaattccacggctcccacctcctccccaggctcccgctccgtctgctctggttcctcaggcccaggggaccctacccgggcatcctgggagcggggcgttctcgtgggccagctctgtcctctaggaaccggtcgtccccaggtggcggggtgtgggtcccgcttcctctccccgtccctccgggtcccacagccctctcgcgcccacactcacgggatcaagcggcccgccggttccttcggcacctctcggttcagtcccgagctgctccccgcggccccttgcccagccggaaggagggcccggccggcggcggcgccacgtccccaaggaaaccgcagggagccaatgactgacagaagactcacggaggggccggctctccacgagccgaaccgggggcgaaccagctcggtcagcagcacgtccgtccgccagggtggccaatcccctagagcgctcggcctctgatgcccgccccgggactttgagccgcgcccaatcggaaaggcgtcgtaccgaggctccgcctgcagggcccgcggagagctcacaggtgagtggcgctgggcggccctgtgcccgcttccctccctggggcgcgaactctcggctggttgctttctccacggccgctcctgggacagagtagctccggtaggtgggttcagggtgttcgcgaccgaagcgcatcccttgcccataacctattgttggttttgtgcccactgaccctccctaccagaatggcagttctctcaccttaaaccttccctatcacctcccaaactgatgccccgacctcactgtcttgccccgtgagaaaacagaaatcgaagacaatgacgtttacaccaaagtgcttatgtccattcattcattcattgaatgtctgcttatgccagtcatcatgaatttctgtgtcgccgccctccttgaccttacagtaacacaaaggaaacgacgcgcgcgcgtgggtgtgtgtgtgtttctttcttgcttacaccagccgttatctcatttccaggaggacggcataaagtccaagctctttccaacgtggcacatccattgcgccccacgatccgccctaccgccgtcctctgccgctacttgccttccttaccacgctccagcaacgcgtcctgttttgctcattctgcccctccacctgccttgaataaccgtcccagcctcttagccaaatcacctcctactcatcccttaccacccatcttaagggtcgccttcccctaaaagccctacttgacctactacaccttttttatacatgcctattgtttcacttagcacgttgaattactattatacgtatatgtctgtctgtctgtcccactagacagaatatccttgaaggcagggactatttgcttccacatattcccaatactggccactgcctggcagataaaacacaactaatgtataattaataagcaaatgaatgaatgggggggatcggggaggaagaccacccaaatgctttatttattcaaagcttactatgacaagggagtcagtcaccatcacttgcatttggccgactcaaagcctgtcaggacattaggaaaactacttacttacttaattacctacagggtctcactctgttgtcatccaggctggagtgcagtggtgcgatcgtggttcactgcagcctcgacctcctgagcaagcgatcctcccacctcaacctcctgagtagctggctctacaggcacgtgccaccatgcccagcttatttttttttaattctttgtagagatggagtctcactatgttgtccaggctggtcttgaactcctgggctcaagcagtcttcctgtctcagcctcccaaagtgctgggattacagggatgagcagctgcacctggccaggaaagcttagtagtgaacaaaaagggaaggtttcatgtatactctgacttgagggtattagcatgggaaagctggaggtgggctaacaaaagtagtgtctcttaggtgattggtttggggtaggtagcatatttggctgtctttagtgggttctgagttgaagaaaggaggcggcaaaaaacagggaaactgagtcattgaccaagtcctgattattctcggctggttgctgtagaggttgtgggtcagagttctaattgtcatataagatctagccattgtccagtttctatattcagttctcatgactattgtttttttggctccactactctcctaaccttgttgaacttcctaatttgcctttcttcttcaattctcagttctcagtttttt

SEQ ID NO: 913615 - DNA, 4001 bp, Homo sapiens
gtctcatgagacaatgtgctgaaagtcagtgcccaactagacaatctgagctactacatacacttggcttatctgtaaagttagatttaagacactactctcaaaagtaacatttcactgtcacagctatttcactttaaaaggttaaacaacccaaagagtttaaacagttttatttccaaaaacaacattacagagcataatttctacattaaaaattcttacagtaccaagagaagtattacagtacaattttccacaacaaaattgtagcacacaaatccacgcgactcctggacttccttgaactgtcaatacactgcaccctgtttaaatggctgtacctgaaaaccaaggtatgcaattccttaggattagaagtcatcaagttatactgtcaaggatctgggggaaatgagaggaagattctattatcctggtgtccgaacccaacttccacaacaaggtaaagccacagcgatggtaaaatgtctattagttgtcaacatttacgtgctgaaacccacccaatttagacatctcaatattaagatttctgtgaatcaagtcacttagttttagttcggttttgaataagaaaggatcctccttcgaaatttagatctataaaagttacttaaattgggtcttttctccccctatgttgagataccagagagcaggagaacttaaatttattttacaaataggtaaggttacaggcttcagaagagagaggtactccaaacaaatctgcaagatattcgcaaggatcacagaaaaagtcagggatagtggtttattatcctccgaccaactagctctggagagggatggatacaaacgtcccagaaagaggacactgaaagtaagtcttatcttctagaaaagtaagtcgtccgggcaaacacgctgcaccctcgacatttccttgcagagggggagaaaagcctcatagagcagcaggcgacatgacatgcccgtctgaggctccacgtgggggctgcactgagcccaacaagcttcccagaccatggggcaatcaaattccccgactgtgcacagaacctgcgctcccggcccgggcagcggcgcgcaggccgcagtggccctggagcgccacccagcggcccacggagaggcctgtaggcgggtcctccacggctcccgactcgccgcacccccacagccacccagcccgttcccctctccggatgcacaaggcccaacccaagaactaagacacaaaatggctgccggcagcttcgtcacgtgacccctttgtgcctttcgggcccccgaactccgcgggacccgggtacaagtggccagggtcagcgggtggccttagaaggggccccgctgggccgcggcggccgggggtcgaggctgggggaggcggggtataggcccggccggcgactgagagtcggcggcgaagagaagatggcggccattttgtgtgggtttgctgctccgccgccgccgcaggcagcagagggagcgggcctgacggtgggtcggacaggggagttaacacgtaccgactcctcttccttctccattccggtgggcatctgcggcacggccctgtttatcgaggcgtattcgtgcaggtcgggcagatcctcacagcggaaaaccggcagcggcttcgaggcgtctagcgcccgcgcccgaaacgacagtttactcatctcaggcgcagcagatacctctccgctctggggaaacggccccggccagcgggatcatggagaaccgggggttcggtccccactcgccaaccgctgccggggacttgaggggcggagcgcagagcccgccgtccgggcactaacaccagccgggagggtgggaggctgtgccgctccgctcctctctcgctcgctctcttcaatacgccatggccaacatggcggacattaaaactccactgtgcgctcttcagccaaccccagccattccccacactgcatcgcgcagcggcgcgggcacgcgggcggggggagggagcgcgggctcgaggccggcgccggcacgaagcgcgcgtcccgccaacccccggcacccgccggcctcgcttcccgcgcctcgctgctccgggcccccgcccttcgcgggtccgggggcggacagggcggactgggcgctcggacaccgggcgccggctcttgggtcgtgctctcctgcagcgcacacgctcactttctcacgctcgctccctcccggcgccgctttctgacgggcgaacaaggtgcgggaaaactctctccaccagcacgccgccgtttggaaaggcagctggggagagtggcaggcggggctcgggccccgggcacctggggctcggagggctcggacctctggggtgctcgccagcggctgccccggggccacggccgcccccacggggcttcggaggggcgctccagaggcgccgcgcgccgccgtctgccgcggggggcgaacgcacagcctagttcccgcggcgccttaggtctttacgataaaaatacaaactgaattaggggcagatgctactttgagtaaacttttatcagcagttatttttatgtcctaatgcaactttggattataatgttttataggcaccgcatcaagtcattgatccgtttcccacgcattgggcttaatataaatgataggtatcctattctacaaagtagatttttttaaatcctgcattttcatctacacatatttactttttaaatagtaactgaagcaaaggaaattattacccaccactataacatttaaaagcaagatctacttcagaatttaaagccagttctttatatctagctcatgattctgtactcaaagagactgcggcttcatcatagccgtgggttcacactttcatcatttgtcctctgaaaaactttgtaacattgaatcatataaagacctgtcgtactcccgccaaacaaaaagctgaattattagatttagatggatatgatagatgggtggcatcggtttatattacacatgaaaatgggtatcctgagatctcttcgttgttgttgttgttaatagggaagattgttggggtgggtttaataaattggcagccaaatttcaattcgagtttcaatttgtatcttagtgcacaattttgtatcttgtgcaacaagatacaaaaagatacaaaaatgttttgagttgcttttctccctgggaactacgtagtaaaagtaatcacgctccttaaatactgggcttgatatgagctgtcactagcttagggcacacaggcaaactgctagcctccaggctggtttagccagctcccgcggggtagggagaaaacaggacggattgcagttctccaaaattatacttaaactccgatattggcagctcacttaagtgaggcataaggacgttcacctgcatttcctacacagagaccgtgcctttattcattcaatgagtattgagggtgtgtattgagccctcatagccttccaagtcagcttggcacccacagggctcctggaggagcttacacagtggggagaaggacccgcgaatggcaactgccacacggcgagctaagtgttatggtggaagcccaggccactgtgggaaggggcaagagtggcgcccaacccaggagagtagttctaatgaagtagcaagggaagactttttggaagagatgatatctgagtaaaattatgtaggataagtgtgggttaactttgcaaaaaaagtaaaaatgaagggaagaaaggtatcttaagacaacggtagcgacgtatccacaagctgagtcattagatagcagtcactttctgggagcctcaagaattgccaacttcactgtggaatgacacctgtttagccaggtttaacagttccgaaaatactggctgaatattattctgacagccctctccagcctacaacattaggttcctgaaagtcctagcagtagaattcataattgaggagcctaagattttaag

SEQ ID NO: 913616 - DNA, 4001 bp, Homo sapiens
ccaatacttgaaagtattatctgtaaaacttagaaataaaaataaaaccaaaagacaagattctgcagtcacaagtactttaatttttaaaaacaaatcacttattaaaaaataaacaaatggccatgctactctaaagttgatacaagtaaaataaattaagaggtagtgtctcatgagacaatgtgctgaaagtcagtgcccaactagacaatctgagctactacatacacttggcttatctgtaaagttagatttaagacactactctcaaaagtaacatttcactgtcacagctatttcactttaaaaggttaaacaacccaaagagtttaaacagttttatttccaaaaacaacattacagagcataatttctacattaaaaattcttacagtaccaagagaagtattacagtacaattttccacaacaaaattgtagcacacaaatccacgcgactcctggacttccttgaactgtcaatacactgcaccctgtttaaatggctgtacctgaaaaccaaggtatgcaattccttaggattagaagtcatcaagttatactgtcaaggatctgggggaaatgagaggaagattctattatcctggtgtccgaacccaacttccacaacaaggtaaagccacagcgatggtaaaatgtctattagttgtcaacatttacgtgctgaaacccacccaatttagacatctcaatattaagatttctgtgaatcaagtcacttagttttagttcggttttgaataagaaaggatcctccttcgaaatttagatctataaaagttacttaaattgggtcttttctccccctatgttgagataccagagagcaggagaacttaaatttattttacaaataggtaaggttacaggcttcagaagagagaggtactccaaacaaatctgcaagatattcgcaaggatcacagaaaaagtcagggatagtggtttattatcctccgaccaactagctctggagagggatggatacaaacgtcccagaaagaggacactgaaagtaagtcttatcttctagaaaagtaagtcgtccgggcaaacacgctgcaccctcgacatttccttgcagagggggagaaaagcctcatagagcagcaggcgacatgacatgcccgtctgaggctccacgtgggggctgcactgagcccaacaagcttcccagaccatggggcaatcaaattccccgactgtgcacagaacctgcgctcccggcccgggcagcggcgcgcaggccgcagtggccctggagcgccacccagcggcccacggagaggcctgtaggcgggtcctccacggctcccgactcgccgcacccccacagccacccagcccgttcccctctccggatgcacaaggcccaacccaagaactaagacacaaaatggctgccggcagcttcgtcacgtgacccctttgtgcctttcgggcccccgaactccgcgggacccgggtacaagtggccagggtcagcgggtggccttagaaggggccccgctgggccgcggcggccgggggtcgaggctgggggaggcggggtataggcccggccggcgactgagagtcggcggcgaagagaagatggcggccattttgtgtgggtttgctgctccgccgccgccgcaggcagcagagggagcgggcctgacggtgggtcggacaggggagttaacacgtaccgactcctcttccttctccattccggtgggcatctgcggcacggccctgtttatcgaggcgtattcgtgcaggtcgggcagatcctcacagcggaaaaccggcagcggcttcgaggcgtctagcgcccgcgcccgaaacgacagtttactcatctcaggcgcagcagatacctctccgctctggggaaacggccccggccagcgggatcatggagaaccgggggttcggtccccactcgccaaccgctgccggggacttgaggggcggagcgcagagcccgccgtccgggcactaacaccagccgggagggtgggaggctgtgccgctccgctcctctctcgctcgctctcttcaatacgccatggccaacatggcggacattaaaactccactgtgcgctcttcagccaaccccagccattccccacactgcatcgcgcagcggcgcgggcacgcgggcggggggagggagcgcgggctcgaggccggcgccggcacgaagcgcgcgtcccgccaacccccggcacccgccggcctcgcttcccgcgcctcgctgctccgggcccccgcccttcgcgggtccgggggcggacagggcggactgggcgctcggacaccgggcgccggctcttgggtcgtgctctcctgcagcgcacacgctcactttctcacgctcgctccctcccggcgccgctttctgacgggcgaacaaggtgcgggaaaactctctccaccagcacgccgccgtttggaaaggcagctggggagagtggcaggcggggctcgggccccgggcacctggggctcggagggctcggacctctggggtgctcgccagcggctgccccggggccacggccgcccccacggggcttcggaggggcgctccagaggcgccgcgcgccgccgtctgccgcggggggcgaacgcacagcctagttcccgcggcgccttaggtctttacgataaaaatacaaactgaattaggggcagatgctactttgagtaaacttttatcagcagttatttttatgtcctaatgcaactttggattataatgttttataggcaccgcatcaagtcattgatccgtttcccacgcattgggcttaatataaatgataggtatcctattctacaaagtagatttttttaaatcctgcattttcatctacacatatttactttttaaatagtaactgaagcaaaggaaattattacccaccactataacatttaaaagcaagatctacttcagaatttaaagccagttctttatatctagctcatgattctgtactcaaagagactgcggcttcatcatagccgtgggttcacactttcatcatttgtcctctgaaaaactttgtaacattgaatcatataaagacctgtcgtactcccgccaaacaaaaagctgaattattagatttagatggatatgatagatgggtggcatcggtttatattacacatgaaaatgggtatcctgagatctcttcgttgttgttgttgttaatagggaagattgttggggtgggtttaataaattggcagccaaatttcaattcgagtttcaatttgtatcttagtgcacaattttgtatcttgtgcaacaagatacaaaaagatacaaaaatgttttgagttgcttttctccctgggaactacgtagtaaaagtaatcacgctccttaaatactgggcttgatatgagctgtcactagcttagggcacacaggcaaactgctagcctccaggctggtttagccagctcccgcggggtagggagaaaacaggacggattgcagttctccaaaattatacttaaactccgatattggcagctcacttaagtgaggcataaggacgttcacctgcatttcctacacagagaccgtgcctttattcattcaatgagtattgagggtgtgtattgagccctcatagccttccaagtcagcttggcacccacagggctcctggaggagcttacacagtggggagaaggacccgcgaatggcaactgccacacggcgagctaagtgttatggtggaagcccaggccactgtgggaaggggcaagagtggcgcccaacccaggagagtagttctaatgaagtagcaagggaagactttttggaagagatgatatctgagtaaaattatgtaggataagtgtgggttaactttgcaaaaaaagtaaaaatgaagggaagaaaggtatcttaagacaacggtagcgacgtatccacaagctgagtcattagatagcagtcactttctgg

SEQ ID NO: 913617 - DNA, 4001 bp, Homo sapiens
aataatctcttcaatcttatggaaaagtggtctagtgtactatttcagttgtttttattttatgtgaccaaaaaaaatacgctttagggttcaattactgattcgtcccactttctttttgaactaagggcacacttactatctccataaacagctaaaatgtttacagagaccagtaaaacctatgtcagatcgtaacacatttttgttcttgggaggctttgggcctaaatcccacattctctaatcagataactcaataagaacaaagatggaaaagatataatcctgcatttagatatgtgaacatcaaaatttttaaagccaaaagcaattgtgcacatattcttaaaaaattatcttattccaaaatatttgttatttttaaaacaagactatctgtaattcagttgaagtatcatttcaaaatgaaacaaacaataatgtgggaattattatatgactacttattagaaaaacctcaggagaaacttagaatagttatttaagaaatccctaggttcaaaatgaaattcaacttttacaatgttgaaggaactaaaactcagacatttggttaaattgaaaatacactaacacatataattttgtaatataaggaaaatgcaaaatgttactaaaaggataaatcgacagcttattactgaataattctgatatagagatgataaatcagatcagataaaacaactgcaaactgcatgcctgtccctgatgttccctcggctggttgtgacgacatgtctgctctcaccatagttcacagttcacagaaaacatttaaataacacaactgaatacttccactgactaaaatgaactttctttaagaaaataaagggagaagagaatagatcaaatcttgccccacctctttttttttcttccttttttcttttagtgaaactgacataaattgttgaggagcactacagcgccaccaacacagatcaatgcaaaacaaaaaagatctcccaccgtgtgcaaaaagaaaaaaaattagaaaaatgccaaaaattacaaaatgtctcccaaatgtaccgtataggagaaaaacaagatagacctgcaaagattatctaatgaagagcttcaaagaaataatatcatagactacaagttgagatctgatcagcaaataaaagatccactatttagtaacagccataacttaatataaacccggttatgtcaacctccaccttcattataccaagggcagcttttctgtagtttgtatccaagtaatctatcaagagaaccacaataggtccatttaaaaaaaaactatatccatagtttgcctgctgataattgagtcctggacaaattaggtaagacataatttttataaagaggatatgcacatatttggcattgccaacattactggcacaaaacaagtccatcttgaaatatctgagttcctctgtagttcacagtaattaaagtataatttatattataaacatttagctttaacaatgaaaaaaaaaactatttttttttcttttggtaaaaattaaccaggcaagattaggtagaacgtgcagagatcaaagctaaagaaaaatacaaagattggttttgttagaagaaacacaatgaaaatcctttttagccggtggctctttcaaagactgacataaatggtgaaaattacaaacttaccattagtgcaggcaaagaagacggcagttcttgaaaaaaaattgtaacaatataggctggatacttgtgtccctagaaacaacagcctccaggcagcatatggatcttccaacatctttaaaatgtttggtaaataaaaagtaatactttcttccatgatcggtggccgaatggggtggcttcccccaggatctgtgggcttttgggggaaatcggagaaatatccacagaagattaaaagcagaggaggcagcacagccagaagactctggggttaacaactttgcgatggcaagcaggcgagcgctgattggctgggagggcagtgtccctacagtctgcactatcccccgctgcccccgcctcctgcagctcggaaaaaaatgcagtgtgtgtgccattttacactgggcttttaaaagcacagccaccaaaatgacaaaagtctaagctcgctatgaagtgacactgcaagacaatagcacccacggctgcctgtgagctcgggggaatgccccttttaacatctgaaggaacactctggcttcttggatgtggggtttttttgtttgttttttgtttttgtttttttttttttaaaacagcattatcatgtttttcttgagcagattgttgatccttttcaaccactcgatagatcctctgcatgcaaacctggccatgtaaaaacgatgtccatcaaaatattttttcgatttgatctcatgaaggtacctagagaagccagtcatcctggaacaaaattcatgactcctttagctccgagatctttaattccttgggaaaaaaaatataatttcttactcacagtaactacgatgtgtgcaaaaagtaaaataaaataatgaatttagcggttaaatgaaaacaataggcatattccctccccctcccccgccccccttaaaaactgtttcaaaaacctttactggctgacagaattctaccactctgccttacaaacaaaatggctgtggtactgagttttttaggatcctcccactgtgcctcctcctggcctccaggaagtgataaaaatccaaaataaatacagtactgaaagtacaccattgagtctgaattcgggggaaacctttggtaagagggtcttagaaatgtgctggtcattattagttttttaaaattgttttgaaaagaacatcaatcactagagatttacttgactgtaattcgaacttcctgctttacatatttataaggtctttcacctatcttggcaggctttcaaattaagtgggctgggaaatttgatgctcggtctctagttgtgagctgagtcaggtatttggtggttgcaactgggcttttaaataaagacaaaatctaagactttaaaaaaatgaacgttaaacagacgcaagactatgtttgctaatgtaaagtcagaaaagtcgacaaagatcgtaatgtgtcaaatactgcatacatgtgtcaacatattcagtaaaaattctttgcccactaaattttctaacaagccaagaagagaacagggtttaaaggaactggattaagaaaggggtggggaattatctacattcttcacaacctcttcccctccccacacacaccacacacatacacacacatgcacatatacacacacatacacatacatatacacacacacacgcacacacgcacacacacacacacacgttggtctggtatccctgcctggcacttaataggtaacattcttagaaagatatagctagggtgactatgaatttatcatctaacacaggatactttgagagtgaaaagggctaattataggacagctggaataaacagagcctgtccatgataagccaggaggtagaactcactgtgtttttagtgagacctccttgaactttcactagacaggttgcctaccgccatggggcctgggccaatttagatagcatttgagctagacccctctctgggccgcgtctcctgcgtttgttctactgccaagtgaagtagacaatctgagtggacttggggtcagatatatttaatgaacagccatggtaaagaaaatacctagatatgcacatccatatgtgtatataccttcatatactttattatctgtagattaggatgttctgtgcacttcgtaagatacacatacttctgattacatgctttcctatgggataattttctttggagtttttgagaccatattcatgatatacacaatttgagggatttttggtttttgttttgggaaagataatatgtagaatgaaatgttttggtggagattatca

SEQ ID NO: 913618 - DNA, 4001 bp, Homo sapiens
tcacgaggtcagaagttcgagaccagcctgaccaacatagtgaaaccccgtctctactaaaaatgcaaaaattagctgggcatggaggcgcgcgcctgtaatcccagctactcgagaggctggggcaggagaatcgcttgaacccaggaggcggaggccgcagtgagcgagatcgcaccactgcactccagcctgggcgacagggcaagactccgtctcaaaaaaaaaaaaaaaaagaaagaaagaaatcatacatttaacaaatagttactgagagttaattacaccaggcaatgtactaggttaactaattcctgtccccaaagagcttagagtctcatgggaaaaacagacatttaaaaactatatatatatatatacacatacacacacacacacacacacacacacaaatataattgtggtgactgctgttaagaggaaagtacaaggctttctgacaaaatgagagaaaccaaattgaaattgtggaggtagatgtggggtcaaggaggcctctctgataaagtgacatctgataagtcagtcaggtcgaaagtaaagtgaacgtcttgcaaggaaacaacgtgtgaaattttttttttttttgagacggaatttcgctccggttgcccaggctggagtgcaacctccgccaggctccgccaggctcactgcaacctccgccttccgggttcaagcgattctcctgccttggcctcccgattagctgggattacaggcatatgccatcatgcccggctaatttttcgtatttagtaaagacagggtttcaccacgttggtaaggctggtctcgaactcctgacctcgggtgatccacccacctcggcctcccaacaacgtgcgtaacttttaagactagaaagagctgatgcacttgtgaaaatgcaagaaggctggaacaccgaatttttgactttatttttaactttgagttaagaagagcagagaagggctccgttcatggcctaagtcttgcagagtatcttctaaggcttaatcatctgggacactagtatcttcaccgtcctcccccatcactggggctcccgcagccaggggcaagctgggtctcatttggagggttggtcggacacaggcacagttctgagaggggacaggcaagggccaaatcacacaaggcctgggaaaacacgagcatggattccactcccagtgcaatggaatgactctgaaaactgttaagtaggctgatgatggcatgacctactttatgccagagaccacctggacaactgtgcggataatggattggaggagacaaagcaacaagaagatgatgggaaaagttgaggagaaaagcgagggctgcctgtcacaggatgacagcagttaagacgctgcgtggaagtcacgtaacagcagcatttacaggcggcctgcctcatccgcccacactcttatcaatttgactctatcaacgcccaaaacgtcggacgtacatctagcccgactctctttaaaataacagctccagcattttaatcgagatcaaaaaggacccagctgaccctgcgcgcagggggccttatacaaagtcggagaagtagctgggtcgctggccggccagggactcaagccgcctcaggtgagcgctccttggcgctacttccggtctcaggtgaggccgccggaagcgggcacttggccctaagacccgctacagtgcgtcctcgctgacaggctcaatcaccacggcgaggccaaggcgcggggccgcggcccgcccgagaagcctgagctgggccccgacaccccctgcccgacattcggccgggacccccgaacactcacccagggccgcgcgagcgcccacaaggaaacagagacgctaccgccgccagccgccttggaacccagctcgacgggccgtggcgcctgcgccctcagctcaaccatagacaccgcccccaacagcgactccgacttctgctggtgcggggaggcccgtggcgcatgcgcctggctcagcgtttgtttttaagcacgggcaagaccacgtggtttggagggacgggctcagcagcgcctttctacttgcgtgcgagcagggcgagaaagctgtctccgctgccggtcagctgggtggcttgcgaaggacgcttcgcccctagcgaaaaataccctgctggcaaggcagttatgaaagttaagacatatttccacgtagagggggatgcgggtgtgccatgcgaatgtaaatcctcacaattaaccttgaaccctgcagagaaagtcagcttgggcagggaagttagccgcactttttggtcgccaggctgtgacctctcttgttgtctcccacgactgaacacgggaaggatggagagctgtcctgcttctctgttccccctccgccacgcgcgcacctgggcggagtgagtgcctacagagcctgcttacatgtgtacattgccttaagtccagcgtttagtatccgtcctcagatctcagaggtaggcggggtttcgaggcaggcgagaattttaccgtggtgcgtttgaagaaagaagatgtccacacagaggttcagaacaatgggaggaagttgagcttcgcctggggaaagaagcagcccacgatgcaggatggctgtaccagacagagcttctcagctcaggatcggtgctaggagaaggtggactttccagggccgcgaggcaggacgtcctctgggagggcagtgactgcgggtcactgcctgggaagtgctgtcctcacttggaagcctgaagtcggacaatagggaaatggggtcggaaaggggactaggaaatgctccataacatcatcttattcctcctgtcagcggccccaacccacaatgtaacttgtttttgttggtggtagtgggtttttttgtttgttttgtttttgtttttgtttttgagacggagttttgctcttgtcgcccaggatggagtacaatggcacgatgtgggctcactgcaacctcctcctcccaggttcaagcgattctcctgcctcagcctgccgggtagctgggattacaggcgcctgccaccatgcccagctaatttttgtgtttttagtagagacggggtttcgtcatgttagccaagctgtccgcgaactcctgacctcaggtgatccacccgcctcggcctcctagagttctgggattacaggtgtgagccaccacgcccggcttgtaacttgcttttttttttttttaaaggagaaagaattctagcgatttcttggataaaatattaagaatagaaaggcagttgattgacattagtttcaatgcttgaaagtaaaagcagatatatagtggatcccaacttttgagactgaggttccctttgcagctattttggagacccttcctatatcagaatttggacaggaaaaaatggtccactcaaaaggggaagttgagagttattatttacaaagacgtgggcggggttcaggaaaacaactcagggtggcacaactggagctattaagggccgaattgtgtcccctccccaaaattcatatgctggagtcctaaccgccactccccacccccaccccgggacctcagaatgtgactgtatttgaagatagggtctttaatgagggaatttagttaaatgaggtcccaagttatttagcaagtcgtccaagcccttttatactcctgccccatctaatttttctgcatcacttgtgtccttcactccctggatgcctatgctcaggatttagggaactacttactcttctcccaggaagggtgtgctacaattggcttctacggcctagcaagcatactgttcacctcttcccagctgccttagctcaggctgccataacaaatgccatagactgggcagcttaaacaacaggcatttgtttctcatagttctggaggctgggaagtccaagatcaaatgcaggcagatttagctcatttaggggaagctctcctcatggcttgcaaat

SEQ ID NO: 913619 - DNA, 4001 bp, Homo sapiens; identical to SEQ ID NO: 913618

SEQ ID NO: 913620 - DNA, 4001 bp, Homo sapiens
ataattgtggtgactgctgttaagaggaaagtacaaggctttctgacaaaatgagagaaaccaaattgaaattgtggaggtagatgtggggtcaaggaggcctctctgataaagtgacatctgataagtcagtcaggtcgaaagtaaagtgaacgtcttgcaaggaaacaacgtgtgaaattttttttttttttgagacggaatttcgctccggttgcccaggctggagtgcaacctccgccaggctccgccaggctcactgcaacctccgccttccgggttcaagcgattctcctgccttggcctcccgattagctgggattacaggcatatgccatcatgcccggctaatttttcgtatttagtaaagacagggtttcaccacgttggtaaggctggtctcgaactcctgacctcgggtgatccacccacctcggcctcccaacaacgtgcgtaacttttaagactagaaagagctgatgcacttgtgaaaatgcaagaaggctggaacaccgaatttttgactttatttttaactttgagttaagaagagcagagaagggctccgttcatggcctaagtcttgcagagtatcttctaaggcttaatcatctgggacactagtatcttcaccgtcctcccccatcactggggctcccgcagccaggggcaagctgggtctcatttggagggttggtcggacacaggcacagttctgagaggggacaggcaagggccaaatcacacaaggcctgggaaaacacgagcatggattccactcccagtgcaatggaatgactctgaaaactgttaagtaggctgatgatggcatgacctactttatgccagagaccacctggacaactgtgcggataatggattggaggagacaaagcaacaagaagatgatgggaaaagttgaggagaaaagcgagggctgcctgtcacaggatgacagcagttaagacgctgcgtggaagtcacgtaacagcagcatttacaggcggcctgcctcatccgcccacactcttatcaatttgactctatcaacgcccaaaacgtcggacgtacatctagcccgactctctttaaaataacagctccagcattttaatcgagatcaaaaaggacccagctgaccctgcgcgcagggggccttatacaaagtcggagaagtagctgggtcgctggccggccagggactcaagccgcctcaggtgagcgctccttggcgctacttccggtctcaggtgaggccgccggaagcgggcacttggccctaagacccgctacagtgcgtcctcgctgacaggctcaatcaccacggcgaggccaaggcgcggggccgcggcccgcccgagaagcctgagctgggccccgacaccccctgcccgacattcggccgggacccccgaacactcacccagggccgcgcgagcgcccacaaggaaacagagacgctaccgccgccagccgccttggaacccagctcgacgggccgtggcgcctgcgccctcagctcaaccatagacaccgcccccaacagcgactccgacttctgctggtgcggggaggcccgtggcgcatgcgcctggctcagcgtttgtttttaagcacgggcaagaccacgtggtttggagggacgggctcagcagcgcctttctacttgcgtgcgagcagggcgagaaagctgtctccgctgccggtcagctgggtggcttgcgaaggacgcttcgcccctagcgaaaaataccctgctggcaaggcagttatgaaagttaagacatatttccacgtagagggggatgcgggtgtgccatgcgaatgtaaatcctcacaattaaccttgaaccctgcagagaaagtcagcttgggcagggaagttagccgcactttttggtcgccaggctgtgacctctcttgttgtctcccacgactgaacacgggaaggatggagagctgtcctgcttctctgttccccctccgccacgcgcgcacctgggcggagtgagtgcctacagagcctgcttacatgtgtacattgccttaagtccagcgtttagtatccgtcctcagatctcagaggtaggcggggtttcgaggcaggcgagaattttaccgtggtgcgtttgaagaaagaagatgtccacacagaggttcagaacaatgggaggaagttgagcttcgcctggggaaagaagcagcccacgatgcaggatggctgtaccagacagagcttctcagctcaggatcggtgctaggagaaggtggactttccagggccgcgaggcaggacgtcctctgggagggcagtgactgcgggtcactgcctgggaagtgctgtcctcacttggaagcctgaagtcggacaatagggaaatggggtcggaaaggggactaggaaatgctccataacatcatcttattcctcctgtcagcggccccaacccacaatgtaacttgtttttgttggtggtagtgggtttttttgtttgttttgtttttgtttttgtttttgagacggagttttgctcttgtcgcccaggatggagtacaatggcacgatgtgggctcactgcaacctcctcctcccaggttcaagcgattctcctgcctcagcctgccgggtagctgggattacaggcgcctgccaccatgcccagctaatttttgtgtttttagtagagacggggtttcgtcatgttagccaagctgtccgcgaactcctgacctcaggtgatccacccgcctcggcctcctagagttctgggattacaggtgtgagccaccacgcccggcttgtaacttgcttttttttttttttaaaggagaaagaattctagcgatttcttggataaaatattaagaatagaaaggcagttgattgacattagtttcaatgcttgaaagtaaaagcagatatatagtggatcccaacttttgagactgaggttccctttgcagctattttggagacccttcctatatcagaatttggacaggaaaaaatggtccactcaaaaggggaagttgagagttattatttacaaagacgtgggcggggttcaggaaaacaactcagggtggcacaactggagctattaagggccgaattgtgtcccctccccaaaattcatatgctggagtcctaaccgccactccccacccccaccccgggacctcagaatgtgactgtatttgaagatagggtctttaatgagggaatttagttaaatgaggtcccaagttatttagcaagtcgtccaagcccttttatactcctgccccatctaatttttctgcatcacttgtgtccttcactccctggatgcctatgctcaggatttagggaactacttactcttctcccaggaagggtgtgctacaattggcttctacggcctagcaagcatactgttcacctcttcccagctgccttagctcaggctgccataacaaatgccatagactgggcagcttaaacaacaggcatttgtttctcatagttctggaggctgggaagtccaagatcaaatgcaggcagatttagctcatttaggggaagctctcctcatggcttgcaaatggttaccttctcactgtgtccttacatggggtagagagagggctctgtcttccctttcttctaaggcatcagccgtattggattagggactcacccttatgatctcatttaaccagatttgctgcctaaagaccctgtctccaaatagtcacattgagggttagggattcagcatatgaatttggggggcacccagtttagcccatagcaccaactctgcctttgttgacttcacattaatagcttgaaatcagccatagtaggagtatttataccacagaaatggacaaactataaactggaactttgggggagaggcaattattaatcttttcccacatacccctacttgttattctgtcacttctgtgatcttacaagcaggtccctctgcttagaattctcttacccattc

SEQ ID NO: 913621 - DNA, 4001 bp, Homo sapiens
tcaaccaaccgtacctctgggtctccagcactgctctaaggttcaaaggattctcctcggtctttaaccttctgagaaatatttgtttaaaaaattctaatggctttcagtagaggtacattaatagtacataacaagagccaaatcaaaatatataatacatttaatcaccaggttgaaaaaaagacaatgcaaactttgaagtaaagagaaaatttctgaggcttataattctttcgatctatctacaaggtaattaaaatactgggaacataaaatttctatataaaaacaaaaaattagcatgaaaagatgaagggtgacaagactatacaaataaatagcataagggcttgttaaccaaatcctggaatgtgaaaactatgaaagcaagccctggaaattataaaaaggaggcatttggggagcaaagaaaacaaagtcctattttgcaccttgtaaattcatagaacttagctaccggtcttgaaaatataaacacatttgcaaggtcataataacaaggaaagatgaactgtttgaggttcattactaattctttgagtcattccttgaaatgtcctttctctggttttactgtcagaaagacaatgcttttaaactggaaggaaatctggactaatctgtaatttcttatgtagagctccatctgctaagatataccattaaaattgctctttttctaggattcaggatggatttgaaagtagaaatatcagttttgagggatagtggaaacaagcaaaaagttgacgctctttttgaatacaccattatcccaatttctccacaaactggcctctcttactagtctgtatcaaaaggaacttgtggtaattaggctgaaggaaaagctaagcgagctcaacaagagagcaacagctcccacaccactcctgtccccaacttgaacagcaacagtaaggagggaggagcatggcccatcagtgttgtgcttatgtccctggaggtccagggacataagcaccatcacagtcatcatggtgttacaagacgtaaccagacactggaagcttttaaatgaaaaagtctaagaaacaaccataaacatacagcatctacagcggcaaactaaagcctgtacagttgaacgaactataatttatccatctcttcagttagaggtagagtgactacttcctttcttccttcttcatttttctacaaataattgagtttgctgtgtataggaataaccgtagggagacttaatctctgcaacaaaacgaacatagcactaaaactgtccaacatctggagggtgctccgcaaaagcccgcttcgacccccgtgctctccctagagatgggacatgcgcccccgaacgttgcagagggaacaacttcccagactccactctggagtacccttttaatctgctctagagccctaactgactgcacatgccgctcacctgtagtacacagccagatggccctcctcaatcttgtggatggaggcgtagagcaggacagccaccaaccccaccactgcagccaccagaacccgggcttgagtcatattcattctcgttcctcctgggagcgggagaaaaggaccctcagtcccgtgagtgacaggtccaccccctccagtttctaccctctccctccggaaacttggcgctctctcgcaggctgagccggggagtccagtacccctgtcccctcattcttcccttctggctgagcccgctgaccccttgccaactcctccgcccccggaggccagtgggccgcccctgctcggtgagcttcctgaaactccctctcccaagggtcgctcccgggtggaaggcactaactgagaagaagcccagccgcaggctcgcgaggaaagccgacccctcggccgcgcctcaccgatcagtgacgcatcgcccccgcccgcacgtgcagccgactcccgcgccgagccaaccgccgccaacagccggccccgcccactcgcccagcactgcggctgcgcggggacgcacacggcgtagccccggcccgcggctagtgagacggggagcgcatgggacaaaattctcctagccgcgggccgcgcaggctcctttggaggcaagtcgctttctgtacactgctggttaactgcttcggaagaggacagcccgcagtctggagtgagcagcgaagcagagaaaaggagacgccctttcggacaagggactggttggtttgttcttgtgcagagaacccactcgctcactctcaaacggtagctgttcggtttatttgtccttttgcagtgtatgcggagccccactgtgtggcacgcacttgcttccggcagagatcctgcccttcaggagcaactaaacttgttgcaaataaagtgctgtgaaagttcagaagaggaagatattagatataacggcatcattctctcgttttttaagtgttcctattatgtgccagaatgctggtccagtgagggctttatgaaggccatccagactacaggaacagaattgctaagcacatggggcgggaggcggagggaatcctccagggagaccaaagtaagtacttcagtttccttgaaggcttgtgtgatgggaaggagtgctatggtaggcgtcactacatattctgttcgttttaaattaaaaaaccatgggcacatattgccaaaaataaaaaagggaaggaaaaaggtatagttgggagatagatgaatacaagagaaattaaggacattaatggtttaagccttgaaaggctagaggtggaactataactggacaaggtggactagggttgtaaagtcctctaacccagcggacggggtgggggtgtgtgtgggttggggatgaaactgttccacttcagatcatcaggcattagattctcacagggagccggcaaacctcacatgtgcagttcacaatagggttcgcgtgcctatgagaatctgatgccactcgctaatctgacagcaggcagagctcaaggcgataatgctcactcgcccgccgctcacctcctgctatccggcttggttcctaacaggccactgtctggttccggtccgcggcccagggcttggggacccctgccctcttgggtagggaagtatgggaaagcagtgctttagggccaatgaatctataaaacggctgaaagtggagacagactgttggcaaggaagtcaagtggttaggaaactgcaggcccagggttacttagtagtggaagtaagaagaggtaaatagaatcaatccgtcttcattaaagcaagacttcccagaccactctacccacacccttcaataaatacacttacctgtatcattcatttgatttttattatctaggaatgtctgggaccttatctgttccaaataaatgatatttgcagagcttagctattttaacttccaaaaagcaaaaagaatggaaaataacttgctccataccctgttttctgtagacattctctgaagtttttcataatattgcttaaagaatgaaatgtatacaattcacaactgccattcccctctgaaaagttgttacccaccaaaaaatagtggtccaactcatgcatcaaaagcaagtttggggatcccactataatagtctgttctgactcacaccatctgcccaaattatatagatcaggctgccctgacataaccccagccacacaccagcagcggcccccacgctataacaaatctttaaccaattattaaaatattagaaaatgcatgaccattgaaaataatccttaacaataattgcaatgcttggatggcttgtaatgttcagactcccagataagcacttttactatactgcctatgttgtttcagatcttgccatctagcttaataccctccaagtaacaggtacccaataaatgtttattactaaaatcttctaaaaccagggaaacaagagagagactgcctattataatagatgacgaacagtgatatgtgatgacta

SEQ ID NO: 913622 - DNA, 4001 bp, Homo sapiens
caactgcttaaaatacctccacacctaaaaagggaaaaagatcaaattaaactgccaatgttacaccttgtttcataagctcaaccaaccgtacctctgggtctccagcactgctctaaggttcaaaggattctcctcggtctttaaccttctgagaaatatttgtttaaaaaattctaatggctttcagtagaggtacattaatagtacataacaagagccaaatcaaaatatataatacatttaatcaccaggttgaaaaaaagacaatgcaaactttgaagtaaagagaaaatttctgaggcttataattctttcgatctatctacaaggtaattaaaatactgggaacataaaatttctatataaaaacaaaaaattagcatgaaaagatgaagggtgacaagactatacaaataaatagcataagggcttgttaaccaaatcctggaatgtgaaaactatgaaagcaagccctggaaattataaaaaggaggcatttggggagcaaagaaaacaaagtcctattttgcaccttgtaaattcatagaacttagctaccggtcttgaaaatataaacacatttgcaaggtcataataacaaggaaagatgaactgtttgaggttcattactaattctttgagtcattccttgaaatgtcctttctctggttttactgtcagaaagacaatgcttttaaactggaaggaaatctggactaatctgtaatttcttatgtagagctccatctgctaagatataccattaaaattgctctttttctaggattcaggatggatttgaaagtagaaatatcagttttgagggatagtggaaacaagcaaaaagttgacgctctttttgaatacaccattatcccaatttctccacaaactggcctctcttactagtctgtatcaaaaggaacttgtggtaattaggctgaaggaaaagctaagcgagctcaacaagagagcaacagctcccacaccactcctgtccccaacttgaacagcaacagtaaggagggaggagcatggcccatcagtgttgtgcttatgtccctggaggtccagggacataagcaccatcacagtcatcatggtgttacaagacgtaaccagacactggaagcttttaaatgaaaaagtctaagaaacaaccataaacatacagcatctacagcggcaaactaaagcctgtacagttgaacgaactataatttatccatctcttcagttagaggtagagtgactacttcctttcttccttcttcatttttctacaaataattgagtttgctgtgtataggaataaccgtagggagacttaatctctgcaacaaaacgaacatagcactaaaactgtccaacatctggagggtgctccgcaaaagcccgcttcgacccccgtgctctccctagagatgggacatgcgcccccgaacgttgcagagggaacaacttcccagactccactctggagtacccttttaatctgctctagagccctaactgactgcacatgccgctcacctgtagtacacagccagatggccctcctcaatcttgtggatggaggcgtagagcaggacagccaccaaccccaccactgcagccaccagaacccgggcttgagtcatattcattctcgttcctcctgggagcgggagaaaaggaccctcagtcccgtgagtgacaggtccaccccctccagtttctaccctctccctccggaaacttggcgctctctcgcaggctgagccggggagtccagtacccctgtcccctcattcttcccttctggctgagcccgctgaccccttgccaactcctccgcccccggaggccagtgggccgcccctgctcggtgagcttcctgaaactccctctcccaagggtcgctcccgggtggaaggcactaactgagaagaagcccagccgcaggctcgcgaggaaagccgacccctcggccgcgcctcaccgatcagtgacgcatcgcccccgcccgcacgtgcagccgactcccgcgccgagccaaccgccgccaacagccggccccgcccactcgcccagcactgcggctgcgcggggacgcacacggcgtagccccggcccgcggctagtgagacggggagcgcatgggacaaaattctcctagccgcgggccgcgcaggctcctttggaggcaagtcgctttctgtacactgctggttaactgcttcggaagaggacagcccgcagtctggagtgagcagcgaagcagagaaaaggagacgccctttcggacaagggactggttggtttgttcttgtgcagagaacccactcgctcactctcaaacggtagctgttcggtttatttgtccttttgcagtgtatgcggagccccactgtgtggcacgcacttgcttccggcagagatcctgcccttcaggagcaactaaacttgttgcaaataaagtgctgtgaaagttcagaagaggaagatattagatataacggcatcattctctcgttttttaagtgttcctattatgtgccagaatgctggtccagtgagggctttatgaaggccatccagactacaggaacagaattgctaagcacatggggcgggaggcggagggaatcctccagggagaccaaagtaagtacttcagtttccttgaaggcttgtgtgatgggaaggagtgctatggtaggcgtcactacatattctgttcgttttaaattaaaaaaccatgggcacatattgccaaaaataaaaaagggaaggaaaaaggtatagttgggagatagatgaatacaagagaaattaaggacattaatggtttaagccttgaaaggctagaggtggaactataactggacaaggtggactagggttgtaaagtcctctaacccagcggacggggtgggggtgtgtgtgggttggggatgaaactgttccacttcagatcatcaggcattagattctcacagggagccggcaaacctcacatgtgcagttcacaatagggttcgcgtgcctatgagaatctgatgccactcgctaatctgacagcaggcagagctcaaggcgataatgctcactcgcccgccgctcacctcctgctatccggcttggttcctaacaggccactgtctggttccggtccgcggcccagggcttggggacccctgccctcttgggtagggaagtatgggaaagcagtgctttagggccaatgaatctataaaacggctgaaagtggagacagactgttggcaaggaagtcaagtggttaggaaactgcaggcccagggttacttagtagtggaagtaagaagaggtaaatagaatcaatccgtcttcattaaagcaagacttcccagaccactctacccacacccttcaataaatacacttacctgtatcattcatttgatttttattatctaggaatgtctgggaccttatctgttccaaataaatgatatttgcagagcttagctattttaacttccaaaaagcaaaaagaatggaaaataacttgctccataccctgttttctgtagacattctctgaagtttttcataatattgcttaaagaatgaaatgtatacaattcacaactgccattcccctctgaaaagttgttacccaccaaaaaatagtggtccaactcatgcatcaaaagcaagtttggggatcccactataatagtctgttctgactcacaccatctgcccaaattatatagatcaggctgccctgacataaccccagccacacaccagcagcggcccccacgctataacaaatctttaaccaattattaaaatattagaaaatgcatgaccattgaaaataatccttaacaataattgcaatgcttggatggcttgtaatgttcagactcccagataagcacttttactatactgcctatgttgtttcagatcttgccatctagcttaataccctccaagtaacaggtacccaataaatgtttatt

SEQ ID NO: 913623 - DNA, 4001 bp, Homo sapiens
taagaaatcttcatctaatcaacttattagatgaacagtttagaaaattaggaaagctttttgttgaatactgtcccagataaaggcttgttagggggttgcaacttcactctaccccccaaaataacatcagtgtgttttaacagtagcctttggaaaggagtgttctcacccttttttatacccaaacattaacctaacaattggcattttaggcccactgcatggtcgtgacagggtagcacccggggaacatatctatgcaggctctgcccttgagggtgatgctgagagagtgctgtggctgccaaatctaaatgattttttgctgtagaaagacaaggtacaagattggtaccagggatatttttcctaagaagagaaggtaaaaaagatccaagcaccaagaaaggaagtcaagtccaacaccagagacagactagccgacaggttagttctaaggacagacaaagtctgtagatgttggccagtgttgtgagaccggggagaggtagaaagggttacaagttgaaggccaagggctctgaagcagcaatgggagcagaggccatggcctaaaacacatctaggctcccttcaccctttctcttgtttccacttagacttagccacctagcatctagcacttaactacctagcacctggcacttgaccacctacctagccactaggtggatgcacaagttttagaaggcaatggtacaatttaaagtatgccccatatggaaaaaaattgttgagttttccattgctacaaagctctgatttctgctattgaaaattaccagctctttttcgcagaatatttatgatgctcagataagacaaaggtatatgtaatagttataatggagttgtaattattttgcaactatacctacatattgataatccaagaatcaaccaacaaatctcaattgtttaccatgtccctaacactaccctaagacctttgaagatattcaaactatgtttaatgcaaaataagatttaaatagctgggagaaatttattcaggtttaaactttagtggatttagaagctcttggccctggggtctttctgagaatgaagaggtcacacacacacacacacagatacacacacacacatatccttccacttaatctacaaatattagtcaacaaatatttattgactgtcactatcaaattcagtgatgaatatcttgttcccacactgataggtgtcagagacaggcagacatagagaattaaattttaaaagctgccctttgaacacaatgacacatagtttttcattttaatcctgttcttgaactgtgaaaattaatacccacattaccaaagaagctatttttaaaccttatatattggtattcaagaaaatgttaaaaaagaaaaaataaataaaccttatatggaaacaaaataatacatatctgaatggtcaccatacactcaagaaagcagctacaatacaaataaatggtctacattttttcctatgactcatatccacccaaatgtaaattggcttcattgatatgtctaattgttctgaatgtttttcactaagtgatatgttaaagaaaacaattgaaacctcatataaatttatttggaggtgattgaggtcctttttgatcatttgaaagtcatagtttttaatcttatggtgatgagttaggaaacatgcaaaataaaatggattaattatgtcctgtaatctctctaaggataagaaaactttgagattaagtatatacagaactgtaactgttttgcaagaatattttttactcttataaagaattataaaaagcagggtaaaggaccaccttatcaccgctaaagaagacacaataaaatgcaacggtgccctaccttaaagtagcttcaacaggcagttcgaaagactgaatctcagccaggacattctcataggtttgatctgtttcttcttccaacatcgctcgacaggcccctaattttccagctgcagatgtcagatattgagtgaaaaactgttgtaatttataaaaaaaaaaataccgttttccttataattattagaaggattctctgttcacccaaaggagcaacaaaaacaagctcactgtctgacttcatgctataaaagtctttgcttccaagaatgttgcacagctgttgctgtcctgtttccacttataacattttacttactattaaccttgacacagttcggaaagttcctgcctagtgccagctatatttattcactcgtttctcaaagacaataactatatgtaggaattacagtcattacactatacaaatttattaaatgcatttgatttgacaaggcatatatattaatattatttatgctaaatacataactaaagctacattcctagttattaccgcaactatgcttccagaagcatttgtatttgtgggcaagggcttgcccacaaacccaaggaggtaatttgcccaggaaaaatgaaatgtgctatgggatgtgattttgaggtcactaggctaattccttggtgccctgtctatctcctttgcttctctactttgctgtgtcaatttcctccattagagatagagccattagttcttttatctcttgttcaaatacaaatgcttctggaggcatttagatcttactccttttcagttccttatgcctcactgtgaatgagtttgctagatcccttctgcagaataggttttgatggagaggaagaaagagaatgaagatgtcagggttttaagaaggctagctgccaccgagaggaagaaagagtgcatgaactagaggcccaaaacagcaaaggaaaatgtgccctacaaccagccccaagtaggcctaaagaactaacgggcatgtatttcccattaccacttgcattcgatcttcttcaattcagtttagcctcagctttcttgcttaatacaagaaatacaatatttaaaggaatgagtagtgacattcttccataagaagctttttatttttttttgtttttatcagacttttttaaaagctctgaccaaaaattgacgtttgttctcttaaaaatgtagtattcaaagcatgctataactacaatctatggcatttgtcatagattgcatcagtttgtcacccctgcctgcatccacacccttgccagtacttcactgtgggcacagtatttgtcgtcccatgactttgggctcagccatgtgacttctgctggccagtgatatacataagctaaaataacagcatgtgagttctgagcctggactttctaaagcctctaaggcatttttctgtttgtcctcttgcacctctgccatcacctaagaaaagcattccctgagagctacatgagatagagtcatccccactggtccacagaccttcaggggaaagtatatattttcatctagctgcagcagcctgaaacagaactgcctattcaaatccactctgatgagccaagccccaactgaaccacagacacaagagcaatactaaatgactgttgttttcagccacagactgatgggttatacagcaatggcaaaccaatgcagcattcttcacttcaaccccaccaatagcccccaaccctcagccctagttttgctccatggcaggatggaacaaatgcagcaccaatatggctcacaccatttcccaataagatgagtaagtcctttgagacttgacaaaaaataataattttcaatctatcttaaagttcttggcacagtggctcacacccgtaatcccaccactttgggaatccgaggcgggtggatcacttgaggccaggagttcgagactagcctggccaacagggcgagaccctgtctctactaaaaatacaaaaattagctgggcttggtggcatatgcctgtagtcccagctacttgggaagctgaggcccaagaatcacttgagcccgggaggtagaggttgcagtgagccaagatcgggccactgaact

SEQ ID NO: 913624 - DNA, 4001 bp, Homo sapiens
ctagcagtaccctctatatgtgtgcaaaaagcgtctgcttataaatgagacacaaatatacatatatatgggataagtatgagtcaccagggattgctaaagaaaagagagtgggttcaaacaaaatgagccagttgaaacaactgcccagcaaaaaagaacagaataacactatgaatacacatattctgttcctgagtgtcccaaaaatctctcaatatatttcaaatttttcttctaagttaatttcatcttttttcaaggacactacctagcacattttcctaagatgaagcacctccttcataaccagtactattttcacaaataaactactctagtaactttatcacacactgcactctcagtttcaagatgcagtgatgaaaacaaagcttccttttaatcttacttctttcattaccaagtatacagtttattaaaagaaataataatgttggaaaattaaggaaatgcactaattatgcattatcatatcatagcagaaaccttatgtgacaaaaatttataacatgcctaccacatgcttggtgttagggatacagtagtgaacaaataggcaaggtccctaatgttctgagtttcctgggcatctgaatactctcccctccccattctacaaataaggaaaccgagatccagagaggttaaataatttttttccatgactgcacatttcatcagaggcagaattagggcaaaacaagaacccaggcctcctgactcttaagggcaaggtgtatttacataacttgaactggcttcaatttacactatattcacaggtccacaaactgtacagcgctctattctaggaagtgtattctgaagaatactaatgataaagcataatcagtctcaagttccctaagtgaataataacttcatttatcattattatcactccaaaagatgaaaccttatatgtaaaaggaacttattcttgaagacagtgcctaacctaacccatggctcattacgttgcctggctaataatattctattggaacagcaggtactcagtttggcatggaatatgcattacctagtactattcttaaaatgaatggggaggaactcgatttaaacggaaaaattaatgcaattttaatgaaatgtttgtaaataagtaaaagctgttctgcctccaaagcagcttagatcccgcgagcgcagggtcaccctagcgtgttcccaagcagcaagcagctgctctcctccagcccacgctctcttctccagcccacgctctcttctcgcccactgcggccgcgcgggggagtagggggaaagcgggccggcgtctcccgctcaatttcaattctcccacgcccgcggcagcccggcgcgccaggctttccacccgcgcgcgacctggcacctccgtcacgccgggtgcctgctgtcgaccctagcctggcatgcccgcggccgagcagccctcagccccaccacgagcgagacgggggcaggccccagaagtgtcctcgggcccgggggccgcagccaggaggagaacgcggggccgcagcgcggggcccggggttagagaccctgcagcagccacacccaccggctgcggggtgacagctacagcggtggaggcaggccgcgccgacaggtgcagccgccttctcggtcccgcccgggtaccggctagagttccgccacccgcgagcgcccccgcccgcccccgcgcgcaccacctgtcggggagcttcgcgcgcggccggcggcggacgccccgcccggctcgtgaggagcggccggcgtggggcggggggccgaagtcccggtgggatgagatctttaccggagggtgggccccacacaggcggtgtcggtgctctcgatctcctgcaagatccgctcgtgctcggggacggtgcccagactctcgctgttctccgccattttggctggaagctgaggagccagcgaggcgcggcgccgcgggaacgacgggggcgagctccaagtggcgcgagcgcgaaggggcggggcgggggcggggcgctcgggccggcggcgcgggggcgcgcggaacgccgggcagaaggcgcgcgacccggttcccgcccccgcacctgcaggagtgagcgggggctgtgagctggggctacgggcggcggccgggtacccagctggcctcctgccctctctcgcgactagtccctcctgggcgtcttgtgcctggcctttgggctttaacatatctccttgtcttctgtgtgtgccacaccctgtgccacacgcgggggtaccgtagtaatcagcaaggtggacactcagatcatcaccctgaatctgtaataagagccacggggacatttaacaagggcctgatgtactctgggtcgtggggagtcagagaaaggaaaacatgcactcacgaaaagcaaaattgcatgtgatagtaagatttattttaggaacgaataaagatcccagttgaccatgaagaccgctccaggtggattcatgtccccgcctgcaagaagtccacagcggccagtcaacttggaaataaattataagcgacataaaaaattaaatgatgagaagttaagacacttgatggcagagataccaaaaaaaaaaaaaaaaaaaaaggcccagggcgatgtgtaattcataccaaagtccgtgaactcaggtgcccccaggtcagagtagctgggttgagaaggggtgagagctcttgaaagggggttagcagcagggaggtgggagagagaggcagggaggcttggacaaaggtatcagtgtagaaaaaagtcgtgcttaatgacatgtttgtgggacactgagtaaaccagtttgtcatgatcaaagcagggaggaaggaagactaaacaggaacagaatggaaacctagcctgaggaacaactactttctgctctacattaatccagggctttgaaaagcttccctttgagtcaaccaagctctttatccagctgtgtaactcactcacccttagtgagcttttacttgaaacctacctccagcctcctccccacaaacatcctgggaggtggtattgtgcaatagttagagcatgagctctgaagaccagtgtccgaagacattaattcttggattaatatcacttgacagctgtgtgacattgggcaagaacctagttcttttatatgtcagttaaatgactgtaaatgacaatggcagtgtctgcctcatattgctgtcccatggtgtatgagttttccattgttgctttaacaaatcaccacaaattgagtagcttaaaatgactcagacatattatcttacagttctgtacgttagaagtctgtcacaggtctcactgggctaaaaatcaaggtgtcagcatgtctgtgttccttgctagagactctgcgggagaatttgtttctttgccttttccagcttctagaggccacccacataccttggcttgtggcccccttcctccatcttcaaagctagcagcattacatctctctgaccattcttctgtggtcacatcttcctctgactctgacttaggctggaaaagatgctcagtttttaaggacccatatgattagagtggacccaaccatttaatccaggataatcttccatctcagggtccttaaccttaatcacatatgcaataccccctttgtcatgtaaaaataacatatgcacaggttccagggattagaatgtgagcatcagtgggacccactgcctaccaaacttaggaagggccctataaaacattgctaatgccctccttcctattaatctggaatcttcagagcaatggattccagctatacacatccattgagctaagacagtcttccatttcctgcagagagacctagcttttcattctttttgtgggaggggataaaatttgtcttcttttttttatgtttcagtttcaattttcaaaaggttattttcccctctcaagaacttcttaggtcgagcacagtggctcaca

SEQ ID NO: 913625 - DNA, 4001 bp, Homo sapiens
tcgaactcctgacctcaggtgatccacctgccttggcttcccaaagtgctgggattacaggtgtgagccactgcgccctgccgacaatttactctttcctccaaagttatactgcttccttctgtttcttattttattgcacaggctgaaatttccacaaaaatgttacataatagcggctatgcttgttttcttctattttaagtgaatacttgcagagttttctctttgagcatggtattggctgttggtataagacagatattttgagcctcatcttttatcaatctctccgttgctcacaatgcttcagctctcctggccttctttcagtttccccaacttactaaattcttcccactttcagatctctcttcaacctattctttctgccagagctgcactctctccacccacctgactcttacctactctttagatgattcagcttaaatgtcacttctgctgactaggatgggtttgcctgttacatgttctcaaggtgccctgtaatattctttcaaagcaccaccacatatgtaaccatatgctcatttgagcatttatttgtttacaatttgtgtctgtgtcctttgatagcagaaaccaagtcagcgctgtgcctgacacatgaaaatactcaagtgatatctatgaaatgaacaaactcaggactgttaagaacattcccaacaatgactgaatagaaagccccttgaatcagacagcttaagttacttactcaaagcagaatcaaagtcaagttagccagaacgtaactgttctaattctgaatcctctttctattgtgctccttcaaatattgcttatatgatcctgagctaatcctggatctatctctgaaactagaaaggtaggtattactcacacattcaacatttattgaggagctgccttgtgctatatacggatggtatggtggtagggcctgctttcacggacttagatttaagcaggggagaagtctagtaggaaacatatacctgagtgtctcatcatatgctgacatagtgcttggaagaaaaggaacagagttttttgtgagtctttaacaaaacaaacaaaaacaaaacaccccacaaaactcctttcctcaattagtgggtccagaaggacttctctgaggtgatagtagagaagctatctaaaggaggtaggaattaaataggcctaggaagatagaagcgttccagatagatggcatgttacaaaggctctgtagcaggagaaagcttggcgcattaccgacactgaaagaagctagtatgttataaaaaatttttaaagggcaagcagagactgtgattataacttttaaacacagaaaagacagtatgactagattgcgtcagtgaggtggagatagtggcgctagataaagtcggaaaggtaagcaacattcatacagtatgcaactcactgctgggctgagctgggctgggatgggatactgagttcgcatctgcttttgtcccaacttccctccccgagggtcagcagcacaaccaagcgagatcaacacaactagtgtgtggtggctaagtgcaccacagcggcgatacggctagaagaaactaagagaccaacattgtaccactgaggcactaaagacgcgtccgcagtgcccatgcctaaggactggaactcaagggcagcctaagggaaaaacagaggggagatggcatgccgcttcctttaccgcgccattctcgctgctcttcatcagacagccggcaagcgacgaaaagatgtagccgtggcgggtgtaggtgccgctgcccgggctgccctcctccaagttacacagacgttcgcctgcagaaaaaatgctgcatcggtcacgggcccccagaagctgtaggccgtttagccttcttgcttcagcccctatccaggactctgtacgggaagcgctcacttaccggggatgcagtatctcacaggtggcgccatgattgccgctgtcccaaaaccaggatgaaaacgaagtcgatttctcattggccaaacccaggcacagttccgcagtaagacacgtgtcaattggtactctttatccttgcgagtaaactccatttcccaggttaccccgggacaaatccgggggcggaacttcagaggtccacgctggcgcctgcgcgtgtggttgaggatgggctggcggcgggtccgggtccgctgcctggcgctgcgggcggcgggccatggtggtttggattgagccgggcccggccggggcgccgagtcggagggggtggcagtgagcggcggcagaggctacggggctcggtttggctgactggggagtcggcaggcggcaggtaagggcgaagcctcggcccttgctccccatcctagtccctttttctgggtagggcactgccctggggccttgtcttgagtgcgggttcctgctctctcctcgccccgccctgcggggccgtgccctcctcagcccgagcgcaccttccgagcaatcgttacgctcagagcaggagggaaggaggtcaagcgacccaactcgtctgtttcacagatatggaacctcagattcagagacagggtttgacttgtccaaaatgatcaagatagttaagatagagcccaaactggaacccacggtttttgacttccagtccatcgcagtttcacctcgcggctgtcattgagaaataaaaccttttcccggtttttttgttttgtttttgaggagtctcgctctgtcgccaggctggagtgcagtggagcgatctctgttcactgcaacctccgcctcccggcatcaagcgattctcctgcctcagcctcccgcgcagctgggacttacaggcgcgcgccaccacgcccagctaatttttgtagttttagtagtgacggggtttcaccatgttagccaggatggtcttgatctcttgatccgcccgcctcggccttccaaagtgcagggagtacaggcatgagccactgcctccggccttttcccggttttttaaactgcagcttccagtcctgcggtccgatcctcttcgcggcccctcatccccacttcagtaagctttctctggttgaaaaagccgaactctggttgtgtgggcccgtcatcaaaagataagcagccccaaaataaagttgttactctttttcttctcagcgtgttagcccagaagggaggtctgcacatgaataaaatgctactctttattgatgttgggtatctcctacttgagattgcaaacatcctgagagcagcgtctttgtccagatgacattcgccacgactttgatctcagttcacctgacttctgatggctttgccgtctgtccttccctgtcccctcagtcgactttcccattgggaaacagatgtgacttaaagccatgggaagaggggagtgttgtggccagcaatctcctccagtctggtggcagatgaccagtatggcctgtgactattactgaaggatcagagtactcgggcttgtgcttggggtggtagtaaagctgcgctttgctctgtttcctcccgttcactgagattagccccttctcccctacacacatctttttgaattttgctttacttctatttcttgagatgaaaagtctgggccaggtgcggtggctcacgcctgcaatcccagcactttgggaggctgaggcaagcacatcacctgaggtcgggagtttgagaccagcctgaccaacatggagaaacccggtctctactaaaaaaatacaaaattagccaggcgtggtggcacatgcctggaatcccagccactcaggaggctgaggcaggagaattgcttgaacccaggaggcggaggttgtggtgagcccagattgtgccattgcactccagcctgggcaacaagagtgaaactccatctcaaaaaaaaaaaaaaagaaaagtctgtgtgttcagttgcggcccacttactacatatgtaattttcctggcatcccataccccattagct

SEQ ID NO: 913626 - DNA, 4001 bp, Homo sapiens
taatataaggtgggtctgcattgctcaacagaaagtcttccggttcattaaaactgtacatcattggtaccataaatatccaacaaatatcaacttggccatgaattctaatcagctacctataatactaccaaaaatatcttaatctggatgtggctatacactgaaaattttggtttttgctggttggttatgggctttggtttagtggtgctagaaaaaaacatagcagtttttgctgtgacagaggatatggtaaaactctctgtccaatttcagaatgcagacgacagacccaagcttcagtcatttcatataaacctgcagggtgtcaaatgaaactattttttaaatgatgttttaaccctatctttgctggttggctgtgttcttgctaaggaggcttcttagattctgtgaagcaagccagaccaaaaaataatttgttaaacggatgtggaaaaatgatttaaaaaatcagaatactttagtgatggatccccaaagacttctcagttttttaagtctggtcctaagctacttggctaggaaatgaccaaaaatggtcaagagatatctttggagtgtaccttttagaaaacctttcctctacactgcatctgcaaactgggattaccgggaactttgaaataattgtacagctccatctaatcagaatactcaacaattaaaattcactgatgccaaaaatggaaagaaaataagtaaataactcttaagagcagtggcaccattttttttaaataacttcctcctcctgccttcaactctcagaagattatcacaaaaacatccatattatgaatagttttataggtcagttcccttccgtaccactaggcatacactgatgatcatttccaaatttttccagactgctttgatatcatgtgattcattttaagtagaggcagttttgtgaattccctagccaaactttttagattgtggattttcatataaataaattgacagaccggtgggggtggagggggaaatagaaaaaggaaaaaaatgtttttgtaaactatcttactcctaatctgttattgagtgagccatttttggctctaaggcaccctagcccgttaattcaaggttaccttcggtcattgccatggctccagtgcttattatcattgcctcatccacatcttttgagaacactctgagaatctacacggctttaacacacttcttcgcactagtgagaacgcccgcaatgccttattcagtaaggttaaatgagtttgtttgctgaaacattcgccacatgatcccaacgctcctccagctccatcccgtctataatcgcagagcgaacactcactcaccttgggcgtgtcaataattgatggtctggggatggaagcgtgaaacaccactgcttcacagtccgccccatcatccagggacccgggcacatcttcaggcgtctccgcgggctgggccgcagtgcggtgacttgaattccgattcgcactgccatttctctctgcatgggtgctcgaatcttgccttttctctggagctccttctgcgcttgggtgtcttggctgtctgcctgctttggccacaggctgcacacggacggtggaatgagtatcagccacgccggactgattgaaggaagcactctccctcgtattcccaaaacaggcgagcagagctgagcacggaaatggatgcatgcttctagagggagacttcagtcttttggtgagtcttgctttccacgtggacatgacttgcagtgaatcattgcaaagttcaaacggggcaaggaaattttccaggggtccacatcacctccactttgcttataggaactctttccaattgcccgaagagaagaacttgctagtggttgcccctaaatagaagttgggatggcaaggccaccttccctgagagtcacttagccgctggggcccctttgaaagtgtccatcctgggcaatttcgcgctcttccttctgtgatgctgtcagtggctaaagaaagctgttggggaggcatgtgagtggctccggttacagttcctaggcagggcagacgcttcagggtagggtagtgccaagtcaatagacaattgcttcaggttacctaggaggcataaagataatgtagcctgatagcatctgccataatagcgtcagcctgcgtatcaataacatcataacagcagcaaaaccttctttggttaccccccttcaaatatttattcccccaaacaaaacaaaaacgacccagttgtccatcacaaatgaagacccctagaagggccacgaccctagcagctgtttcattattaaaataggaggtagactcaatctttcgcctggagagatgcggtgtgatgtgttttctgaatctttctggacttttcgggatctttccggaatcttcccggaatcttccccccaccctcaaaacaagtttcctggtttcaggatccacattgccttttctgataactataaataggtctttggtaatttgatttttttttttttactagctaggctaagttcttgattagttttcaacaataccaaaaagaaaaaagagagccctacattaacaattatccttatgtattatgttattatgtgtggaggtattatgtacatgtgaagtattctacctatatggtatatatcacctactttcagaaagtaactcctttttgaacatagatcttctgtttctcaacacattaatatgtgaatggtgaaaaataataaattataaacatattctaagacaattcagaatcaagatttttccttagccaactgtctgctaggaatgttatagaaatgtaatactgtaatgcttttaccgttaatagtgattttagggtcaagatttctgggcatgttacccactcttaattaatttgtttgctctctcttttaatttaatgtcaagatgtgctctttggcccagacaggtggtagttattatattatggcactgattcccgttttacagaggcagaaaccaattctttgaaatttcatgtgactaaggcaagtttatgccactaagaagggcttgttgggtgcccgagatccctgttctcctatctgtcctctgagtctcattctatctaacaatcattttatagatgtaatggccatacgggaaatattgttctaaatggacagtcatattcataatacaaaaaggcagatatggctttagaatgagtggatatggcatcaaatgcacattttattttagtctctactgaaagttagaatatagaaagcttccatttatttagaggttaccgtgtggcaggccccgtgctatccaagctgtttctggcttcccagggttgtgagctcattcttttttcattgtgtcccaagtgcaagctgtccaaattccccacccataagaaatcagggggttcaggtttctaccagggtcccccctcccagatattcctggagacccctcggaactgcactttgtctcccatttgacttggttgctacagtccactcgggtcgggtcgtgccatgctgtgcccctccaagcacacgtatagtaaatcggggctgtgatgctgcataagacatttttgaaggcttggaggtaacaggaagggatttaagaaaagaaaaatgcactcttacacctggtttcattcactcattcatatattcattcaattatgtgtcaagccccttttggaacagagagtcagcagttcacagtgcagcttgcgagcggccacattcaggagaccgctgaggaagaaagctcagagccactttctaggtctgcggaggccctgggcttgcatccgggctctgaggaccacctctcctcgctcagtgggtgtgctcagaggcacgcatgaactcatcggagttccagcactggcccgctaagaacagtagactttctgattagtgtgttgctaagtctgacctagaataacactcagtaacaggccatggttat

SEQ ID NO: 913627 - DNA, 4001 bp, Homo sapiens
aaaagtatgtaatgacaaaagcgtccagtggccaaatctgtggctaaagaacgattttattttaaaagaacatacacactcaacacaactcacgattctcaggaaaacccttattttactttctcagtgcaaggtctttaagaagccagcatgcacccggttgtacaatcactgctattccttgttccacaaacaagaattcctttccatcacatatttcttatgaatctcagaacacaatgttacctttaaaatatttttaaagcttaaagatttcatttaaagacaaaagtcaatcccaaatgactcctgaattcaaaaatatagtccatgaaacttttttgtcagcccattcttccaaataaagtggaaatttacattgtttttcctgtttctttcttctcccttctgtacaggtggttatatgcaaacctataagaaaatatatttcaaaacaacttgtccgtattaatcttggatgtaagtggcataccaatattgtagaattatcatgattaaatatattttaggctgatgtggctggtcagtaatgctctcatttaccaccccaccctctttcccacacacacacacacacacacacacacacacaaacacactatggctgccaagtcataaattaagcaaagatgccttcatccttagggtgtgtttgggtggtgagcatatgagtggtttttttctatatattttcaattttttaattaatatataaaattttctcatgaaaagttttaaaccggaaaccagcagcgctaagaaatcttctctggacaggtagcccagacactatttcaacttaaagccacttggatagatagaatttccaaagtgatgttaggaaaacgtggctggaggagaaaaccgatgtacttgatagcaagaaatcgcaagtttaagaatgtgaagtccaacagccctcattccgtttttctttgacccctcaaaatcgcacccatcctatcaagtaactttgctccgctgtcattgcctaaaatctttgggagggaggaaggaagcaggcttggtaccttgcagcagagaatgaaatctacagtttaccctctcaacctaattcctcttgcagatttcacaagtggtggacaccatcccctacataacactaacacttggccatacccatcagtgccacctccaagggacctaaagatgcctgggggaaattacggaacccaaattgaattaggactccttgtgtgtgttacaccaccccatatgctgggttcactggaacaggggagaaagagaagaggcaaaagaggaaaagttacttgcagactggagtcagtgtcacggccaccgtcggcgcggggcaaacctccccggccccggctttgtctgcctggcgggggctggcgtcggggcgcgacccggtccacgccgggcgccgcggggcgaggggcgccgagggcgggcatacggcgcacacggccaggcagtgcacaccgcgccgggtagggctcccccgcggcagcgccgagaaggcaacaatgagccgggcggccgctgggccccttccccgcagcggcccccgcctccgcggcgccccccgcacggccccgccgcgtgcccgccctgagccccggcacctcccgggcgccgcgcggggtgacccgtggtccccgtacgcccgctgccctcccgcgcacggggaccccccacccgcccggccgcccgcccgccgagagggtccccggagccggggtcgggcagggccgccgcccgcctccccgcgcccctcgtctttgtgtggaaagtaagtgcgggaggcgaacctacctcggcgcgcgcacaaaggcgcgcggctccctcccagctcgctcccggcgcccgcggcggcgcccagcggcccgactgctcggcggcggcccgaggcggcgcgagggcggctccgggggcggcggcccggcccgcaagccagtccggcgcagggcggctctcgctccccgcggccccgcgcgtccgaattaagcggcggggcggggaggggcggggcggcaaggccacgcccccaacgcgccccgccctggcagccccgcccccgccttccttccacggctcgcgcgcgtcgggcggagatccagaaaggccgggcatccgcgccgggaggggcaccagccggggctgcagcgctcggcctccgggactcggtgggagcgagggctggagggaaagcgcggcggccccggatgaccgggaaagtgggaaggcggccgcgtgggtcacagccacaaagctccggggcgctcactctccttttttctcactccctcgttccctcgctctctccctctacctctctgtctctctcacacacacattctctcttcttttatctctttctctctcccttaatctctttctctctcattgtctctctttctctcattctctccctcattctcattctctttcattctttctctctcctctgtctcattctttcattctctttctctctctgtgctcacccccatctctctctcttattctgtctcacacacaaagtacccaagagcgtctcgctcctgggtgtccgggctccgtctccccggcaagtctgcgatgctaagaggccgtccccatagaaatcctgccagttcctcttggaagaaaacgcagacagaatcagggaggaaaaggagacatttgttgtaattgtacaaatttacggtcaagccaggacccaaaacccggtgacctggagattcacccattttcctcccctcccttcatcaaagggtaattggaaatttaaatatgcaagaaagaaagggtttattccgcctctttgctctctgatctccttttcttcagctctcttacaagtgcttttctggccaaccctaaggctctgagattacaatctacttgaatcacagcaggtacaaaatcagggactgaaacagttatcggtttcagcgtagcaaaaaggacaacaggttcgtggattttagatcaaaagctttttaactgtcttggcaacagatgactaagggcttatttatggggaaatttttctgactaagacagtttgggtcatagtcatactgaaaagtcacatcagttacggattttggtaaacaaattacttattccaaagatacctatcacacaccatgctctaagccacagcctgccagccaagtaagggtctggccatccctgggtccctggaacccactgaggggtggaatccctgccagagaacttaaagaaactccttcccagctgaggaagctgaattccatgaactttatacatggtgtttcctatgattcttccttctctctcgtccttgagttgtgtttctgttcttaacaatggctccaccagtcaccaaaccaaaacctaggatccagcctaaactctctccctccccacattggcatcaactccaaggtttgtgcagtgtgcacaattcctggctatctccctccccctctgctggcaccgccactgttgcctttgggctcagtcacaatatggtggcaggggtttcctaactggccccagcctctggtctaacacatgcttttcctctcaactttctggggtgcaagtgaactttccaggtgcaagatgctcagtttcctcctctgcttgaaacactttagtggatgcctgcttcctgctacatgatcaagtcgaagctccccagcaaacatccaaggctccactcagccagagtgccgtatttgctaagtggccctgctctgtgatgaagactggatgaaataatgaatatatggccttgtcatgctcttccacgggcttcccctctgcctagcagaccttcaccaatccccaagagctcctctcctctctgagaatcagtcttctctggaaaccctttcctgacctgctcacactaaatggatcttttctgcccctcccatacccgacatggtattggcgttattgcactgtatcgtaaatatgtgcctctgtgagcccag

SEQ ID NO: 913628 - DNA, 4001 bp, Homo sapiens
aatgaaacgacattgaaaacgtacctaccaaaaaaatgtggtgggtgtgtgtgtgtgtgtgtgtgtgtgtgtgtgtgtgtgatgtttatctaggtcaacattagatttttacccaatatctgtgtacaccaaggcccagcagggcagggtggttacacagtgtatgtagcaagacaagccatagccactgtgagaatgactgcccaagaggaaggagagcattaaatctccttagacaagtaccgacaggtactggaaatgctgtttccacagtggccacccaagacattctctccctaatcctaaccaaggaataagaagcaaattaaaggccaggcacagtggctgacgcctataatcccagcactttgggaggctgaggtgggcgtatcgcttgtggtcaggagttcaagaccagcctggccaacatggtgaaacctcatctctactaaaaatacaaaaatcagctgggcatggtggcgagttcctgtaatcccagctacttgggaggctgaggcagaagaatcgcttgaacctgggaggcagaggttgcagtgggctaagactgcaccactgcactccagcctggatgacagagtgagactccatctcaaaaaaaaaagaagtaaattaaactcagcacatatcagtgttttgttgtggtcatgtgttcatttttttttttttttaatccacaactgtgaaggaggaggtgatggcaatgagcagaatgctttcaaatcaagtgctattttgctaaaatcaaatatgtcttagctcaggctgctataacaagctgccataggctgggggccttaaacaacacttgtctatttctcacaattctagaggctgggaagtccaagatcaaggtgccagcagatcgggtgtctggtgagggctcccttcctgactggcacacagccaccttctggctgtgtcctcacatggtggacagcagggagagtgagaaaaaagctctcctgtctcttctcctggaagcactaatcccattctcaggactccccaaggcccctcctcctaaaaccataacataaggggttcaaatttcaacatatgcatttttgggggtgacacacacattcagatcataacaagtacttcaaaatatattatcaggcctacaatcttcactagatagtcaaattttactggaaatagatatcttcagagaaaatgcataattatcaggatcctagacacttaatagagcatggataaaataatgcagataaaagttagtgaatccaaaaagagttcttaaaaagctaagtaaaaggcgactcatccagagtttgacagacatggttggcatctgaagaaattttaggaaaaaaaaatagttcacaactacacaagacacagcctattacaaagctctcttcctggcaaagacacactattcaataccactcactataacaacatataatttttatttagtctcatacaagtctgctattgtgttaacaagtctaagttcacacaacattttctagagaaggactacattattcaacagccatagaaaagtcccagtgtttattcttacctcagatatctattttcttgtttatgttttaatcatgggcattcaaggtggtgaaaaatcatcctttagcaagagaagagttagcccaggaagtcatccccatccatgtcacccatcaaggcctaagtgacgaacggttacagagactgacctaacctcacctcagtagatataggcaggctccttaagcccaaggtagcaaataaaaagatcgcagtaagaatgcaccttctgactgtggtagttccttagagcggtgaagaaaagcacccaaaacaagaattaaccatccccacaaagaactctctttctggatatcaaaagagccacagttcaagttcaaagagaaacactctagcaacttctgaaagcaggaactgtatgcaactgaatgacctcatccggcacagaagccagagcaaacaatgaaaaacaaaccgtaccaactctggtaccagttactgaccttccagaccaagagaacgtgctggcagcactggtgaaatgtacttgtctgtacaaaaatcagctcctctacttgtaagcaaatatgcacgcagactctccagccctgggtgggtaccaggttgcaacactcacacaacctgactgcaggaagcatgcgtgagtcaacctccaattggaggaggacaagttctcgcacttcttagagcatcaccacaacacctacagcatggaggcctgagaccaatcagaatggccctcctgaggctgggattcatggcatcacagcccactttataaaatgtgctaagaattttctatggggaagggttatgtttaacatggcggaagacaggtgcggtggtgtgcacccgtggtcctagctactccagaggatcgcttgtacccaggagtttgaggctgtagtgcactatgatcacatctgtgaagagccactgcatttcaacctgggtaacacagagaccccatctcttcaaaaaaaaaaaaaaatttatatatatatatatatatattagagtgtgtgtgtatatatgttatgtataggtgtatgtagatatacatatatattagattggaaaaaaacgacaagcagaagggacttgagttccagtcccaactctgcccaactatatctgtatgatctctgggctgaaggatcctcccctctaaaacaaggagtttccttccagttctagattgttattactatattattaggaaatagcaaatatataccaaagcagcaagagtggaattaccattgcagaggcacatatagacgcccacttggtgacatctggcccacaagtacatttcaactcctgcaccaagcccagtgcatggcagacaccagctacctcccagtgccgcagccctgctcagtcagtgcactgtggagagaaacaggcttggtggaaagctctgaaaactgtctgctatggtttcactctgtcccccaaagttcatgttgaaacttaatcctcaatgcaacagtgatgaggccataagggctccacctcatgaatggattaatgctgttaatgtggaagtgggatataaaatggaagacttcggcccccttcctcttttgcccttccaccttccaccatgggatgatgcagcaagaaggccctcaccagatgcaggccctcgaccttggacttcccagtctccagaactataagaaacacatttttggctgggtgtggtggttcacacctgtaatcccagcactttgggaggccaaggcaggaggatcacttgaggtcaggagctcaagatcagcctagacaaccaacatggtgaaaccccatctctattaaaaatacaaaaaaaaaaaaaaaaaattagcaggacatggtggaatatgcctgtagtcccggctacttgggaggcagaggcaggagaatcacatggaccccagaggcagaggttgcagtaagctgcatcaccccactgcactccagcctgggcaactccatctcaaaataaataaataagtaaataagtttcttttctttgtaaattacccagtctgtggtattccactacggcagcatagaacagactacaacagcatctataaacaatgctgtttgactcacacttgattcacttggattccttccaaatgatcattgtggatacatgatataaaaacaaacaaacaaaaaaaaaaaaccaccctagggcccaggagtttatctgctctttctctcataatctacccttcccatgacacagggaatattttggtgctctcaacatgaaatgccacaagaccagggtagacacttaagggttcagcttccaagctctgcttataaaaaatgcaaaatctcagttcagtaagaacagggtttagtacaatacacaaacactactgaatatgcatgccaccctgagaaaaaatcttgaattagtatgtaataaatagataaca

SEQ ID NO: 913629 - DNA, 4001 bp, Homo sapiens
ccactgtgagaatgactgcccaagaggaaggagagcattaaatctccttagacaagtaccgacaggtactggaaatgctgtttccacagtggccacccaagacattctctccctaatcctaaccaaggaataagaagcaaattaaaggccaggcacagtggctgacgcctataatcccagcactttgggaggctgaggtgggcgtatcgcttgtggtcaggagttcaagaccagcctggccaacatggtgaaacctcatctctactaaaaatacaaaaatcagctgggcatggtggcgagttcctgtaatcccagctacttgggaggctgaggcagaagaatcgcttgaacctgggaggcagaggttgcagtgggctaagactgcaccactgcactccagcctggatgacagagtgagactccatctcaaaaaaaaaagaagtaaattaaactcagcacatatcagtgttttgttgtggtcatgtgttcatttttttttttttttaatccacaactgtgaaggaggaggtgatggcaatgagcagaatgctttcaaatcaagtgctattttgctaaaatcaaatatgtcttagctcaggctgctataacaagctgccataggctgggggccttaaacaacacttgtctatttctcacaattctagaggctgggaagtccaagatcaaggtgccagcagatcgggtgtctggtgagggctcccttcctgactggcacacagccaccttctggctgtgtcctcacatggtggacagcagggagagtgagaaaaaagctctcctgtctcttctcctggaagcactaatcccattctcaggactccccaaggcccctcctcctaaaaccataacataaggggttcaaatttcaacatatgcatttttgggggtgacacacacattcagatcataacaagtacttcaaaatatattatcaggcctacaatcttcactagatagtcaaattttactggaaatagatatcttcagagaaaatgcataattatcaggatcctagacacttaatagagcatggataaaataatgcagataaaagttagtgaatccaaaaagagttcttaaaaagctaagtaaaaggcgactcatccagagtttgacagacatggttggcatctgaagaaattttaggaaaaaaaaatagttcacaactacacaagacacagcctattacaaagctctcttcctggcaaagacacactattcaataccactcactataacaacatataatttttatttagtctcatacaagtctgctattgtgttaacaagtctaagttcacacaacattttctagagaaggactacattattcaacagccatagaaaagtcccagtgtttattcttacctcagatatctattttcttgtttatgttttaatcatgggcattcaaggtggtgaaaaatcatcctttagcaagagaagagttagcccaggaagtcatccccatccatgtcacccatcaaggcctaagtgacgaacggttacagagactgacctaacctcacctcagtagatataggcaggctccttaagcccaaggtagcaaataaaaagatcgcagtaagaatgcaccttctgactgtggtagttccttagagcggtgaagaaaagcacccaaaacaagaattaaccatccccacaaagaactctctttctggatatcaaaagagccacagttcaagttcaaagagaaacactctagcaacttctgaaagcaggaactgtatgcaactgaatgacctcatccggcacagaagccagagcaaacaatgaaaaacaaaccgtaccaactctggtaccagttactgaccttccagaccaagagaacgtgctggcagcactggtgaaatgtacttgtctgtacaaaaatcagctcctctacttgtaagcaaatatgcacgcagactctccagccctgggtgggtaccaggttgcaacactcacacaacctgactgcaggaagcatgcgtgagtcaacctccaattggaggaggacaagttctcgcacttcttagagcatcaccacaacacctacagcatggaggcctgagaccaatcagaatggccctcctgaggctgggattcatggcatcacagcccactttataaaatgtgctaagaattttctatggggaagggttatgtttaacatggcggaagacaggtgcggtggtgtgcacccgtggtcctagctactccagaggatcgcttgtacccaggagtttgaggctgtagtgcactatgatcacatctgtgaagagccactgcatttcaacctgggtaacacagagaccccatctcttcaaaaaaaaaaaaaaatttatatatatatatatatatattagagtgtgtgtgtatatatgttatgtataggtgtatgtagatatacatatatattagattggaaaaaaacgacaagcagaagggacttgagttccagtcccaactctgcccaactatatctgtatgatctctgggctgaaggatcctcccctctaaaacaaggagtttccttccagttctagattgttattactatattattaggaaatagcaaatatataccaaagcagcaagagtggaattaccattgcagaggcacatatagacgcccacttggtgacatctggcccacaagtacatttcaactcctgcaccaagcccagtgcatggcagacaccagctacctcccagtgccgcagccctgctcagtcagtgcactgtggagagaaacaggcttggtggaaagctctgaaaactgtctgctatggtttcactctgtcccccaaagttcatgttgaaacttaatcctcaatgcaacagtgatgaggccataagggctccacctcatgaatggattaatgctgttaatgtggaagtgggatataaaatggaagacttcggcccccttcctcttttgcccttccaccttccaccatgggatgatgcagcaagaaggccctcaccagatgcaggccctcgaccttggacttcccagtctccagaactataagaaacacatttttggctgggtgtggtggttcacacctgtaatcccagcactttgggaggccaaggcaggaggatcacttgaggtcaggagctcaagatcagcctagacaaccaacatggtgaaaccccatctctattaaaaatacaaaaaaaaaaaaaaaaaattagcaggacatggtggaatatgcctgtagtcccggctacttgggaggcagaggcaggagaatcacatggaccccagaggcagaggttgcagtaagctgcatcaccccactgcactccagcctgggcaactccatctcaaaataaataaataagtaaataagtttcttttctttgtaaattacccagtctgtggtattccactacggcagcatagaacagactacaacagcatctataaacaatgctgtttgactcacacttgattcacttggattccttccaaatgatcattgtggatacatgatataaaaacaaacaaacaaaaaaaaaaaaccaccctagggcccaggagtttatctgctctttctctcataatctacccttcccatgacacagggaatattttggtgctctcaacatgaaatgccacaagaccagggtagacacttaagggttcagcttccaagctctgcttataaaaaatgcaaaatctcagttcagtaagaacagggtttagtacaatacacaaacactactgaatatgcatgccaccctgagaaaaaatcttgaattagtatgtaataaatagataacaaggtgatattcctcaggcatcctgacacagttattcccaactgaatctgtaagagtgaactgttactctttacattctgtaccctgagacatcacaatatgtatgcacggtggatataatctatccaatatctcaaaactgaaccctagttttgttgttgttttaacctacacattattaacaa

SEQ ID NO: 913630 - DNA, 4001 bp, Homo sapiens
ttgtggcaatgactagttttaaacagtcctagtcaatgatgtgttatacctatgaagcttttggtatgttctcaataggctccttagatttttatattagccaaatggcataccaattatctctcagtgccttttaaaataaatcactgtcactcctctgaaagtaaaaacatgatcttatgcaatcagaactccttggggagtgtccaaagacaaggcaccaggctctccccagcatttaaccacgaaacctctacagaaaaaaaaaaaaaaaaaaaaaaaaaagtccacgtgaaatctggagctaagtgtctccattttgaacctgccgtgcctgtgactgaccgaggatttggccacaccaggctcctgagaatcggggccagaaagcacttagtactttaagcacagcaaagggaggagagcagtacctgtgcacctggagcaggaagtccaggcctcatcttcggcctgcagatgcacactttggcacacctctctccccttctctcaggcctttagaaaagcaacattgcagcacaggttaccaagcaatcttataaacagaatgtgggtccaaatgagtattttacattgcttcttctaaagtcaatcctgtttttttttttaagtgactccacttaagtctgctcaaaactggacactaaaggagcagcacagcaaaagagagaaacaaaagaatgtggaaaacaagagggcctaggaagcactgtaaaccttatccctccctcaccaagtcattgtgatagtggcaggacttggaagccaaaagcaaaacatttatttgctttttagggaattttagcaaacagctccccagttagttaagccttctacatcaaactcataacattttttaaatgtagttgaggatacaactttacacatgcctttttcctgaaaagatgtttagagtggcttctacaaaggtcccagaagtaaacatcatgaattagcctagagaaagaatgctagatgaagtacatattcatatatatatatgtatatataaattacatacagtattagcaaaatacactacctgttaatttttaacaaatatagtataatattaggaaaacattaaggaagggatgtcaaaaattaaaactatagcatataaatatctttaaaaaaatactgtgcttgctggtacgctccttcattcacactccttcattccatgtttgaagggtgttagttgccctaatcaacagctttaaccataggactaggtgactcattcgtcccatagtcacatctctgtagtcagaagacaaacatgacaaagggcatgcacaaaaagtttactctgatatgccttaaaaatctgtagacaagagagggccaagataagtttagcctgtttaccacatgctggaattcagctcatttcacatctatcttctattgctgtaaatgtatatagtgtgcactccatgaaaactgacaccaatgttggcaaaatacaacaaagcttcctaacacatcaaatggatttttaaaaatctgagctccaagaacacatatcttggagcactgagctcctgcaagcaatcagctggttttaatttctctcccgcagctgctaaaatgctggtttcaacctgtaaagatttctgggccccaccagtcagcacgtctcacggtcttcacagccccagattccgggagacaatgcatctaaaacgaacagcggctgggaacggtggaggataccttcacgatagttgcttccagagaaaggcatgcaagtctaattttaatggtaagaatcacttactctgttacagtggtgctgctgaaggaattatcctgaaggctgaaacagaaacaagaaaacatcagccaagtctggccggggagccgtctccctgattgctctccgggagttagagcacatacacaaacatggcattgcaaggcaagtctccgggctcgcccggcacgctcgctctaccttgggctgctgtctgcacatgctcgtaacgacacccccagcaggggcccagcggcacgggcgaaccacaaagcccggcagcccgcgaggctgcggggacagagctgggcggggcgcggcggcggggctgggaccccgggatccagcgaggagcacctggagagttaccacacgaccccgacctcgccagcccaggcgccgcgtttaatcttgggctctttgtgccagccaccccccgaggctggcaatgagaatgccccagtgtttctgccgaagtgctgaaatacccgggagacttgctttcttccacatgtctcctaccaattttacagagctcaccccaaccccccacactcccaccccacccccagggatggaggctcgcagagattcatccatcgttcagaaaaagtcaggagagaacaagaagggggagggggatattgctgctgtttggtgttttattttgtgtgtgtgttttttgttgcctaggaaaaagaataggctctaaagcagggctggctgcatcacacctgatctgtctagagcgctcttatttcagtcccagagaggaagcgcccagccccggactacagagctgtgaatgaacccacgcagggcgagtggagaatttattccaggggttagctggtgattaggacaccgtgcaaggggtggggcttgctatgcctagagcagcccgcttgagctcagctccctagctagcacctttacaaaggatggagagacggaatccgcaaacgctatccctttgaataaaggcagccttgttagggaaaggaaagactgtcagtccccccactggcttctttcccttggggatatttgttctgccctctttgtattgttcatttctcctgccatgttgacctggatatgggatgtagcatctattaaagattcttatttgaatttgaattattttatttgaattttgaaataagattcccatccccctttttaatctttctactcccagaagcagctaggatagtggtttttagtccaaacctatgtaagttaatgagttaacataacaacaaaaaactcataatttttctaattgggcaattaaaaactttaccaaaacttggaaataatggggaagagcatgacctttcaatgtcaaactgagacatcggttaacaagtccacccaggggccagttaattctccagttgtgtttggctttgctcttcactattgattagattccagccacagtgaagttctgtggtcacttgcacattttattcagcctgttcagagaaaaagataatcgcagcgtttatgattttattgcaatataggaagataaccaattttgcatctaaccaaataatcattttgcatctaaccaaactttctttctaaatacctgtaaatccacagatcctcaaaatgcttttggaaccagcttcatcatcttacagttttccccattaataagtgaatagatctctgctgcctgcctatgtttgtatgagagttgtattttaactttttaaatttataccttgaaaaataaaaattgagttttcaaagaaaaacaggtttcattaaggttctttgcaattttgctttcctctctccaaatatttttaaaatcagctaaataaaaacctaatatggtcttagactgaattctatggactaaaataagttcaggaatattaatcctttgtatgtataactatacagtacatatttgttccgaagccacctactatttcatttgagctaggttcaggagtaagagacatcgctgcttcactgtattcattatttagccatttcaaagtgagatctgttctttgtttattcagactgatgaaggtaagtctatattcagccttctgactgacttatggtttcatagattacatggttgttaatttcccatatggttgttaatttccagaaaccccttgtactcattgactatggtgtttattccaagtgttccagtgtggagaaagatcacacttttctcctataa

SEQ ID NO: 913631 - DNA, 4001 bp, Homo sapiens
tgtctccattttgaacctgccgtgcctgtgactgaccgaggatttggccacaccaggctcctgagaatcggggccagaaagcacttagtactttaagcacagcaaagggaggagagcagtacctgtgcacctggagcaggaagtccaggcctcatcttcggcctgcagatgcacactttggcacacctctctccccttctctcaggcctttagaaaagcaacattgcagcacaggttaccaagcaatcttataaacagaatgtgggtccaaatgagtattttacattgcttcttctaaagtcaatcctgtttttttttttaagtgactccacttaagtctgctcaaaactggacactaaaggagcagcacagcaaaagagagaaacaaaagaatgtggaaaacaagagggcctaggaagcactgtaaaccttatccctccctcaccaagtcattgtgatagtggcaggacttggaagccaaaagcaaaacatttatttgctttttagggaattttagcaaacagctccccagttagttaagccttctacatcaaactcataacattttttaaatgtagttgaggatacaactttacacatgcctttttcctgaaaagatgtttagagtggcttctacaaaggtcccagaagtaaacatcatgaattagcctagagaaagaatgctagatgaagtacatattcatatatatatatgtatatataaattacatacagtattagcaaaatacactacctgttaatttttaacaaatatagtataatattaggaaaacattaaggaagggatgtcaaaaattaaaactatagcatataaatatctttaaaaaaatactgtgcttgctggtacgctccttcattcacactccttcattccatgtttgaagggtgttagttgccctaatcaacagctttaaccataggactaggtgactcattcgtcccatagtcacatctctgtagtcagaagacaaacatgacaaagggcatgcacaaaaagtttactctgatatgccttaaaaatctgtagacaagagagggccaagataagtttagcctgtttaccacatgctggaattcagctcatttcacatctatcttctattgctgtaaatgtatatagtgtgcactccatgaaaactgacaccaatgttggcaaaatacaacaaagcttcctaacacatcaaatggatttttaaaaatctgagctccaagaacacatatcttggagcactgagctcctgcaagcaatcagctggttttaatttctctcccgcagctgctaaaatgctggtttcaacctgtaaagatttctgggccccaccagtcagcacgtctcacggtcttcacagccccagattccgggagacaatgcatctaaaacgaacagcggctgggaacggtggaggataccttcacgatagttgcttccagagaaaggcatgcaagtctaattttaatggtaagaatcacttactctgttacagtggtgctgctgaaggaattatcctgaaggctgaaacagaaacaagaaaacatcagccaagtctggccggggagccgtctccctgattgctctccgggagttagagcacatacacaaacatggcattgcaaggcaagtctccgggctcgcccggcacgctcgctctaccttgggctgctgtctgcacatgctcgtaacgacacccccagcaggggcccagcggcacgggcgaaccacaaagcccggcagcccgcgaggctgcggggacagagctgggcggggcgcggcggcggggctgggaccccgggatccagcgaggagcacctggagagttaccacacgaccccgacctcgccagcccaggcgccgcgtttaatcttgggctctttgtgccagccaccccccgaggctggcaatgagaatgccccagtgtttctgccgaagtgctgaaatacccgggagacttgctttcttccacatgtctcctaccaattttacagagctcaccccaaccccccacactcccaccccacccccagggatggaggctcgcagagattcatccatcgttcagaaaaagtcaggagagaacaagaagggggagggggatattgctgctgtttggtgttttattttgtgtgtgtgttttttgttgcctaggaaaaagaataggctctaaagcagggctggctgcatcacacctgatctgtctagagcgctcttatttcagtcccagagaggaagcgcccagccccggactacagagctgtgaatgaacccacgcagggcgagtggagaatttattccaggggttagctggtgattaggacaccgtgcaaggggtggggcttgctatgcctagagcagcccgcttgagctcagctccctagctagcacctttacaaaggatggagagacggaatccgcaaacgctatccctttgaataaaggcagccttgttagggaaaggaaagactgtcagtccccccactggcttctttcccttggggatatttgttctgccctctttgtattgttcatttctcctgccatgttgacctggatatgggatgtagcatctattaaagattcttatttgaatttgaattattttatttgaattttgaaataagattcccatccccctttttaatctttctactcccagaagcagctaggatagtggtttttagtccaaacctatgtaagttaatgagttaacataacaacaaaaaactcataatttttctaattgggcaattaaaaactttaccaaaacttggaaataatggggaagagcatgacctttcaatgtcaaactgagacatcggttaacaagtccacccaggggccagttaattctccagttgtgtttggctttgctcttcactattgattagattccagccacagtgaagttctgtggtcacttgcacattttattcagcctgttcagagaaaaagataatcgcagcgtttatgattttattgcaatataggaagataaccaattttgcatctaaccaaataatcattttgcatctaaccaaactttctttctaaatacctgtaaatccacagatcctcaaaatgcttttggaaccagcttcatcatcttacagttttccccattaataagtgaatagatctctgctgcctgcctatgtttgtatgagagttgtattttaactttttaaatttataccttgaaaaataaaaattgagttttcaaagaaaaacaggtttcattaaggttctttgcaattttgctttcctctctccaaatatttttaaaatcagctaaataaaaacctaatatggtcttagactgaattctatggactaaaataagttcaggaatattaatcctttgtatgtataactatacagtacatatttgttccgaagccacctactatttcatttgagctaggttcaggagtaagagacatcgctgcttcactgtattcattatttagccatttcaaagtgagatctgttctttgtttattcagactgatgaaggtaagtctatattcagccttctgactgacttatggtttcatagattacatggttgttaatttcccatatggttgttaatttccagaaaccccttgtactcattgactatggtgtttattccaagtgttccagtgtggagaaagatcacacttttctcctataaatactcccagtgatccacttgtaatggaaatgttcaatgcttttaatttgaaataggacttggacatttaattaagaacaaccttaattaaatggttgattttcttatatactgccaaatactgtttttttttcattctatgaaatgaattgggccctttgaaaataaaatgaaataacaaatgtacccaataaatgcaagtattcaataatgtccaaggaaaagaaataaaaattctcagcaactcgtgaataggaaggaccaaaattaggttttaggcagtacccacatacaatgaaaacaactggt

SEQ ID NO: 913632 - DNA, 4001 bp, Homo sapiens
gccagaaacccaagaatgattcaaaatagcatgcttgcaattatcatgtatgtgcataattaatatttaataaattaaatagttaataattaatattaatagttaatatatttatggttgctaaaattacatagctaaatgaaaggaaaagttaatatttaattaataaatttatggttgctaaaattatatagctccatgaaggaaaaaaaattggaatttggggttaaagcccaagctcaactcctgactttttggctatataatcttaaaatatgtaacatttctgatataatttcatcttctgaaagactgaagataatcatacccactttacagagttgttaagatcaaaaagtgaagtgagctgggcatggtggctcacgccaacactttgggaggccaaagtgggagaaccgcttgagtccaggagtttgagaccagcctgggcaacatagtgggaccctgtctctaccaaaaaaaaatttttttttaattagccagttgtggtggtgtgcacctgtagtctcagctactcaagaggctacattgtgaggatcacctgagcccataggtggaggctgcagtgagcaaggattgcactactgccctccagcctggacaactgagcaagaccctgtctccaaaaaaaaaaaaaaagtgaaggcccttttggaagtgtaaagcattaataaatgtatgacactattattactttctaaattattatacaccacttcggtcagggtagggggcagctctttttatttttttattatttatttatttattttgagacggagtttcactcttgtcacccagactggagtgcgatggcgtgacctctgctcactgcaacctctgcctcccgggttcaagtgattctcctgcctcatcctcccaagtagctgggtttacaggcccccgcctccatgcccggccatttttttttttttttttgcatttttagtagagatggggtttcgccatgttggccaggctggtctcgaactcctggcctcaagtgatccgcccgcctcagcctcccaaagtgctgggattacaagcgtgagccaccacggccggccgtgagggtggatctttttaaagccagaaatatttgctctttaaagtctcaaaagcaaaactgatctttatggattctggtgcttaattgcagaggtggggaggcagtatgtgtgatggttatgaccacaggcttcggaatcagatcgacatcaggtttgtacctctcagctctaccaccttcaagctgtgtgatctttggcatgctacaatctttaattctgggatctttatctgtagaatgtgcaaaataatgttcccaatctgatatcattgataggaatgagcaaatgtatgtaaatagctttgcacagtgtcaagtgagcactttcctggagccctcagttagctattaataacttctcgagctaccatggccattaacaatgggacctgaagcactgcggatgctacaaatgcttcagcagacccagtgcttgatttcaggaatttcagacgaagggcgacacgccctcagctggagatggaggaagaaggggcagggtccagcagggctgagaggagagaattccgaagaaaaatctctccccagccctgggaaaggaaaggaacgaaggactggtcaaggagggtccccagagcgcccgccgcccgccccggctggggtggctgagcagtccactcacagctccaagctctgtggcaccgccttccgagtgtatctggagatcatcctcctcctcctcctcctcctcctcctcctcagccgcggccggggcaggcacgccagggtgggggcctccgggcctggccctcccgccggctccggcccggcccctcccgccacctaccggccccgtctcgccccgtcacctagactccgagcagccacctccccagggtccccacctctccagtcctccgacctccctgctttgccgcgggggcggaagtgacgaaggcccccggacactcgcaaaatgctcccgccgacgcacagcagtgacgacacacaaggtttcggggactgagtgggtttcagactttctctcaggatttccgctggcttcaggttccggtcaggcgtcgggacagagcctgatccaggcttcggcggccggtggcagctctcgatcagctctcgcagtcggagaggcggctaaggaaaggtgccacagcagagacgcgaaggagaggccctagaaccgtaagagaaattggcttcattttgttagatggcaggagggagcctagactggggaaagagcactagactccaagtcaagcccctgctgcttggtcgcttctttttctgtactctgggttttctcatatgtacagtgaggtattagcctgagtgatcatagagtcccttccagttctgacaccaaattctgcatgatgacgtgtgtttggcgttatggggtggatgggtaaaattactgtctgtccctctgggttgaaaggcaaaatgatgatttggttagactgtggtgagtgggtgtctggataagaagaagcaggttccttacgagtctcttagaaagctgagtaagattggaatcatggagttagggtggtccatccaccgccatttctttctttaccaagcatcacctggcagcaagaataaactagtactcttatttaggaaaacccttagaaaattaagagataaggaaaacccttagaaaattaagaggtatcaatgcaacctccatcaaaataccagtgacattcttcacagtcatagaaaaaagatcctaaaatttatatggaaccacaaaagagccagaatagccaaagctatcctgagcaaaaagaacaaaactggaagcatcacattacccgacttcagattatacaacagagttatagtaaccaaaacagcatggcactggcataaaaacaggaacagaatagagaacccagaaacaaatccatatgtctgcagtgaattcattttcagcaaaggtaccaaaaacatacattggggaaaagacagtctcttcaataaatgatactgggaaaactgatacccgtatgcagaagaatgaaaccagacccactacctcccaccatatacaaaaatcaagtcaaaatggattagagacttaaatctaagccctcaaactatgaaactactaaaaggaaatattggggaaactctctaggacattagagtgggcaaagatttcctgagtaatacctcacaaacagaggcagccaaaacaaaaatggacaaatgggagcacatcaagttaaaaagcttctgcacagcaaaggaaacaatcaacaaagtggagagagaacccacagaatgggagaaaatatttgcaaactacccatctgacaagggattaataaccaaaatatataaggagttcaaacaactctctaggaagcagtctaataattgattaagaattggataaaaactctgaatagacatttctcaaagaagacataaaaatggcaaacaggtttatgaaaaggtgctcaatatcattgattatcagagaaatgcaaatcaaaactacaataagatagcatctcaccccagttaaaatggctgttatccataagacaggcaataacaaatgctggcaaggatttggataaaacactgttggtgagaatgtaaattagtgcagtcactatggagaacagttttggagattcctcaagaaactaaaaatagagctactatatgatccagcagtcccactgttgggtatttacccaaaagaaaggaaatcagtatatcaaagagatatctgcactcccatgtttatcgcagcactattctcagtagccaagatttggaagcaacctaagtgtccatcaacagataatgaagaaaatgtggcacatacacacaatggagtgcttttcagccataaaaaaaaaaatgagattctgttatttgtaacaacatggatggaactgaagat

SEQ ID NO: 913633 - DNA, 4001 bp, Homo sapiens
gggcgatcacttgaggtcaggagttcgagagcagcctggctaacatggtgaaaccccatctctactaaaaaaaaaaaaaaaaattagccgtgtgtggtggcgggtgcctgtaatcccagctactagggaggctgaggcaggagaatcgcttgaatccgggaggcggaggttgcagtgacctgagatcacacccctgcactccaacctgggtgacagaatgagattcggtctcaaaaaataaataaataaataaataaataaaattaaatgattcttggtatttttaaagaaaacaaaatttaaatgttttaataaactgcagttaaattctttcaacaaaagtagagtgtgtataagcaagtaaaaactaaaagttgtcttgaagtctaccactgtcatttccctccgtgtaatactgctctacatttatgaaaccctgtttttcctgtttgatacattttcccaagagcttgccctagagctaaattttttaacgcttctcatgtatcacttaaataacaattgtactaaagtttgtttttattactgaaggcaaaaactccatttttgcctgcccataaaaaatcattgttgtatctgacatttttaaagtgtacattttaaagtgtcctatcacataatatgaacataggaagagaatgtcatgttaaaaattagcaaagtaattgtttctgcacagaatgcatttttcaatttgggcagttctcccagaataaagtaaacaagtgaagcaactagcattcttactagaacagtgacaaggcattttctttttagtttcttttcacttattagtctactaggatacttgaatactgtctctatgctggtgtctaaaaccctcaaaggagagtacaattgcaggataaacgaagagtgtccaggaagagaactagacaagaaaggaaacagatggtctctgggctcggtgagcttggaagctgtcgaaagcaaactcgactggaccctccaaactcctatttcagatcaatacataaggttcagctgagttcggcctccaggcccaagaaagcaaaagccagcaacccgggggctggtcggcggctccctcgccagggacgccccacagcgagaccatgcctctcccacctctacccccgaaaaccaaaacaaaacagaaccaagcccaagcggtgcttgctcgtttcttttgtcttgctcaacgctgaccactttttttccggagaaggttaacgttaagggagcccgggggagctctctgcgaccccgccaggtgctccccgaacccccggccccatcagaggaatgaggcgaccaccgagcggcgttgggcggccaggtcctccccggcacccccgccccggctcctggaggagggcagggactgccggcctggggcagccagggaccgacgggacccccgcagagccaggcccgaggccccgggcgcccccacgacccggcggccgcccagggcgcccgcctggggcctcaccccaaccggggacagggccgccgagggccgggccaaggccgcccggcttgtccccgaggccgccggggagcgtaggccgccgccatccccggcctgccgtgcgcccgcagcccgcggccttaccgcctccacggcgtgctgcaggatggaggtgaacttggagaacatcctgtcccgggactgcagcagcctctcccgggacgacctggagagctcctcgatccgccgccgccgcccctgctgcggctgccggggccgctccagagtgaaggccggtgcggggcggggaggacgagctgaggatcgaggcagggcctggcccggccgcttcaggtgtgcgcgggcggctcggcggctccggagggcgccgggacgcggcgggcggcgaggagggcgttcggcgaggactcggggcccggagaagctccggcggcggcaccggttgggacacggtggcagcccggctcgggttccttccccccgctctgcccgccgcggcctgcagggggcgccgccgcagcccggggaggcccggccaggcctgccctgcggcggggccgctaggcgccgcgggggcggggggcgcgctgaggcctcggcctcgcgcggggctggaggcggcctgtgggcagccaccgccctctcccggctttctcagggcgcctgggacaccggctttctaacatttttacagctcagcgattctcaagagttttgtttctccagtggaagtaacaggctgactttgtagggacacgcagccgtccatatatgcgtatagcattcagaggttcttcctgtaaggaccgatttggaagactcgttaagaaaacagtgttctttaagcaaacattggcaatggatttaaatgctcagattttgaagaaatcaacgactgcaggtgaaatggctttgctaactttaaaatatattattattcaacattgaaacaggaaatcccacatgagcacatggtaagacggctggcttagtttaaatagcccattataatatttatatataatatataacataatttatttgtgatatggttgatagtgaggtgtagtgattcagaacagcattttctattcagttatcagatgataccggaaaacattagcgagggaaagaatctgaaaggagtccagtaaatgcctaaggcagataaatagagctacaaggtaagcacttgggtggaggctgcttaaaatactccctaacagtgtattagtcaagccttgaagaagcagttcaggctggtaaagtttaggttgagttaatacaaattatgaaaatatttgtatcctgaagaaatttgttttatgctggtattggcgttttaccaaaaggttcattaagttcttaagatgaggtggggagtgagttttgcacaaccagtgctgaaaatacgtatctggcccaggcgcggtggctcacgcctgtaatctcagcactctgggaggcaaaggcgggaggatcacttgaggccaggagttcgagaccagcctggccaacatggtgaaactccgtctctattaaaaatacaaaaaaaaaaaaaaaaaaaaaattagccgaacgtggtggtgtaatgggattacatgcttgtaatcccagctacttgggaggctgaggcaggagaatccttgaactcgggaggcggaagttgcagtgagccaaggttgcgccattgcgctccagcctggacaacaagagcaaaactccatctcaaaaaaaaaaaaaaaaatacacacacacacacacacacacacacacacacacacacatacatgtatacacacacatacgtttatacatacacaaacgtatatatacacatacgtatatatacatgtatacacacacacacgtatatatatctgtaattgattcatggaacagagaaaaggtggctgtcatatggagtggtggtaactggccaggctctggggctgggtagcctaagtcccagctctgccacccacagtggaaagttatttaacttctttgtgttttaatttgcttatatgtcaaaaggggagaacagtacctacctcttgaggttgttgtgggaattaattaatatatgtaaaacactttaacagtgcccagtccctagtaagagatgcacagacacttatacttgttctgagttgtggtagtggtatttagcaaaataatagggccagaaatcaggaattaaggaggagatcttaactgggcttcttttccctcctgtttttgtggtttatatccctgcggtgctccttggcagataaatacgaccttaattttctacgtactacccccagaatgctggaggcatcctctgttgttttgtgccccttaccaaattctggccgtgtctgcttcaactgagagcatgtatgtatgcttattgttattatattcatacacagtttaagatggttagtcatattattaaccataattagtttcatgatctaattatcatgcatttatatggcattttgtagttcca

SEQ ID NO: 913634 - DNA, 4001 bp, Homo sapiens
cctctgcctcttgatgaactgggcttcatggatgcggggcttcctggtgaccggctcgaagccggcctccgtctcccaggccacagccacaccccgcacagtctgcacgtgcgtgtagaaggcacacacactctgcggagcagcattgtcctcatcgcacatgcaggagcagcacgactggtactgggagtaggactggtactcggaggactctgaggatggggagctgctccagtcccgcatcccccggtccctggcagcgaagtagaggccctcctcccggggaatggcaggccccggccgtggggacgacccttctctctgtatagtccctgagaagcagaaggacattgtcatcagtgccctttaagggatcaatgccacatctaccttcaggagccgcagactctgaaagggtacaggctctgggagctcttgagcaaacaccgccccctctgcccatttcctgaaaaaatgaagatggtgataatgcctgcttcatagggtgtggtaatgattgaataatgtatgaatgcaatcaccaaatccttgactcaactgagaaagaccattaaatggtgaataacagagttatatacacattagggatatgatgataaggatcaaataatgtattagagtaatcaccaagcaaaagaccatcaactggggaataggtaagctgactgaggtgtatccatatgatgcaacctgttaaatccatgaaccactgagacgtgcaacaatacggatgaatcctgaatgcattatgctaaataaaagaagccaattaaaaaggccatgtagtcataagagaatgtgaacaaaaaaaaaaaagagtccatgtcgtatatgattttattcagatgacattctagaaaaggcaaatttttagcaacagagaacagctcagtggttgcccagagctggggacggggtgagaggagactggtcataataaggcacaaggggacttttaggggttttgaaaaatcttctttatcatgactgtgttggtggttccacaaatgtacatgtgtcaaacttctttaaattgtgcatttaaaattgctgaagtctgtgtgcataaaagacacctcagtaaagcccatttaaaaaacaacacatgcaaagtgccttggccaagccacccagacccaccatcctcttcaacatttgtgacctgtcttcaccttcccgagggggcatctcactatctccttcaacacttactgtgtccctcttgccatggaagtgcttgccaagtttaatattcaaaacaaccctaagaaattatattgttaggattcccattcaacagagtaggaaagagaggcatggagtttgaatgagtggtggagccattgggcccccagagctggtgtgacacttaggtgctgcccacagacacgtccccgcggtcttcaaattgatgttctagattaactttcatcattttgttataaaggaattttttatttcactgctgaaatcacaggatggacgtgttgttttctcaaatacacattaaaataaatacataattataaacattttacattttcattctcatatcccctgaaaacaccttatatactcataacagcctcagtcacaccaagtgtcccataaatatcaatttcctttccctccacatctatgtttatggtcaacacaaccatttggtaacagtatcaggaggcaacctggcactgtcccttcccatcagggcttccttcccagggagcacagctggctgaccttccaggcctttcttttcacctacctggccagaacacttccacactctcctcagtggactcagggctggtcaagctgagggtggtcccatcggtgggtgactgttctcccctgtgatctgtgaagtagcatttcatgatttgaaatgagtgcccagggtgtcggtgctccagctgttcagtgagagttggctggggctgtactgaaggcctccagctggccccagccagagtggacactgagctccccatggtcgctaagatcctagctctactgtgtgacctcatcgatggcactggtctgttctgtgacccatggcgagggcagaggctgaggctggataccaggagaggcttcccaacatgttctcatttccccatgggaactccttttctgtcttgtgtattatcatggacacacagaaacacaaaacacacatactcttaactccttagacacacataaaaacacaaacacataaacacagagacacttgtatacacttaagcatgcatggaaccgctgtcttagtccatctgtgtggcttacaaagggatacctgaggttgggtaatttataaaagaaagaagtgtattgggctcatgtttctgcagcctgtacacaaagcatagtgccagcatctgcttctggtgagggccttaggaagcttccattctcagcaaatggggaaggggagcaggtgtgtttagatcacatgggtaagagaggaaggaagaaagagtggaggaagtgacaggctcttttcaacactcagttctcacagaactaagagtgagaactctttaccacgagggtggcactgagcccttcatgagggatttgtccccgtcacccaaacacctccctctacgcccacctctcacattggatatcaaatttcaacatgagatttgaaggggacacatgtccatactatgtcactcacacacaaagaaacgcatacatgatcactcagacacacatatacgctggaacacatatggcacacacagtaacataaacatatgtacgtgtgttcacatagacacataacatgctcacacatacaaattcacacacatatttacttaaccacacacacatacatgcacacaaattcatgccagattaattaaccatacataggctcacatacatacagtcagcagccaacataaaatgaccctgcttcccagtgtggaaaatctctccttctctcccccatcttacgtccccacgctgaccctgtttagctcctcaaccctccacaaccccaccccacccctcccctcccctctcctctactcactcccttgctcagttcctgtgactccagacacttcactgctcccggacatgcccggcatcctcccctcacgggctctgggctctcgcacttgctcttccttgtgcctgttccaggctttcccctaggttcctgtgtggctctctctccttccggtctcctctgaaacatcacctggtcagaggagcctgcctggcacccccaggaaaagagctttctttggccctacaactctctgtcaccttaccctgctttatttttccatgatagcatttaccaccctaggctgtatataatgtctgtgtgtgtatctcatgggtttacctgtatctgtcttctcctccttagatgtaagcttaggcaggtagggacttccttcgttccatccacctcattatatctctagtgtctagatcaatgttttacatattaacaagcactcaggaaataatgagtaaatagctgatgaacacgttgggctgaaaaaggcgttactccctctgggagctgcctcctctgtgctccctggatctctgcagttccagggtggttggttctctcccactaggactctgggagttgcctcttccttctccatttgcacaaaccacgcttcagcctcaatcagcctgataaaatgttcacctgccatctctctgctctgcaacacgctggcacttcactcatttcctccaacaagcttcttaccacttccctctgtggctaatctcttcccacccttggtcagtctcatcaactctattcctttgaatcccaaatactaaacagttcagataggtgatggattgaaaataatcccaatattccacaagcaacatcaacatcccccacacacccagcaccgaggaataccctcctctctagaatgtgaggccactgtgtggaggaagacaccacggtgctctactgagcc

SEQ ID NO: 913635 - DNA, 4001 bp, Homo sapiens
aactaagccactgctagccatggcagaaacctcttctcatgttgaccatttccctcccatttcgcataatattccattcctgagaggcggatttttagcagcaagagctgggtaaaacgtggtcttagacctaaacctgttatatatatattgaatatatatatatatatatattgaagacatgccttcctttctctaattcagaagtgcatgaatttaatatttccatatattggtatttcaagtgcaaaaggaaaaattcaacttgctctttaaaattaacggcctcgctgaagtgcaaatatcattctctaaaatagctgattcaaaaaagcagtagggtattaataaaagaagctgcaatgcaacactgatgatctaatgtcctaaacattcgtttcctacacgaagagacatataggtctttttgtattttgtagctgtccgctcttccatgatatgcattactaaaattatacacaattcataacggtcatattctaccatggccatagaagcagcaatgcatttaagatataccaggaaatgatactgcaagtgccagaatatgaaaaccttcaactcaacatgtaggcaacaaactcaacccaacagagtgttggcagagcctttcctccccgtagcaacatcgtggtggaagcccgggcgtctctgctcccaggcaccctgagcatgttagccgaggaaagggggttccagcaaggagaccctcggatgcagcactcctcgtttctttggcctgcagggccaactttgcaggacacacacccttctgaggggacaggcctcgggctcggaatcccggggttctgcagggctgcagggagctccctcgcagagacctgagcccccggcaagagtccaggcagcggtgccctgggtgaatgcagaggctcatctgcgggcctcagtggcccttttgaaaacgccagcaacagaggagtcctcgacgctgtccccacaaaaatgtgccaagcaagcctcagggtgggtgtgggggactcccctcaaaaaacgctgattttaaaaacaaaagacaggctcgtggccattctcagaggcgaccacgttactcccagggctggaaagcagatttgtggaggccaaagacgagacaaaaggcacgagctggcgacaaactgatctggaaaggatttttcttttttttttttttttttttggtgagcgatgagggcctcccagttcaattctttcttcccttacagagaagactcatgggccgctgagcaaatcccttatggtctggaagagacgtcagataggcagggggagagaaccccccaaactttcccaaactgcggcaggctagtggctagtggcggcagcggacctcggggccccgggacacagggggcaccccggggcgtcagccaccccctcccgccacaacaaaaggccccagcgcagcccaggagctgggacttcccagacccgagcccggcgtggggagccgggagcgcgatcgggcggcgcgccctgggcggcccctctgtccgcggcgacatgggagacagagccgcgtgtccgaggcgcggcataaaggggacccccgggcgcatccagacgagcccccgccgcagcggcgacagcagctggagctgcccgcgcccccgcccgacccagcccccgatccccggcccccgaagcctccgcccgggtcaccccgcgtcgccggcccgcgccgccccctcgggagcgcgttgcgggtgctgcaggcccggaggctcccgatgcggctcgggctgcgtcgccaccacgcggcccgggaccctcccgccgccgccgccgccgccgccgcctccgcgccaggcccggcgcgacacaaagcccccggccccgccgccgcccactgaccttgggctccggcgccgggctcccgcagcgtcttggtcaccgccttccagacgtggcagcccagcaggcacagcagcagcgtcgcggacctgctcatctccgccgcggggccggcggcggctcgggctcgccgagagcgggccgggcggcggcgcgtcacgggcggccgggcgccgcgcccccctccatgtcgctggctccgcgcgccgggcccgccgcccgattggcccggccccgccgccccggccgctccctcccgcgccccgcgccgggtttccccgaagagccgcggcggcggcggcggcggcggctgctgctgctccgccagctccttaaccccttcctgcctcgcccgccgccgccgccgctgcccgcgcccaggccccgggcccgtggtgccacctggcggctgcggcgccgagggcgcccccgcccggcgccgctgcgtcgcgcccccagcccgacccccggcgacactgccccggcgcgccccatccccgcagccccgcagaagagccagacctgcctttcagggcggagcccttttcatcacaccaggtcacccaaggggccgcaggagacattgtatctgggtgtgacccccccaccaggtgccatcctaatgtagttgtgtcccccaacgtagatttcacacccagtgttaaagatccgcaaaaacactccccaagccagtatagactgcagtaggcctgcagtacctacgtgttggcgggtggacagcttcaggaggaatggtacttggatggttctaggggttagggtggggaggaaatccacatcttttgaggccctaggtgctttaaaactttctgtcctattaaagaaaaaagactattccatgacacgtgtgaaagcacagcaaagaagaccctctttggaaccatcgcaataggtataagccctaccatgggattctgcagtcggggagaaaggttgggttcaactctgaatacagcaggaacaagtggggatttataaccgaggaccagggtgggatgcagggaatgaaaaattataagaggaaacatcagggggaagggggattcttgaaagtcagacatcccctggcagggctgggcaggacagggcggatggggaagctgatcagatatccagggtggagggttcttggtaaactgacttagcagggttcttcctgaaagcagattttacaaggaagggcacaactgagcctagaagaaggttccggagcctgactgtagttcggtcaagcagagactctttgtccatcttcacaatacatgatctaagaggtagttagcattatcccccccattcacagatgagaaaagaggctaaagagggttaaggaatttgtccaaaagtgcatacctggtcagtggcagagccaaaattctaataaaacagtcagtctgaccccaaaattgaaactcttcacaaaaacctccagacttggctgggtgtgatggttcatgcctataatcccaacactttgggaggctgaggtaggtggatggcctgagttcaggagttaagagaccagctgggccaacatggtgaaaccctgtctctaccaaaaatacaaaaaaattaaccaggcatagtggcccatgcctgtggtcccaactactcaggaggctgaggtgggaggatcgcttgaacctgggagtggggaggttgcagtgagccaagatcgtgccactgcactccagcctggatgacagactgagaccccgtctcaaaaaaaaaaaaaaaaaaaaatcaaaaaataaaaccaccaaaaaaaccacacacaaaacaaaaccaaacctctagactttccttgagcctagggaccccctccattccaacctcaacttttctttctctcaacccactcctgtcggtatgccttccacacaaccttcacctccacttgtccctctccaccttctcttccaactagcactgcggtgaccttccgacttccactggggacctaggaaaatccactccagacccatcatccaccccacactgcttccagaacaccaggccagaaggagggttattactgtaatttcattaattgagcatttagacatggcaggcaccgtaccaaa

SEQ ID NO: 913636 - DNA, 4001 bp, Homo sapiens
gggattacaggcatgtgccaccacgcctggctaattttatattttcagtagagacggggtttctccttgttggtcaggctggtcttgaactcctgacctcaggtgatctgcccgcctcagcctcccaaagtgctgggattacaggcatgagctaccgtgtccagctaataagagtcacttgaatcttttattgtctatagatgctttctcccaataatagcagagttgaatagttgctatagagaccatatggcttacaaagcctacaaagtttactatctggccctgtacagaaaagtatggtagccccaggtctacaaatgagtggttttaaattaatttcttgactggacaaaataagtatgtactacaaaagtaaattgttggttcttcaaccttaaaattgaaattattttcaaggattccacatctataattgtggcaaagttaatataaacaggcatggtcatataaaacacagttgcaaactattggcattggtgaaaatttctatgaagtcaagcaccacgccttgcagagtagatattaagggatatctcttgaattaatttttttcaacaggtagctgcttgttcttacagtaatcttgccatatacataaactgtgatattagtaggcattcaagaaataaaggacccatttttaatagtccatggacactaggggtatcacaaacccttacatatggaactatattacattattaaatagctggttgtagtaccctaggccatagtcttcaaagctgcttctggaaaaacccatgatgtatatattcctattcctatcattaagttctaccatcaacactgaagagatgaaaggtacaataatttaattgcattcaatttactaatggaatcacctccctgtgaaatcagtttttattaatggaagctaagattgctgacatcaaaccaaatgcagttcctccttctgcagtgtaccattttgctttgtaatgacaaccaaaaaccccacacataggtttaatgagtttgaatcattcactattaacatcacttaaaataatcccccaatttggtggccaaattatatacctcctttaagagagaagtgatctagtttcacaaagcatttccaatcagaggccaatgacgttaaaagacaatttgtaaaataaagacactgaaacagacaggatctgctcctcctgtgggctcacagcctatgcatttcccatcactcagtagtgggcctgtcacttccctatttcactgtgactagtgaaagaactagtcacaaagaactaaacacgcaacttcaaggaaatacaaaatagaccctgcaccgaacgctcctgtatacattctccattttgcatcagggcgaagaaaacacacaaccgtgtctaacaagtatcagtagtgacagccacggtttcactcgcagcacccccacgacaacctgcgagaccggcgggcggggctgagtacctcgcctactggactaaacgcccggcctttagattccttcccgaccccgtgcgcccctcttaagtctagaagcctgactttcagggaggggcaggcgctcggtttccaccgagcgactcctgacactgcaggaggccaggtgggacagttttgctgcacgggagacggctgtgccgggacggccgagcggctgagagcgcgaagccagggggcctgtcccaggggcgaaggagcccccagaggcaagagctcaccgggggcgggagccgcccgggtcaccagctcctccggccggccctggtgcccagggggcgagccgcatgaggtcccggcttggccgcgagcgccggcctgagacagaggctgaaagcccccagcgggcgcggcagggggcccggcacctacgtggtccgcgttgctgttggcgctgtggaaacacacagcactgaaggtgtagcccgaaatggacgccgccatgatggaaatctccagctaccccatcatgccccgcggagggcacacggccttccggacggcccgaccccttggcatcatgggaagtggagtctgcggcgggcagcggccgagggccctgagcgctcacagtcttgaaggctgaggaacgccggtttttgcgatcggaaggaccccggcaccgtatcctccgcaggggtgtcgctcccgacacgcctcagacagcggttgatagttccgcaaacagttctttccctttgcaagtgaaaccttagtattaaaagacaacattctagccgggcgcagtggctcacgcctgtaatcccagcactttgggaggccgaggcgggcggatcacctgaggtcaggagttcgagaccagcctgaccaacatggagaaaccctgtctatattgaaaatacaaaaactagccgggcgtggtggcacatgcctgtaatctcagctactcgggaggctgagggaggggaatggcttgaacccgggaggcggaggttgcggtgagtcgagatcgtgccattgcactccagcctgggcagcaagagcgaagcttcgtctcaaaaaaaaaaaaaaaaaaaaaaaaaaaaggccaacatttaggctgagcgtggtggctcgcgcctgtaatcccagcactttgggaggccgaggtgggcggatcacgaggtcaggagtttgagaccatcctggcttacacggtgaaaccccgtctctactaaaaatacaaaaaattagccggacgtggtggcgggctcctgtagtcccagctactcaggaggctgaggcaggagaatggcgtgaacctggaaggcggagcttgcagtgagccgagatcgcgccactgcactccagcctgggtgacagaccaagactccgtctcaaaaacaaaacaaaacaaaaagccaacatttgaggccgggcgcggtggctcatgcctgtaatcccagcactttgggaggggggggcgtgtgtggggagtgttaacctgaggtcaggagtgttatgcgcgtttgtgtgaagagaccaccaaacaggctttgtgtgagcaacaaggctgtttatttcaactgggtgcaggcgggctgagtccgaaaagagagtcagcaagggagataggggtggggccgatttataggatttgggtaggtagtggaaaattacagtcaaagggggttgttctctggtgggaaggggcgggggttacaaggtgctcagtcggggagcttctaagccaggagaaggaatttcacaaggtaatgtcatcagttaaggcaggaaccggtcattttcacttcttttgtgattcttcagttacttcaggccatctggatgtatacgtgcaggccacaggggatatgatggcttagcttgggctcagaggcctgacaaggagttcaagaccagcctggccaacatggtgagaccctgcccactcccctctgcccatctctattgaaaatacaaaaactagccgggcattctggtgcatgcctgtaatctcagctactcaggaggctgaggcatgagaatcgcttgaacccgggagacagagattgcagtgagccgagattgtgccactgcgctctggctctgtctcaaagaaaaaaaaaaggaaaagaaaaaaggcaacatttacaagctcaaggatgaaaggatggaggaaattcaggcaaataaacagtttggtatagtagtgacataatttgataacagataacacaatcactttggctgcagagttgagactgtagcgtcttggggtgggagggaagtgaaacggtggttcaagtcaccatcatctctctctctcagaattttgtatcctcttactcagggagtccgaactggtggcagttttgcctcccaaaatggcatgtggcaatgtttggaaacattatcagatatcataattcggtgtcaggtgccactggcatctggtgggtgggtagaggccagagaagtggctaaacgtcttacagtgcacaacaacaggcccacaatgaagaattatcatcagtggtgacaaggct

SEQ ID NO: 913637 - DNA, 4001 bp, Homo sapiens
ccagaagcagctcatttgttgcacacaagataattctaaatgcattttactaaatgtaacactgtatctcttccctaaaatattggacctcagactcctttttgattaatacaccagaaagagaaaaaatgattttgggtaaaacatacaagaaacctgtaaaataaccatgaatgtaactttcaagaggtaggttctctaagttcatatgcacacaaaatgtccactgcttatttaacaactggcttaaaaaaaaacacacacacacacacaattataacagtttcacaaacccttatctgaaccttctggggccaaatgtgttttagaattctgaatttatcagattttaggaaggggataacttggatgtattatggaaagtccccagtggggtctggtgctgcaacctgtaatcaaatccactgacatttctccagcaaaacatgaatattcacacttaatgggataaagaccacaaacagccttacattagttttagtcagatctggctgcccagtaagatgtggtgccaaacttactgaaaacgttttggttttcatagctttctggctttcagagttaagataagggattgtgggcctgtaccacagtattagtaacatgaatattgttaaaacttaatacaatttaacttaaaataaaagacagtaccaagttcgtagggaatttaaacatgttttattgtcagaggatgtcattagatgaaactccccatctcattacatagctcccacaaaatctttacaaaaaaattagcctcttggagaggcgtgaagttactgaaagagaaaacacgtcacattccaaatctgcaagttcttttaagtatgaactagcgtgcacgctggactacaaagtaattcgtggaagggattccctcatcacaggttacataatttcacccacaacatagaaaaggtttatattactaaaccactaggatcagtagaactgacaacgtacagaaaacgatctaaatatgcattaagcagttagggtcccgggtcaaactcttgcaaaggaaaaaaatcactttctttctacctaaggcgggttctccgtagctgtccaggctggtggtcactagaccaagagcagctgcccaactacagagaagcaaactccaactcccagtagcccctgcgcggaggcggggcggggatttgccaggccccgaaatgccaacgcctgagctcgcggaggatggcgggaactggaagagcggcggtctgcagccctcccctcatacccttgcccccgcgacccggccccttctcaagccctctgcacggtacctgtccccaggactctctgttctctttcccgctgcagcatgggcggtactaccgggtctcagatggcagcgcgggggcgacgaccccggggctggggatgaggggaaacctggcctagcgggcatgcagcgccttgtcatgtcggcgccgctggcgacggcggcatgagccgtggctggagaagttgggtgcgtggttgccgtcttgctgctgggactccgggaggctgtcggagcagaggtgggcggcacccccttctctcttcatggcggttctctcttcggaagtgactccggcgtgagcgggaaggaacctggggaccagtaaggggcgggtcttacttcatgaatcacgtcttgattggctggcacggtggtcatttcggtggtggcgcaataggaagccgcagcctctctggagaaggcggggcttggggacgggggaggaagaaacctccccctcccaccccgtcacatgcactgagggcgcgcgcctctggtcccggccgcctcggccttggccggcgcgcgggggcggaaaggcgcgggcagcagctggcggacagctgacgacacccgcctggttgaaggcgaggggtgagggtttgctgaagcaaaccggagcccggcagctgccttcgttgaggatggccaacacttgggcttcctgtgtcacacaattgtgcctcagaaatccgcagctgttcattacatcgtctctttaacagcttaggccaaagtgccataatactgtcacaatttgctgagggatctgcacagcgcgatccgaagacttgtccattctacgacggttcttgttgagtgtcagcggtagattatttttttgtctttaagaagaagaaaaaacccccaaaaaactccattggaataaagacagttgttaatccacaaaagcattttgtttctcatgagttaccatgaagtctctgcagccgacttccttggagattttttaaaggaacacaaggtcagctttcagttttccatgttaagcgtgggcagcatagataagtaaaagctgcctgcaatctccaaccctcctttgtaaagggcttgtgctctggaggctgttagccatggttttccttataaaccgagagactggtcagtatctctgaacctcagcctccacatctgtaaaacgggcattttactcacttttctgggtaattgtaaaccataaaaggataaaacagtgtacactgcacagttcagattctctcatgtaacaggtacagagcaaattatagttccctttcttccccagatagattcctacagcgaattttacttctttacaaaatcttccagagacaggtcaaatactgttgcaataactgttaacaaccaaaatatcaatttcaagatgtccaagctttaattgacagagttatttaatcagttggatggaaaaaaatcttaaatgatataaaataatttggacgggtctttcaagtttattgtatagaaattgaactattggcctgatacagttgctcacatctataatcccagcagtttgggaggccaaggcaggtggatagcttgagcccgggagttggagactagcctgggcaacatagcaagaccctgtctcaaaaataaattaattaattaaaatttagaaaaaacgaaattgaactgttctggtcactaagcatgcctgactgactccaagttcacctccttttcccttcccctttagtccccgggaggaagaattaataaggaataaagtggacaaaaagctggcaaagtagagggtcgaaggtaaacagtgaatatacaggtttcacattcaccccaaaagcacatatgtacagctgtatactagctaatggtggcggaagaagggaagtgccaaaatagagggtacttttctgctcctaatagcggagaatttactatacgtaacattgttttttacataaaaaaacatgatactcaaaatgtgttgaatgacttacacatttgcattttacatgtattatttcctatctcttagtgctttctgttggatgtttttacactaggaagtttctgtactataacagagcacatctacgaaacatttaatccgattcatttccttgcatgcctaatcgataaagagtaatgcataaaaacacgttctgcatgatcatttagttgcttttcttggattatagtacttgaatcatccagcctccaaagtatcactttaaagcctgtactcaaactaccaaacaatagttttctcattttcttaatctgagtaacagattatggagttaagtgaggcaagaaatccctcgatcaataaatggagatggagtcataatgaaaacacaattttaaaaatatcttcttaacgggaagtagttatctaaatcctcaataagcatcaagactcttctttgtttaagctgtgtacgaaagtggtacagatttgggttgcagggtgaaatatgttcaacatattaataagaaccccaggggaacttctagggcctagggctcttctccacctcccacccccaaatagtactggacagtctattttgtgtttatatcctttctcctagtttaaatgtgtacgtatataccatgcatgcgtgtgcacgcacacatgtttattgtaagggttttttacacttcaatttgtagtgggctaaaaggagat

SEQ ID NO: 913638 - DNA, 4001 bp, Homo sapiens
gctaagcacctaaattatttacatggcctctaatcctcacaataactctgtaaggtctattatctgtactttacagagaaggaaactgaggcttaaataagctaaatcacatgaacctgaaccaagtacatctattccagactgtgctcttaaccattactagaactgccaccctgaatcttccttgtatttgcattacagtataaatataaacagggctgaatattatcttattctactttgtaaaatgtttaataaatgttaactgattacaatggaagtaaattttttcttagtctttcacagtattttagagctgcttactattagaataagtaagtcaaagtgggaagtgttaaaataaaatctccctctaagaagcccaagattaggtaactgacataattgaatgtgaaaaaaaagagcccaagtcattacatgtagggtttgggaactcaaaggaagataatgaaaacagaggtatattaggaatcgagagacctggaatccactcccagttctatcgatttgtgcaactttggcccagtcatttacctttacaactaatttttttcgcctgcaaagcaacagtgagggactaaatatcccaacttaacaatacatcgtaattgtaattttaccagctcttaaaacaaacatgtgggagggagggagagattacgtaaatcctgaatttttgttacaaaatacacgttttgaaataggggtttatatttactatgccaaaattccgcccaatctatttcgggaacaggtgttccctaaatagatgttttaataataatagtgttttacatacataaattattgatccttctgactcaaggttatgttttaacctcatcatcatctttcctaagtcacctttaggaatgtgtcagttgtttgcctatccaaacttaagaattagggatagttactagtataaagcgcccagcctgttacagtgcaagaattcaataaatgcttattttatttcattattatttgtactaagactcttcatgtaagtaaaagtcctgtctgggttacaagcataccggccgaggaagtactatgatccatattccttttttaaccgtgacagataataaaccatataaaaaacggggatactttgggccaagagtacactttttagcaaataacagtgtttatacacagactaccacgcctaaccacataatgacaatacaaacaaaaaactgctttttggaattagccacttggactttcccttggacgtccctccttctcaccaaaaatagaccaaccaccaccaatagacagctctgttagggggtaaagatgcggaaggccacagcaccccttgagaaagtgacaccggggcacggggcgcatcttccgtgtcacgccctgcaacccagcaaggggccaccctctcctcctccccagccgaagggcagcccggaggatggaaagagcgctgcgggtatttagtggcagctgtaaccattctcctactcaaactctccccaccaaggcaaggcagggcgtgtctagaaagtccagcttcagcgctgagcacggcgactggggcagagagcggggcacgcgaggggctggagcgagaggcgtcacaggcggactctcgcagggcaaaagaagcagcggctgcaagtgtgagagccccgccagggtaccttgcgtccagcggcagaaaatggtgtccgagagaccggggctgctcttggtgccccacaccagctccatcagctctttagtcagttcggacatgatgaggaaccggcgggcggatcttcgctttgcggactcctgccccggaacatggggaaggggcaactccggaaacagcagctgcgggacggcggcggcaaacgaattggaaggtgaggcaggaaagaagaaggggctgagagccacttgcagagaccaagcctgtcaagccaggttggggcagcagcgagttttccgtaccggaagtgctggtgccacttccgactcctctttaactcccgccccttaaggctgagggcccggaagtcccctccccggaagtgaaattggaggcggaaacaggcacggaaagcggtggaagtagcttctgacctttctgaactgtctgggaccctttggtggggtggtagtttttgtattgggaaggggcgtcggcgtgtttctaaactccaggaataccttcttcctctacgcactgctctgggctaagctggaggctctgaggcccaggcactaggaattagaacatatgcccattgcttgtatttttcaatattaattttgcaaaactagaactataaggcaatagttgagtcacagtgcggtaacatccgtgcctttgtagggcgcttctcataagctggaggctgtccgcctctgtacttcaataaatcaaagtcagaccaactattacctaaaaacatggcaaagaatgtggcataatgtgcattagaaatgcttccaccagctgcaacgcagaattacaaggtatttgtagggaaacaaattcagagcaacctgtttgtaaatgttacagcattttcatctccagtttttgacactgcagagtgtgtgggcaacacctggactaaagtttaggttttactcattaactagcagttaaattgagttcatgtgaaaacttatgtttgtgctgcttaaaaaaagagggcttgtattgcccgagctttgaatttaaaacgaaagggcaaaatctgatttaaaaaaaaatacatgcttttattttggttctgtaaggtttctgtactccttggaaaccatattactttgggatgcagtaatgcaatagttaagaggccaagctgtgggtcatactggcccatattcctaccttttgcacttactagcaagttacctactatctacctaggcttttttctttctaaaagggagattgcatacatttcatatattgtaaggaataaatggaaaaagtaacacatacaaaggatttggtgtacttcctagcacatggaaggcatttatgcaacagtgggtattttttttacctcaagaagccattttgtgggaatttgatgcaacagtagttctgacttttttacccataaattctagccagttgtattttagtataatacgttatgttctctaatttcaaaaacatgcagtttcattgtagaatacccttgcatttggctaattaaaattaacccttaatttaaaatcttttagattgcaaataaggttttgttaatttatgctttattactagctattttttcctatttatacgttatttctaattttattttaattaatttaattttatttcttcagtaccctttactgtaattacagggacttgcccaaagtgcctgtagtagagccatagcattccttttgatctttattccctttagaatatcccttgccttgtttttgcaaatcaaatcttacctatccttcatgtcagagtgtgcatgccaaactttctccagtcattacaattgaaagtaataattataatttctgaggcttcatagtaccttatgtgtaacttgcttatgacaattcctatcatcattgtatttgcaaagagttatttgcttttctcttgggatataaatttatggaagcaaagagctgcctattcataattctagcatggggccttgaacatcactggatctcaataattacgattccaaggaacaaaacttgcctttactggaaataaagaattcattatctctcagcaagtgagagatcggggaagtagtactgactgctccagttaaatatctaatattcgcatgctgattacaatttacgtaattcttccacttcctgaaagacacagaagggtctatgtacatagagctcataactggcagacttctaagttcagaagtgtttccacatttgactttctccattaatgtatgtaaatattaatggtgtagtgtatataacactacatttgtttcctttacattaat

SEQ ID NO: 913639 - DNA, 4001 bp, Homo sapiens
ttagtgaagaaaacaaaactctccatggctaatgtaatttatgcaaaatcatgcaattagtgatagctgtgctagactttttcttttccttaaccaaatgcgcctctaataaaaccatcgtgaggagcagtgccatctaatgtaagtagtaaacatggatagtaaatgattaatatctggtgaggcatgcagatggcaggacttccattttttctttgagctccttgtgcatgtttgctaatcattcttgcaaaaaaattgcaaagataaatatgaactttcaaaagtaacattcaacaggatatgaatgtaagaaatagtacagtgtgggggaatagtaaaaaccagcactttccgcctctgcatagtgaaatgacggtaacttgctgtagcgtaagcttaataagggttatatcattttcatgtatgtactactctgggaatggcccgggtcttgtgagtggtattttttcatcaagtacccagccagcgcagtcactctgacagtccccccactgagataaggcatggaaaggtaaccctctagcaagtcctcgttgaggggggagcgttcaagtgcacagacgtctaccctgtgctatcctgagctgtagtcttctgaaatgatcgtttggcttcccagccaaggcagggctcccccaaagttcattcccactcttgcagtttcacctcgggatgcttccgcagaatttcagcgcctaagcagacaaggtcaaagtaaaccgcttcaccgctgcttctggcgcaggggcccagagcgcgtgcagctccccagcacagaccaacagcaggagaggggtccgggcgggagccctgggctgtagataagcaaaacgcacccattttctctcctatttactccagaggcacctctcctcccccactcctggcatctctttatcactggctccctctccctgtggcatatttttgggtagtagaatgctgaggtcacagggagcggctctttatccaagcagtggggacatcagcctggagccctgagcatgaaccagcaagatgcagactctcgctcttgactttgggctccaggagctgccccgaccccgggctgcccgcgggctccctcctccctcctgccctcgcccgccagctcgcagtctcttaggtctgcagcgttggttggtttcccacgcctgtcccggtctgactcgggctgccaggcaccgggaagccccgcggcgccgaccccaacccgcagccccgggaaggtgccaaccccagcgagtggaggagacgagcatttcacgtgggcatctgccttcactgctgctcgcgcctctcctcaacggccggcgtcagggcccctctgttccaactcatcccccccccgaagttaatcagccgtacttgtactttccagggcgctttagtttggaaaatacttaaaagcctcgaaaccttccggggagacggccgcccccagatctcccagttttgcctggctagggctgtcgggcgctcacgaagctgtggcgtctgtctggaacccacatcgcagaggcgcagccccgctcctccctgacgtcgccaaagttgccagacgcccctcagcgacccggtcgcgccagatgcagttgcataaccttgccccccacctgcgaccgcaccgggtccgctcccggctgcaccggggtgtcccggccccgggagccgccgagtttccggccaagccggtttggggccgagtgtgtgcgcccgaatcggggtcggcgcccgtcccagcggtgctctgcccgcggccaagtacgacgggcgcgggggcgcgggaggagggcacgcggggctccgcttaccttccgctgcttacagataagtcgaggtcgatgcagcgcctggctcgggcatgtctcgctgcggaccctggcaagcctggggcggcacggagcactccggacagggcatccgcggccagactcgccgcgctcacgcggaggaagcctcggctccggggacttggcccgctgcgcgcctgctgcccgccccctccaccgctgccggcccggccctgctggcccggccggcccccgcgccgcagctcgcgtcgctcgcgtccctccggccccgcttagcgacgcgcgcggggaggcagcggctgggccagctccggggacgcccgcgcgctcgcttgctcgcgacgcggcggagccagccacagccacccggcttcgcgctcctccgatgtcctcatttactgcaattgtcttcggcgagatctcagagccagggccaggaggcgggggcggggcagaggagggagcaggagggaagtcctttccgctgctccaggtcccagctactccgcggagccgggcggccagaggcgagggcgccccaagccgcgcgcctgccgcctgtgcgcccggctggcaccgaggcgggcggagccccgggccccgcggggcggaggtggggcgggggcggcgcggggccgggccgggccgggccgcgtgcgtggggtgggggatagggagggagtggaggagccccctcccgccgccgccagagctggaggaggaggaggaagaggaggaggaggtggaaggagctgccgccggctgccgccggctgccgcctgcgcgcggggctccgccacagcgcgtcctccgggtttctgggctgcaggcggcgctgcatggcccgggaacttgttgagtctaccctggagccgcctccggagcagctggcgggcgggggactccgtgtgttctctcagggatggggggtcgctggggaccctgctgcatgactgtctgctgtgccagccagcctggcccggcggggctttgggaagccaggcttgaagggtgcgtgtcttgtaggtgcctggccgctcacctgcggatgctgccttgtagaagcaggagttcggggatcctttcagtgctggctccaacctggtgtcagcctctctacatggggacaggaggtcctatgagtggcctgaggactgaagtgggagggcctgcctggtaatgttgcatgctgacatttagggacactccagagcaggcgccactgccactcctagccaggaaccctaccccccatccagagcacacaccacccgtcagcagaagccacagggcgcagaggctgagttcctttgtggcagagtagaattctcttgggagaggaaaagacctaggatgcacacggagctatccccgcccttaatttcccacccaccaaagagtattgggtgttttgagctcagagcagcagacccaggggcccctctgatgcctgtcaggccctggggtctgggccagggactaagcagccagccgagtgcagggctcctggccccctggatttgctcctagaatgtaatgtaaaatgtaagtagccacatttattagtctgtttctcaggaaaggtcagagaagtagtggaccccagggaagggacaggcttcggagaggaaattgggaggacaaatggaaagtcccttcacccacccacctctccagacacatcagtgggcagtgagacctctttgcctatacatccctgagtctctgcacctagcaccagctctgtgcctgtgaccaagccatagctccatccttgttcgctgagctgaactgagcctatcactgccttatagagtgtctgttttttataaatgactttatacgaaataccttctttgtatgtggatgctttgggcagtgtgtccagacatttcagaagaaaaaaaaatctaaaatgtcatctatttccctctttaccccgcagcatcctttggtatacaattttgccagccttggggatccagatatgcccaggacgggagtcctgagcctgtggatccaaactctgcccacctcactcttcttgttgttcttcttaactcagatcccccaagctgattttccagcttaccagggaggctgttgggagctggctggaaagagatgcttaattttgtgtgagcagtatggaaactgcagtcc

SEQ ID NO: 913640 - DNA, 4001 bp, Homo sapiens
agttggaaaatggtttctagtcctgagcaacataattaggagaaagccactgcatttgtctgggcctccattcttaagctataaaataaaggtttgatcaaatgatctctgagatgtcttacagctctaaaatgcctctttatgattttgatattataagtgccctaaatgcccagagtcacctcactcctggatgtatcactccattctctctagcactgcaatcctgattagagcccagtatccagtagataaggtttctctcctctacctagcaactcagccaagaggatgttttcagagaaactctgtacacttcaggacactgagaaggggaaggaaccctagttacaacaggaaacactagaaccagaaaggggaaacaaagcaagtcactgctgcacatggcatacaaacagtgtggcaggccttggttttccactaatcttcacaacaacccttccactaggaattactatctatatcagcccctcccctacccgccccgcccccaatttacagatgggataactgacttgcctaatgcattctgatccatttgttttacaaaaatagccccatggctttagattatgaattttacagagcagagttgtaagcggggacaaggatttgcgactggggctgagaatgatcttagcctataattacagacttgttaaatttggttaagaatttttttctgtactttttgagtacagaaagctatgcaagatgctatactaagttgcatacatcaaagtcaaagtcacagtcagaggtttgagtaataatgtcatattttctggacaaccagacagctgcttataatcaaaacccaaaagatatatttgagcagctcgatgggtaaatgttttccatctctattccagaatttaaattccattttcatcgtataaggctgtcttatttcctatattttgtatttgattagaaataattccagaagcctgaacttcgtctgatctaaaattaatttcacttgtatactaattataagccacaattatttaacaatctgaagattgtaatttacatcataatcagagtctgtgacttaaaaatagttactattttcaagcatgttaacatcaacattaacgtaaatatcctatttacttttatgaaatgaatgtgttccttttctcaaaaaaggtacagaaaggacaactgaattacaggcctgagagcgaatccagaaaaactacttatttagcaagattttgcatgtattcaactgttttaattaaagagagtgttcgtttacttgaggcctggaaaacattttcccagacccaagatcctgcatggaaagacaataaaccaagttaacagttcaaggctcattttaagtcgattccgctgtgagaatacttacagggtccaagattgcaagaggatgggtctagaaaggtacaccgttcctgcttggctgcacaacccggaattctgcaggctttctggcggcaatgccacactccaatcccaaaagagagagaagcccctcccgggcacagaactaagcgctgcacattccggcgaaggatgtctagcctgctggcagtcccattaactggagctgttttccggaatacagcaactgtaaacgtgagcctgttttccctatcgacagcctcctcaatcccctctcactttgacctgggtgggacggagaaccccctccacataacaggctggggaggccgctgcgacgcccctttcgaggaaggctgagggcggccccgccgtcgcttccgcggccccgggccgggggcttttctagcctgctccgggaggctcggccgaggagctatgaggccgcccatgccgcctccctcggctgcccacaagaggccctcccagactcatcatgccggagcccgaaccggcgggtaaccaaccctccataagccgtactcacctgtcaggaagtggtcgcccagcagccatcttaggaccccgtcaacatcgcgccttctcattggctcctgcgtctcaaccaatgggctggggccgttctggccctagggtcgccttagcaaccggcctcctggggcttccctttttagtccgcccgaaggaggtggttcctttctttcttttttttctctcttttatcttgccgttttctctttcttctgaacatttttaaagactttgttctttcttcattccctgctgtaggccaatgcgtctgggcaaggaaagggctgacatagaccttgaactgagagttgatgccaccaggagggagaatcttgcagagtgctttctttctaggcccctctgcaaacgtcttcattcattcatcctttcccctcactctcttccttttttttaattttttttctttcttcacctatttattgggcgcctactttgtaccaggcatcgtgctaatctctggttagcagaaaacatgctgactcttgctctcttggcgcctaccgtctggtgatggggtccaaggtgcttcactgactggaccaaaagtttaccgaacttctttttttcttatttgtggcaggcactgtgttatgcccagaagggggtgcttggggaacatagaaaataaggggaaaaaaaagagagagaaaagcactgcgaagaggataaaataccctatggatagggatgggaatagggctattttagaaatatttgcattttccgaaatactgttttataataagaataacattaagtgtacctatttgctaattttgtgatgattatataagaaaagcctgggcaacagaaccagaccctatttcaaaaaaagaaaagaaaagaaaatacagtaggcttccctcatctgtggcttctcttagcctgatttcagttacctggggtcaaccaaggtccaaacacattaagtaaaaaattccagaaataagcaattcaaatgtttcattgcaagcccattctggatatcctgatgaaatctgcagtgtgaatcatcgctttgtccatgcatgctgttaggctaccaggttcttagtcacttagtagccatcttggttatcagattgaaaaactatatgtggggttcgccattattccaggattcaggcatctaccggggagtcttggaaggtattccctgcggataagggaggctactgtacacataaagactttaacatgttacctagcccacgctaattttcaatctcagctgttttttgctgttaacattaccaataatgtctttcttcaaagcaagctaaatgtgtataaaattttgcattgcactcagtaatatatctcaatttcacatcaacagatggttaagcctattaactatccactaaaccacctcacctccaacatcttccagaagatgcgccaagtttagagagcagttttctataaccccagaatcatagtaaaacctgaatcagcaagtttggatcgccgaggtccctcttcctgttcacattctctgattctagagtagaagcaaggctgaatgagttaaggatctgtgtaaaactattttggccaaatctgttcagcttctcagtaggattttccttgaatccaaatctttaaaaagttaaacaggtaacaagaaggtgtgcctgagagtgctgttgtaactgcattaggcttcttaattgctcttcatctggggatagcaaaatactacagacaaggtagcttaggcaacaggaatttatttctcacagttctagatgctgggaagtccaagatcaagatgccagcaaagtaggttttttttttttttttttttgaggcctcttctcttgcgtggtaggcagccacccttgccctgtcgtgctcccatcaccttttctttatatgcacagtttggggagctctccagtgtctcttctctgtacttaaaaggacactaatcctgttggatcagggttctacccttctgaccttatttaaccttaattactgccttagaggccacatctccaaacacagccacactgtgggttatggct

SEQ ID NO: 913641 - DNA, 4001 bp, Homo sapiens
catgggcgaaagaaaagagagctcagactcaataaaaacatcagcaaatgatatgacctgcctaaaaagatttaacttttgtattcaccaaggaagataaaaattaaaacagaatgttactttcaattactaggtggctaagatattttaaaaataccattatcatccagtgctggctagcatggagataaaaacacatcttttgagcgagtgaacataaaaaggtacaatcatttcagggcaatttagcaacatggttatccagcactctcataaggagtcaattctacagaaatactatcatgaccacctgaagcactgtttataacagcaagagataatcactgcagtattgtcagttatagggatatcttgaaaataacttgaatgtctaccaacagaaaaatgaaattcacttgataaatacatgccatattgatctatttttactgaatagatagtatactgtatttaacaaacaccatgtctcagtcaagttcttaggcacttcaccgattttaacccattttaacaactatgtttggaccacaggagatgcttataatctccctttaaaaaaattagttacatttgggcaaatgttctgtatacacaaaacttcaaatataccgtcttggtcttccttaacataattgtggaccttttgtcaccctttttctggcctggcttagttatttattgatgtacagtacaggacataccgcatacagtcacccattcctataaggcagtttttcgacagaagggtattcttgcaccgttaggggacactgctttgctataaacctcctaggcaggattaccgccaggctcacccctagttttattcagggaacactgtagactctaggatcgcgaatgccattccaataataccatacacttgtacgccacatatttaagttttggatacactttcataaacttttctattctaattgtaccttacagggagaataaggaagagtaagcgtggtttgtttaaagttacagatttcaaatagacaagaagcgactaagagaaacttgagaattcccaaagtaatcttcctcaaaatttcagtcatcaacccagttctcccacgaaacgctgcttggcgccgccttcagacaaacttctgtgttgctcgcaccaagttatcccaacgcggcttgcgcttgctgctgaaatgaccctcccttcggagagacctgttttaccctaaaaagaaaaggtggcgcattgccatgaagtctcgagtagcagcaggcttcacgcagaacccgcaggaaatgatttcccagccggtgcaaacccgaagacggaaacttcagccaagaacttatcagcatatccctgaggacgcagctgtcccctgacaggcgacgcaaacgaaacgcctcagaaaggggcaagatgacacggttaggatctccctgccggcgacaccgagcgcggccacaggttgtagcgcaggacagaaggttgagtcatctagaaggcgccgacccctcccaccccctcacccggagcgcggcaaaaggcaaggagaacgcgtcgaccctcgcagccaagccccggcagctgcccgagcgctcggcctcggggacccgccgtcctcctcgcagggttcccgggcgcccaggccgaggagggacttacccgtccttggcgtggccgccgcccccgaggacctgagatcccggctcggcctccttcccatgcttctcccggccgtgctctgcgtcctcccgggccctcgcgacaccggcgcacgtgggaagcaccagtcgccggctccgcgctcccgcggggacccccctcaggggcacgccgtccgccccagccccggggtcctcgccgcgggcgctgacagggacgccgcggccgcccgcgctctgtctcccgtcagggtcacgggcaagaggcaaccccgggacgcccggcagcctgcgagaacatgccgactttctctctgaccggcgctagcaaccggaagcaaaacctcgcggccaaaggaaaagaaaaggggaggggggggcaaaaaaagaaagtgaaaactgaagtgaggcgtctccctcagagatgggaaccaatcgccgggaagaaaccaaggcgcaggcgcggaccgaggtcagcgtccacgcggcgctcgcgtctcccctctgcgcaggcgtaaggccacagctcgctcctgattaggcggccgatcccaacgagcgcgtggtgtctcgcgttgccgacccttgacaggaggcggaagatgcccttgggaagaggcgggagacgctctctcggctgacctacagtgctgtggctgtggcccacgtggtcgccttcgggcgccttctcccttctcagcgtttcattccccaggtgctgctgcaagaacagtttatttgtctggcccgaatgcgacattttggaaattttgcccttgttttaatccatatagtaggtgtggctgttaccccctaggaaagcatctctagaaatttataacacatgcacagagagctaaggtgaccatcaataaattcaggtttacccttgcccatgataaatagtcatgcaaacatcatttaactgtagggacaccttatgagagagatgcctcattaggcaatttggtccttgagtgaacatcacagaaacctagaagcataacctactacatacttacaccataagccatagcccattactcctggctacaaacccatgctatatgttattgtactgaatactgtggacaattataacacaatggtaagtatttgtataagcatatctagacatagaaaaggtacaataaaaatacagtatgaaaaataatggtacacctgtgtaaggcattctcacgaatggaccttgcagtactgggagttgctctgggtgagtctgtgagtgagcaatgagaatgtgaaggtctgggacattactgtacactcttgtagactttataaacactgtacacctaagctacactgaatttatttttttaaattttttcataattaaccttagcttactgtaactttttaactttttaaaacttttaaaaaactttttaagactcttttgtaataacacttagcttaaaacaaacacattgtacacaaatattttctttatatccttaatctgtaagtttttttctatttaaaaatttttttaatttactttttaaacttttttgttaaaaactaagacacaaacacacattaacctgggcctacacagggtcaggatcatcaacatcattgtcttcacctccattttgtcccactggggggctgggattacggtggagccactgcgcctggccatgtgtgctgtacttttatatgactggcagtgcagtagattcatttacaccagcatcaccacaaacatatgagtaatgtgttgctgtacgaaattaagatggctacgacatcactaggcaatagaactcttcagctctattataatcatataagatcactgttggatatgtggtctgttgttaactgaaacattaagtgacatatgactgtaccaatgagagagattaagtgctaatgaacatgtatcatgagtcaagcactgtgctggtaataccaagagattcagtcattgtgtttactgtttactgtaaccaggtgctgtaatagacactggttttacaatcatgaacaagctagataaggaccctgcctataatggaatttattccagaggtgagtgacaaacacaggtaaatcaccacgacaagaaaatagaatctcagataacaatacatgctgtgaaaactcactggaaatgctagtggatgggactgggggctggaggccaagggcagaagtagtggagctacaagatcttactgaaatgggcacatctgaggtcaaaccctaaagatcaaaactgatagaaccaaagcttggaatacgtggaggaagagctttccaggcagaagggaaagcaagtgcaaaggacttgagaagtgaaatgaaac

SEQ ID NO: 913642 - DNA, 4001 bp, Homo sapiens
cttcccactgtccagtgatgggcgtttggcatgtttgctcctaggcacaagagaattcaactcaactagactcaacatttatttccaaacatttattcagtactgacctgttcaataaatggcgatttgggaggacataaaatgatacacaatcctcaagaaaatatggacctggtacacaaataacaaaaaaatatcaagtgggaaggtgaggcagcttgggcaatgtatgggcatgaggctatggtggtgcaggaataacagccagtctgggtagccacagaagcacccagaaggaagtggctttggagccggtgtaggacacaggaggcagcatggacaggctaggctgggatggggccagctaagctgggagacagcaggctgactggggcaggtgtcagtgctgaaggaaccctgagaactcaaacctctatgttccaaagacccccatctccatacctcaagttcaagggctgggtacaagatccagacctcaaaacccccataagtgctgtcttctgacctcccactgtgatcctgaaagtgtgagcagagattcagccctctggggcagtggaccccatcctcaggcactgcagcaccatgctgagagtgttatcaggaccagtggtgagcatcaggcctctccatggacagaccgcacccagtgggcctctagcagcccactcttgtgccagagagaagcacagaaaattcacttccaggaatacctggagagcacacaggcctagcctcttatccaagtcccctgggctacaaagcaactcccatcctggcatgtcttgaagcacgtactactgtgacttgctgcacagtgagcagaccctgaattctgaaatcacaatttttcctacacacaaaaaaggacaatcaaaggaattttaatttctaaacagaaatgatgcattttcacatgggtctctaagattgcagaggtatggaggccagcaatccttcgtacctctgcagccagtcgtcttagaagctgtcagtaatggcctaatttcattcactcaacagtcttgtgatgcaaagattatcctgtttagcagctaacactgaggttcagagttcagtaacttccctgtgtcacagagccagcaggcagcagtactacaacctggacccaagtcaacaggaataggactccaaagcctgaaagactacctttcctcgccacacattcagaagtgggtttacatctgctgtaattgttgattaacaaagaaaagaagaaagaagtcggtcctggagatccaggagtatgattccctctgtcttaaagagaatgtgtttttaatcaccttgttttttcagtcatcgtgtacagtcaaaccatgtttactctaaaggaaatttaccatacaccagatgttccttctctttcctccccctttctatccccccttccattaaggaaagggtcagtttctctgaaacagaatagtagggttgtttacagaagagccagcccccacctgacacagctatagcattcagttccccactgctgggcttatctgatccaccctctcccacagaaggtgaagtaggataaagccacaaacaaacaacagctgtggcagctcagagtggcagctctggtctgaacatgggtgcaagaggacgagacccagtcgggctccctaggctaagctgaatcaattcctccccaggccccatttttctcaactccatgaggaagttcctaatgatccccagtgacatcctatgagtctaacaaaaacaggtcactttggagtcagaacattctaggctcctcaacactgcccccaccgccccaaattcagtttccagcttcgagaccctgtctctttcctatacaaggcaactcccttcctcaaacggtctcttacccccaacctcagacgcttcaaacttgggaacaaggcactcaccatacacagcgtccacacctctgcttctcttgacaaagaagtatatccaggggtgagcagacgggcctgggcaggcggcaaggggagggctggaggcgggactaggtccctaggctcagtcactccataggcaggaccaggccacccagaaaccctggggctccttcagctgccaacagtcagtctccagaaaacatctaaatggaaagctgccaaggccccctagcccttcaaaaagttgagcaaagctttgagtcatttgcagtcatgcagattataacatttcccaagtgccaccagactcctctgctatccggtgcagactaaagaagcaaagctcgtaacacagcccacatgtcatactagcgcaaataaaagaagatgtccttttctctgtggctcctcgtgcagcctgctcccttgccccattcctcaccccaggcctggaaagtcagctggcacctctgaggcccctcatctgctgtctattctttacctccttttgctttcccttccttttctgccacatcggtggcttccctcaacccacactcccttcctgggtgacttccagcacttctcccaccactttgttattgacttccaagttcctattgctgttctgacccaaagtttccacttgggggttttgtaggtgtcttggttgtaccacatccaaaactaaagtcgatttctctgctggagttccatggctcagtagatgggggggcagggaggggggacagtgggggacaggggttcacattttactgttcatttgccttcactgcctacatcgactcaggaagttctgtccatcttctaaaatgtatctgctacccatcctcttctcgacctcactgctgctgcccaaacccaggatcctataactctgtccctagcctatttcaagaaccacagaatgaatctggcttggttctagtctggtcctctatagtttattttccaagccgtagtcagagcgatcccagcacacccccacctgattacacctttcccttgtgttcagactctcactaacaataaactcctcagcaagccagctgatggggccctccacagcttggcttcagcaagtgttgctcatgttgtttcctttgcccgggatgcccccctctgacccaggccaaccacgtaaatgcctacttattcataaggcccagcacacataacacttcctctccaaagcctttcctgaaagccctgacaactgactgctcactgacctcttctatagcgtgcatgtgtgtgcgcacacacccataaccctgcacaatgcacaaatgaattgtgtaaattttagttatttacatgtctgtctccacaatatgttggcacaatgtgttgtcgtcttcattcctgcatccccagcactcaacacagatcctggtaattatcaggcattaaatgttaattaaattatctgaattttactcttagaattccacagtgaggcagacttggaacttataactactcaattccaatttcagttcagtatgaaaggcaattttggacagggctggcttgatattaaagaaaacactctagcttgggacttaggtaaccttaggctgggtcctcgctctactgctcactagcagggcaatctgacttaaggtatgaagacactcggggcctggatctcatcatctatacagaggaaggaactcaaaattctatgaggttgtcttagctctgacatccaaagactctaaagtaccatgtgactgcaactacagggatctgatgtctagaaagccatgggaacccctgccaccactgttcttctgctgggtgtgcacattcaccctgcctcctttgctgggcctaactcctgactgttccaggagctgcctctgggcaggaactgataaagtcttaatgaaacaaagtatcagcactggctgagttaaatcatgtctgaaacaagtagagacagcatcatattctaaacatcaagggtacacctgcccagcccagccccacccagggaatcgtccctcttcagaatgagctggcctgaggcagagatag

SEQ ID NO: 913643 - DNA, 4001 bp, Homo sapiens
caaaggattaaatgtataggaggtgccttgtgaggtaccttacaaaaagtgcaataaatacgatgtataattcttcatttctagagcaatgattaccctcaaaacgttatttgtacacaaaatgaagagttttctgatgaatgagtatggtaacgagtcggggtctgcagtggaaatcccaatcctcattctccaaagctgggcccgagcaggagcattcaagactattcaagctgactttttcacaatgcttttcaaaacaaatcttgattattttctttttgaaaaaccacctgccaggttcaaaggaaaatacattaaaataaaacaaacaaaaaagctgagttctgggttgctgggctgtgcagacagcatgatgtggcaaggaaaagaggcgcaggagcagctgggaaccccggtccggcagtggactcccgggtgtgcctccttcccacagccctggaccggctgggccttgacttcccttcctttgcctctaaccatctccacctgcgccttcacctcccgctccagcaacaaccctgggggcagattgttcatcttttcattcctagacctcagcagggctgttaagtttacaactgggctctacccaatttaaagtcaggcgtttgtgactcttgggaaagagggggaacaggtgcctccgaaacgctgaacaacgctagaaaccgtgccctcttaaaagacacgaccctaagcgggcacagagacgaggacgaggactgccaggtccgcacctggggctggtccagcagggcggcccccgggcccatgctccagggcagggccctctcctctgttctttgtcccaacaattcgcgaaggttggcgccaccggcgtcactcaaggcttgcgggcgtggacagagggggccctagcccgccgcagcagcgccgggtccccgtctccgttctccgacgtctgggcgcagggtttttccatcggccgccacgcagggtggcggaagggtcgtcgtcctcggagggagcgccagcgctgcggcggctcctaagaaagttggcgcgggcccgaggggcgcgcctcaccagcccagcacccaccctaccggccctgcactgcctcagtttccccacctacgccgcggcaggccccgcctacggacatcacgtgcctcgcggagccccggcgcgcagcacctacctcaagtgcctcccttctgccggccttttaccgccccgacgcccgggcgctaaggggccaaaccgcccggcccggagggtcccaggggcgggccccgcgcttgcgcagcctctagcctgtgctgcatcgcgcgctaccgcgccaccgccatgtgacccgccccgccccccgtgggaggagctccgggcctgcccccgactcgccgacctccgggccgcggtctcctagctccggtggcgctcgggcgtgtgccccagcggtccttttacgcacagcgctcggtcggtccactcctcaagtccgcgaaccgaggccccgacgcgttcttcagggcgctgcctagggcaaaagaaggcgctggacacccctaatggagcctggaagcacctgtcctgcagccgaggctggccaacttccttccaatcttcagcctggttttgaatagctcttttgataggttttttttttttttttaacctccatgggcagggggaatctaaaggaccgacacattcgatgagccccttcaagctgtatgtacagattcagaatttccaacctcaatcctccacccacgttccctttcactccacaatgccagctatggggcagagaacggtgagccgcagccttgcggactccgggcgacgctgaggcgggtgtgtcacacaccgctcatccacttactcctcctgttggaagtgcccactctttcatgaaagtaggaggttgtgtccggcgcgctggctcacgcctgtaatctcagggctttgggaggatcgcttgagcccaggagttcaagaccagtctgggcaccatagtaagactccatctctacgtaaaaaacaaaaactagccaggcatagtggcgcgtgcctgtatttccagctactctggagctgaggtgggaggatcgcttgaacccgggaggcggaggttgcagtgagcccagatcgcgccactgcactccagcctgtctttaaaaaacaaaaaaaagaccctgtcttaacaacaaaaaacaaaaagtaggaggttggactttcagagacagcagagctgactcacgatacatattagtggttggccgggctcggtgtctcatgcctgtaatcccaacactttgggaagccaaggcgggcagatcacttgagggcaggagttcgagaccagcctgaccaacatggcaaaacctcgtctctactaaaaatacaaaaattagccgggtgtggtggcgcgcacccgtagtcccagctactcaagaggctgaggcaggagaatagcttgaaccccggaggtggaggttgcagtgagccgagatggtgccactacactccagcctgggtgacagagtgagattccgtctcaaaaaaaaaaaaaaaagacatatcggtgacacagtgcaaagaccagtcacagggcagcataaggtgaagtggcaaagcaggccgatgtccgcccgtcaaaggtggtcatttgcctgcaacaccttccccccttcatctgggagctgcccacaggtgtacaaagtccaaaggcttccgtgattcacctccctgacttcccactcagactccatgttccatgtaaacttacagcaacacttggggagcttgatctattcaagggggtctctcctcaaccaaactgtgaattcctccacttcacctctgggaccctagagcctggcccagggacagcgtggaaataaacttagaaaacgtgagaggtggatctaagttgtggggtaagggagatcagcctgagtgcccatgcagttttcctgcaggagttaggcatatgatttgaaggccagaaaatatttcgtatactttggtgcaatgcgggtgtagttttatatatatatatatatatatatatatatatatgatatataagatatatataagatatatatgagatatataagatatatatgatatatgtataagatatgtatgatacatatatctctctccagaggacctttctttcttctcccttgtttctccttaccttgtgaagaggagcgggagaagggtcaatctttccatcccaaaataggaagttcaaaggtgaggagggtttgcagggaaggccacttagaacaaaacaggaagtcatttccttgggaaatgagttcttggagactgaccattaatgacagagccattcaggggttgaggatagcagaattctggggtggaaggtcccctgaggctttaactgtgatgtaattactaatcacgtgcaaaagtcatgcttatatttacacttcggtaacatcctgaagatctggacttcaaaaaccaggctacatctgatagctaattaatatgctcctcacatgcccacgtttctttttgtacaagaaagcacaggctgaactcattaaaaaacagtcattagaccagaaaaataagttacaggcaagcaggcgcaggaaaacttatttacaaagctcaaggactaaaaccaaaaaccaaaccaaaacaaaaaacctgaagaataaaccaagaaaacccaccaacctgcccagcttttaagagaaaaataatttaaattttgtaaagattgtaaaatagccttaggttctgaatttcaggtggtagaaattaaggttgactagaagctttgtgataactttagataatgttaccatcttgacaggggctgggaaacttttctgtccctcacaagtcccatagggcaggcagaaaacactgcttgcaggaggcagatctgggtaaagactcctgactttttcagcgtcatagcacttctagattcagctggcttcagcttcgtctgctactca

SEQ ID NO: 913644 - DNA, 4001 bp, Homo sapiens
tagtgaacttctgcagctgtgtcactgcaggcctgctttctggtgaacgttctaggtctggtgggaacactggcttgtctcagcccctctggcctgcaggcccgctccatgctattcctgtagcagctaacactgcctcctgcactagcagtgccagagaaggcaaaggacactgcccagctgtaatttccctgtgccagaggccactgagctcaaaggtgaggctggctctctgcacagaacctcaggatggttcttgccacacaagccacagcagagagacttggagcttctgctcaacatttcacaaagaagcaagaacccaactggcaggacagctgccctattgcttagatagggacagagcctggggcttgagccctagagttccagtcctatccaaactttctgagcaccatttaaatgacacgagatgagaaaatcatcagaaatgtcttttgtaccccttcagaagtaatgcagaaggtctcaactaaatgacatgctcttataaaagacggggatataggaaaggcccacaccaagaataatatctaactttaattcttgcaagctgtataaacctggacaaggaactgttttgcatcagtaaaatgggaatgcttccttaattaccttctacagagttgcaagaatcaaaggattaaatgtataggaggtgccttgtgaggtaccttacaaaaagtgcaataaatacgatgtataattcttcatttctagagcaatgattaccctcaaaacgttatttgtacacaaaatgaagagttttctgatgaatgagtatggtaacgagtcggggtctgcagtggaaatcccaatcctcattctccaaagctgggcccgagcaggagcattcaagactattcaagctgactttttcacaatgcttttcaaaacaaatcttgattattttctttttgaaaaaccacctgccaggttcaaaggaaaatacattaaaataaaacaaacaaaaaagctgagttctgggttgctgggctgtgcagacagcatgatgtggcaaggaaaagaggcgcaggagcagctgggaaccccggtccggcagtggactcccgggtgtgcctccttcccacagccctggaccggctgggccttgacttcccttcctttgcctctaaccatctccacctgcgccttcacctcccgctccagcaacaaccctgggggcagattgttcatcttttcattcctagacctcagcagggctgttaagtttacaactgggctctacccaatttaaagtcaggcgtttgtgactcttgggaaagagggggaacaggtgcctccgaaacgctgaacaacgctagaaaccgtgccctcttaaaagacacgaccctaagcgggcacagagacgaggacgaggactgccaggtccgcacctggggctggtccagcagggcggcccccgggcccatgctccagggcagggccctctcctctgttctttgtcccaacaattcgcgaaggttggcgccaccggcgtcactcaaggcttgcgggcgtggacagagggggccctagcccgccgcagcagcgccgggtccccgtctccgttctccgacgtctgggcgcagggtttttccatcggccgccacgcagggtggcggaagggtcgtcgtcctcggagggagcgccagcgctgcggcggctcctaagaaagttggcgcgggcccgaggggcgcgcctcaccagcccagcacccaccctaccggccctgcactgcctcagtttccccacctacgccgcggcaggccccgcctacggacatcacgtgcctcgcggagccccggcgcgcagcacctacctcaagtgcctcccttctgccggccttttaccgccccgacgcccgggcgctaaggggccaaaccgcccggcccggagggtcccaggggcgggccccgcgcttgcgcagcctctagcctgtgctgcatcgcgcgctaccgcgccaccgccatgtgacccgccccgccccccgtgggaggagctccgggcctgcccccgactcgccgacctccgggccgcggtctcctagctccggtggcgctcgggcgtgtgccccagcggtccttttacgcacagcgctcggtcggtccactcctcaagtccgcgaaccgaggccccgacgcgttcttcagggcgctgcctagggcaaaagaaggcgctggacacccctaatggagcctggaagcacctgtcctgcagccgaggctggccaacttccttccaatcttcagcctggttttgaatagctcttttgataggttttttttttttttttaacctccatgggcagggggaatctaaaggaccgacacattcgatgagccccttcaagctgtatgtacagattcagaatttccaacctcaatcctccacccacgttccctttcactccacaatgccagctatggggcagagaacggtgagccgcagccttgcggactccgggcgacgctgaggcgggtgtgtcacacaccgctcatccacttactcctcctgttggaagtgcccactctttcatgaaagtaggaggttgtgtccggcgcgctggctcacgcctgtaatctcagggctttgggaggatcgcttgagcccaggagttcaagaccagtctgggcaccatagtaagactccatctctacgtaaaaaacaaaaactagccaggcatagtggcgcgtgcctgtatttccagctactctggagctgaggtgggaggatcgcttgaacccgggaggcggaggttgcagtgagcccagatcgcgccactgcactccagcctgtctttaaaaaacaaaaaaaagaccctgtcttaacaacaaaaaacaaaaagtaggaggttggactttcagagacagcagagctgactcacgatacatattagtggttggccgggctcggtgtctcatgcctgtaatcccaacactttgggaagccaaggcgggcagatcacttgagggcaggagttcgagaccagcctgaccaacatggcaaaacctcgtctctactaaaaatacaaaaattagccgggtgtggtggcgcgcacccgtagtcccagctactcaagaggctgaggcaggagaatagcttgaaccccggaggtggaggttgcagtgagccgagatggtgccactacactccagcctgggtgacagagtgagattccgtctcaaaaaaaaaaaaaaaagacatatcggtgacacagtgcaaagaccagtcacagggcagcataaggtgaagtggcaaagcaggccgatgtccgcccgtcaaaggtggtcatttgcctgcaacaccttccccccttcatctgggagctgcccacaggtgtacaaagtccaaaggcttccgtgattcacctccctgacttcccactcagactccatgttccatgtaaacttacagcaacacttggggagcttgatctattcaagggggtctctcctcaaccaaactgtgaattcctccacttcacctctgggaccctagagcctggcccagggacagcgtggaaataaacttagaaaacgtgagaggtggatctaagttgtggggtaagggagatcagcctgagtgcccatgcagttttcctgcaggagttaggcatatgatttgaaggccagaaaatatttcgtatactttggtgcaatgcgggtgtagttttatatatatatatatatatatatatatatatatgatatataagatatatataagatatatatgagatatataagatatatatgatatatgtataagatatgtatgatacatatatctctctccagaggacctttctttcttctcccttgtttctccttaccttgtgaagaggagcgggagaagggtcaatctttccatcccaaaataggaagttcaaaggtgaggagggtttgcagggaaggccacttagaacaaaacaggaagtcatttccttgggaaatgagttcttggagactgaccattaa

SEQ ID NO: 913645 - DNA, 4001 bp, Homo sapiens
aaaaaggacttaaaactttacaaataaaaaagaggtattaatcccagagaaaaaagctacaattaccaagaaccacacttccaccaaaatttaggagggaacctaacagtaagttatttaaaattacaatatctcctactcccaaaaaaggaatgataatataactaaataactcacattctcaatgaactgggtattagagagcataaggaagtcattgaagacattatgcaggcgacaatctgtggctttggtttcccgaattagtccgtccacttgtttcttgatttcatgggtcctagagatagtttgctgtgagaattcctgtagaaactgtagtagctattttaaaaaataaacatacagtagtatcaatgttacatgtaactattctgcatgtcacatcaaaaaagaacccatttcctttcacctttgagtgttagaatgtgaaagaaatgctttttttttttttgagagagtttcactctgttgcctgggctggagtacaatggcgccatctcggctcactgcacctcccgcgttcaagcgattctcctgcctcagcctcccgagtagctggaattacaggtgcccgccacaacgcccaactaattttgtgtatttttagtagagacggggtttcaccatgttggccaggctggtctcgaactcctgacctcgtgattcgcccacctcggcctcccaaagtgctaggattacaggtgtgagccactgtgcccggctggaatgctggtttgacaagtactaaaaccaagtgacattggaaaacactaagaaagctcatcaaaagagtggcagtgagctaatggacacctatctcgtttctggaaaaatttaaaatccctttttggcactgggtatggtggctcacgcttgtaatccaatactttgggaggctgaggcagggttatcgctagagtccaggagttgcagaccagtctgggcaacatagcaagacccccatctctactaaaattaaataaataaacaaatcagacaggtgtggtggacgcctatagtcccagcttctcaggacgctgaggtgagaggatcacctgaaccccagaggattcagtgagccaagatcaagccacttgcactccagcctgggcgacagggcaaaaccctgtctccttttaaaagtcctctttggttgtcaatctacagagatcacagaccaagggttagctaatcaaccaccactcttattcaaaaatcctattcatttgggactccaacagttctgagctttttgggcccccgatttgaaaaatcccattaaaggatatccacatactggcttgtttcccaccccatttagtccaggtcccaacaggaatcgcctccctagtgcccgagcaatccctcagtgtggcggaaacggatctcccctccggatggagctgagccagaaaccccatgaagggaacgtcgcgtctgggccacggtcagtgtctgcccctctccctggtggccggggactgccagggtggcattctcgggggctaaacggggcgtgtgttcctaagagggcaggcaacgggacgggccaggtgcaggggcagtcgcggtccggccctcctgcgcgcaagccaagcgtcacccctgccgctctcgcgtccccggggcccgcctctcacgcccgcgtcggccgccagcgaccagctctggctgctcctgcggatctcctccaccgaccacggccgctcccacacgggctccgacgctggcgccagctcctggtcgggggtcgtccggttcatctgcagcgaaaaaaacgagaagagaagctgagcctgagggcggcagggacggcggccccagcccaggccggcctctctcctgcccggcgccctcaccatcctagccgcccggctcggtgggctccgaagctgccagcacacgccgaggactgcagagccccggaagcctagccccagccaagctgcccggggcgtgaccggcctcacgtgacctgatgtcacgtgacagaacccgcacgtgatccgacctgccatgctgaggggaggaagctgcggaagtggactgggactggagtttggggttctaccctaggttggggcggaggaagctggaggataggggctgacgccaggaacgctgcagaggcgggttggccgggtggcgctgccccccaaggcccgaggcagcggcgcgggatcggccacagcaccggccgccagttcggcgggtctggaaagaggggacctcaagcagccagtggagcaaccagcctgggagccttcgacgtaggcgctgtgggcgaaggaaaaggcctggcctgctgcctcttctcttgcagcaaaatccgctgctgtgaaggagctggtaggcggacgctctgtagatagagaatccctgatctgcctgggcatcatcttgctctttatgacctgcttggctgccactgtgtagggcctgcttaaagtcctttgcactctcagcattgccctcaagttcaaggacaagcttctcattatggcaggcataaaactctttataattcgtcctccactctcccagctcagggctccagctgttgtctcacacttccttgaagttccctctgctgagtcgcccttgtgcctgaccaacttacttactaaaataaaaatcccaatttctttccagtcatgtgtgcccaagggcgagttatttaacttttctgagctttcctcagtaaaacgaagctacatatcttgcaaggatgtgatattaaagttatgatattgtaaaacaggtgccacggtgcttggcctagggtgagccttcaacctagaacataccactgtccccatgcaccttgctcacacacccaatcccagacttttcttttgtagtcacctcagttatcacctcattaaataacctgattatcccaagtacagcttaagtgacttaagttattttcgatggctagcggaagggtctccactacattggagagctggggtggtctggagttccacggtgtggtgggccagaggccacctctcctgcggtctcttagtgtctcgctggcggggttcggcccgagctagatagacacagcccttggcggatttaaacaacctaaacattaaacaatacagctgcctcaaatctttgggaatttcggaatgactgacactgccaaagctgttccaaattttgaagagatgtttgctagtagattcgcagaagatgacaaggagtatcaggaatacttgaaacgccctcctatgtgctcgtttctaaaattctagaggttaatacaatcagctcatgaatgcacagctatgcttcttgtgatagattgtacataacatcagcagttgaaaggtaaaacaattgcttttttttttttttgcttttgttacgtgactatggtactttgtgattccttactctataatgagaatgagtcgctccacatttatttggatctctttttagagggaaatcagtaataaagctgtaaaataaggaaggaaaaaagttgttttttatgtatttatcctaaggtattacattgtattgtaatcatttaaatatcagtctctcctttaataatagctaacatttatcaagtgttcagtatttaccattttatacattgttcatttaattcacacaatgactatgagggagggaatattatttccaaattatagttgaggaaactgaggtacagaaaggagaagtaacttacttatgattaggtaaccaggaaagaggcagacccgagaacacacactgtgagccaatatgttacagtaacctataacagtgttaacactaaggctgggctggcatggtggctcacacctgtaatcccagcactgtgggaggccaaggcggttcgagaccagcctgggaaacatggtgaaaccccatatctacaaaaaaaaaaattaactggacatggcggcatagatctgtagtttgagctactcaggagaatgaggtggaatgattgc

SEQ ID NO: 913646 - DNA, 4001 bp, Homo sapiens
aaggacttaaaactttacaaataaaaaagaggcgttaatcccagagaaaaaagctacaattaccaagaaccacacttccaccaaaatttaggagggaacctaacagtaagttatttaaaattacaatatctcctactcccaaaaaaggaattataatataactaaataactcacattctctatgaactgggtattagagagcataaggaagtcattgaagacattatgcaggcgacaatctgtggctttggtttcccggattagtccgtccacttgtttcttgatttcatgggtcctagagatagtttgctgtgagaattcctgtagaaactgtagtagctattttaaaaaataaacatacagtagtatcaatgttacatgtaactattctgcatgtcacatcaaaaaagaacccatttcctttcacctttgagtgttagaatgtgaaagaaatgcttttttttttttttgagagagagtttcactctgttgcctgggctggagtacagtggcgccatctcggctcactgcacctcccgcgttcaagcgattctcctgcctcagcctcccgagtagctggaattacaggtgcccgccacaacgcccaactaattttgtgtatttttagtagagacggggtttcaccatgttggccaggctggtctcgaactcctgacctcgtgattcgcccacctcggcctcccaaagtgctaggattacaggtgtgagccactgtgcccggccggaatgctggtttgacaagtactaaaaccaagtgacattggaaaacactaagaaagctcatcaaaagagtggcagtgagctaatggacacctatctcgtttctggaaaaatttaaaatccctttttggcactgggtatggtggctcacgcttgtaatccaacactttgggaggctgaggcagggttatcgctagagtccaggagttgcagaccagtctgggcaacatagcaagacccccatctctactaaaattaaataaataaacaaatcagacaggtgtggtggacgcctatagtcccagctactcaggacgctgaggtgagaggatcacctgaaccccagaggattcagtgagccaagatcgagccacttgcactccagcctgggcgacagggcaaaaccctgtctccttttaaaagtcctctttggttgtcaatctacagagatcacagaccaagggttagctaatcaaccaccactcttattcaaaaatcctattcatttgggactcgaacagttctgagctttttgggcccccgatttgaagaatcccattaaaggatatccacatactggcttgtttcccaccccatttagtccaggtcccaacaggaatcgcctccctagtgcccgagcaatccctcagtgtggcggaaacggatctcccctccggatggagctgagccagaaaccccatgaagggaacgtcgcgtctgggccacggtcagggtctgcccctctccctggtggccggggactgccagggtggcattctcgggggctaaacggggcgtgtgttcctaagagggcaggcaacgggacgggccaggtgcaggggcagtcgcggtccggccctcctgcgcgcaagccaagcgtcacccctgccgctctcgcgtccccggggcccgcctctcacgcccgcgtcggccgccagcgaccagctctggctgctcctgcggatctcctccaccgaccacggccgctcccacacgggctccgacgccggcaccagctcctggtcgggggtcgtccggttcatctgcagcgaaaaaaacgagaagagaggctgagcctgagggcggcagggacggcggccccagcccaggccggcccctctccggcccgccgccctcaccatcccagccgcccggctcggtgggctccgaggctgccagcacaggccgaggaccgcagagccccggaagcctagccccagccaagctgcccggggcgtgaccggcctcacgtgacctgatgtcacgtgacagaacccgcacgtgatccgacctgcgatgctgaggggaggaagctgcggaagtggactgggactggagtttggggttctaccctaggttggggcggaggaagctggaggataggggctgacgccaggaacgctgcagaggcgggttgggcggggggcgctgccgcccaaggcccgaggcagcggcgcgggatcggccaaagcaccggccgccagttcggcgggtctggagagaggggacctcaagcagccagtggagcaaccagcctgggagccttcgacgtaggcgctgtgggcgaaggaaaaggcctggcctgctgcctcttctcttgcagcaaaatccgctgctgtgaaggagctggtaggcggacgctctgtagataagagaatccctgatctgcctgggcatcatcttgctctttatgacctgcttggctgccactgtgtagggcctgcttaaagtcctttgcactctcagcattcccctcaagttcaaggacaagcttctcattatggcaggcataaaactctttataattcgtcctccactctcccagctcagggctccagctgttgtctcacacttccttgaagttccctctgctgagtcgcccttgtgcctgaccaacttacttactaaaataaaaatcccaatttctttccagtcatgtgtgcccaagggcgagttatttaacttttctgagctttcctcagtaaaacgaagctacatatcttgcaaggatgtgatattaaagttatgatattgtaaaacaggtgccacggtgcttggcctagggtgagccttcaacctagaacataccactgtccccatgcaccttgctcacacacccaatcccagacttttcttttgtagtcacctcagttatcacctcattaaataacctgattaccccaagtacagcttaagtgacttaagttattttctatggctagcggaagggtctccgctacattggagagctggggtggtctggagttccacggtgtggtgggccagaggccacctctcctgcggtctcttagtgtctcgctggcggggttcggcccgagctagatagacacagcccttggcggatttaaacaacctaaacattaaacaatacagctgcctcaaatctttgggaatttcagaatgactgacactgccaaagctgttccaaattttgaagagatgtttgctagtagattcacagaagatgacgaggagtatcaggaatacttgaaacgccctcctgagtcctctccaattgttgaggaatggaatagcagagctggtgggaaccaaagaaacagagacaatcggttgcaagatagcagacagttcagaggcagggacggcagatgggggtggccaagtgacaatcgatccaatcagtggcgtggacaatcctgcggtaacaattacccgcaacacagacaagaaccttactatcccgaccaatatggacattaaggttacaaccagctgcccccttacgatagaaatgttggcagcttttagtaaaagcatttactgtgttaccacgacaaaagtttgggtgtcttctgtcggtcatagttggttttttttgttgtcgtttgtttgtttgtttgtttgtttttgagacggagtctctctctgtcgcccaggctggagtgcagtctcggctcactgcaaggtccgcctcccaggttcatgccattctcctgcctcagcctcccgagtagctgtgactacaagagcccgccaccacgcctggctaattttttgtatttttaatagagacagggtttcactgtgttagccaggatggtctcgatctcctgacctcgtgatccgcccgcctcagcctcccaaagtgctgggattacaggcgtgagccactgcgcccggctcggtcatagttttacatctgattttacagaatggattattgattttttggaagttgagactttaaaaaaaaatacatcttacttgcgagatgcgat

SEQ ID NO: 913647 - DNA, 4001 bp, Homo sapiens
attgttgggggtatctgggaagtttagtgctgaagccaatcaaacatgaacaccagccctacattaaggctctctcccttgtctcaaattcctcttgaatcccttcctctcctacgactgctataaatgtaaactcaggttacaaaagtaagggtaagtgaattgcaagcaatcacccagctggtgactgcaggcccccgagatgcaggaatgatgggaaggtgctgcattcagctgtgccccaggctccgggatgtgtctctgtgaaccccttagaatggactgtgtctgacaaccaacctctctggtacttgaagagtcttctccccaaactgtaattgtcttttgttcaacctacattcccttttctttctgctgtctcccaggatattcacacatgtcagctgtcccagagtcctaaagatccacctctttgttctcaaggccaccagaaataaatgaaggaacactctgagagctcccaactcaggcaagaggagatcaatccagcccatcctccgcatgagcacaaggcagaggctcattaatgcagtctccctacggagtcttcagcctacggtgcccaggggaggtactggccaaggtgctgaacagagtggggcactggccaaggtgctgaacaaagggaggcttggccaaggtgctgaattaaacacctgatggtaaactcattgaggtccagtgacagccaagcaccactgacactcacagccttaaactgagaacattctacaaacccccggcagaagggtaaaagattttacactcagctgccatttctgccttttcaaaactgcttcttgttcttgtcctcactcactcaggggtatggccacagcagaaaggaatgaccttgctcaaatagggagtccaggtatcccatttgaggaggtgtaattcattttcccccacatgactcactttagtgccttagctactttgaagtaaagacagaacacaacacttaggagcaccatcgcggcaaccagtaagctgcttccgatgccgatcatgatcttcgtcctgagatcaaacatctttgccatgcctaaggagaaagtgcagggaagcagaacgtggccttcctccccacacagccactaaacaaccttccgttagtagaggaagagtgaaccccagacacatgtaaactgcaagcaaatctttccagagagtcctaggatcctaagctggtccaggggcagacaaaaggacttatttatgggtaaaaatggacttaaatgcaaactccagagggaaggaaatcataatgacagacagtgggaagaatctttccctctcacaggcatgatgtgcagctggaaatgaccacaggcctgccttggagctgatgacttcactccccaccacctgggccctgaaatatgttcactcagagggtcagaagtcacccctcactgtatattaggtttaaaattattttatgaaactaagagaattagtttaaaaagtattgtccaacaatactgagaatatgaaaatctattttgtaagtgataagtattttgggaaaaacagttttcaattttcccaccaacaactgggttatctcagggtttaaggagattcctgacacttccagccaaacctttgccagggctcagaaatgggacgtggtctgcagagaccaggagccagcttattcaggagcccctgtccctcattctgtcttcctagtagaccataggcctacctctgccatttttcctagtaaatactaaattctcccaggaaacccaatttgtttggaataagtaatttgcttaatctaacactgtgaaactgaggaacagtgagccaggagagaagaataaccaatctgatagctaagcatacttactacagttcaaccatccagagctagatgaaggccaattgtaacaataaaattaagggaaaaaaacctctagggcatcggatatttggaacttctcaaacctgtaatctgagaaagagggacctaattatccctgctaggagtaattaagatccaaggttgaacagctcagctcacttttggaagctcaggctcagccagagctggtagaatgggcctattctgacattcatgccacaggctgtgtgacatcagctctcgggacaccagctgtctttcatggagttctgaattctattccataggtatatttttgcttttgtgaaatataaatactattttgaatcacttaattctaagtctttcaccttttcaggtcttatttcccttccattaatttttggagtttgactgctaatcaaaatcaagtttgagatttcaatttagcaaataaaagaaaaagaaatgtgggaagggtaaaataacctcacatttaaatttcaattatagaagactggttagactttagattttagttgcacaatgaaataatatggagccgtttactaggattcaagcacacttccattgacatgggaagattttaatgctttatagttaaaaaaagtacaaaaatgaaagttgaacaggatatctgttctagtctggtttgtatgattttaaggtacttatatccagccagtgtagtaaaattaaatgaagagacaccaggttcaaggaagattgtgtagacatgtttctccctgctaagcataactattattcctggaaataacacaaatcaaacaaaggagaactctgaaattggaaaggagaaagcaaactactagggaccccaggcctgggtaagctccatagcagtagaacaggggaggtagacaggcctggtgttttccaatgctcaatctagcttattccattcccggatttaatgtgagtcctgctgacaaccccaggctttcccagcagcagtggcaagttgggtggattgtgaaccccattggcaataagcctgcaggggaagtgctcatcttccttgctagtcatgagactcccctcctcagaccctgcagggatctgaccacattcagtgacctagcccaggaagcactctgttcccatgtgctagagacccccctggactccaggtggctccagcttggggaccctccttctgtccctcaggcagcactttcggggacctagaagccccagtgacaccagataaatgaagtagaccaaaatatcaccacgaaacctctgaaaattaaattggaattggaatctaatcccacaaaagtaagccaggatctgcatgctaaacctagtcagtgactaactaataaaataaaatatttaaataggacctagagtctcctagcataaagtcaaaatgtccatgattcaatgaaaatggtattacgggtattatcgcccgtaataccaataaccagaaaagtcacgcccgaatgagaagagacaatgaattgatgtcctgagcatggaataagtttggtgtggtcaaggaacaagaaaaaggccatttgactggagatgcataaaagcgaagatggcaggagaggacttggaaaaaattggccaaggataccaacatgcagggcttcgagctctagtataatcttagattttttttctgcctgttacagaacatccttggaagatgttgattgggattttagtaagaaactcatgcaacctggctggggaggctgtgcttttaaacatagaccagtggttacagaagagaaaactgaggtcaagtaaggtcaaatactttctccaaagttacataacaagtaagtgactaaggtggaaggagaattcaggtttctttacctagtgttttttcctataagccatcttgagcatgtatcttctgagggtatttggagagatgatctcagaatgggcagaaaactaaaatcctaggcttccttgcttgatgaaggcatgggactgtctttcagtatgaggaagtagggacatgggaaaaggaaggggcaactgggcagatgctaacatttgctttaccttgagaggcagccatggaggaagagttgcttcacctttccatagattt

SEQ ID NO: 913648 - DNA, 4001 bp, Homo sapiens
tgatgcaaaagcagttgagtttgggggaaggcctatgataatttaaactatagcctaaatgtcccaaaagcccaagaataatcaaggcaagactggggatggattagctcagatctctttcactgtcataattttctcactaacttttgcaaagttttttcagctttgaaaataagattgaatttgccagtttcacctctttctactcctgttatactgtgatagagttcccaaacaacccctattgctatctctatcaattccatacaacaaacctatactcaatctctactaggcacaaaacaattcctattttcaacaactgtacagatggttgggaaaacaaatgtgagaattatttggtaaagctccataccagaagagaattatagtatctaaaaactctaagtgtagcagagagaaattactgacaaattctctcacagtgtggagggctgtgcttggcactaaatgatgaacaggatttttcctatccaaaagaaggggcattctaggtagagggaaaagcatgtacaaaagctggggggtctaggaggcaggcagaagtcaaggataaagggctttgtatgcctgttaagaagtaatggtggccaggtgcggtggctcacgcttgtaatcccagcacttttgggagccgaggcgggcggatcacttgaagccaggagtttgagaccagcctggccaacatggcaaaaccctgtctctcctaaaaatacaaaaattagctgggcctggtggtgcacgcctgtagtcccagctactcagaaggctgaggcaggagaatcgcttgaacccaagaggcggaagttgcaggagccgagatcacaccactgtactccagcctgggtgacagactgaaactccatctcaaaagaaaaaaaaaagtaatggtgatggtgattcagtcagaaagcatcaagcatcaggacaattgataaaagattagagggcagtgcagaaaatgaaacgcaggtgaggagataatgactatcaaccagtaaagaaactcctggaattgttccgatgaaagctagtatttcaaaacagagaggcagagatggagaaagacagggaagtttttctttaaaaaccaaaaataaaacaagactgggtgataatactgaacatacgagattgaaagaaaggggagacgacaaaatgctgtaggctttctgccttatttaaggaagtcaaaatccagcttatagtattgatcttgctcatgaagtttcagataggtaattctaaaaagcctattttcctttagactgtccaattatgatgacatgtatcaaagttaacttatgactacaatgggctgggcataaagaacaggaagtctggtgtacacaacttagaatgcatctggagtacaaaaggaagaaagaggcaagatctacttcctattccatggggcatctggaaaactccctcaggcgaccgctccatccaaacacctgggatctttctcaaccttctgatttctgtcacgagggcatccagcatagtcctggcaacgccgtaggatcagggagcatcaaatgagatggcacctggggaaggcccgtgtggcccagcgtccaccactaacgccgttcaatatctacctcaactcccctctaacgcgagaatgtgtatgagagaggcagggagagttcggagtaaaattaacccgaatggacagcgcttccgccgcgttcgctgccacaaatgctgcagacccgacggagtggaggcagaaaaggccctggcgtccactcgggaaagaacgaggtcaggagtcggtcctgcacatcgcgtagagcgaagagacgacacctacctgaccatagacgctccccatccgcccagcaaccgtggtccatgctgcctgcgtccaccgccagcgtcgaaaaaccgccgtggtgcccgcgcacagtgcaccgcgcctgcgcatggtctccaaaggctgagcgagggcctgccagtgcgcatgctccgctctttagcgcttcctgagcaaagtttgaacgcctctcgagtccagttggcttatgcgcatgcgtttctctggtgcaggttctcaccaaatccagaagcggcgggcatttgaaatgatgtaagccgggagtcgctctgcctgcccgtttctgcgctgcactggccgacacttaagcactggaagagaggcctggcaggaggcggcgcagtggacacgcggtccgaggacgggggcctcacccgccgccccacgcttgcctcttcctgggatgccgcaggcggggccctaactcacagcctcctcacccgggctcgtgtctgcgcccgcgacttcgactgggaggagcttctggcgccacctgcgccacggtgcgccgggccgccggcgaccgggtcgctgcgctcggcgactgccgcgctcctcggggaacgtgagggtctgagtccgggatccaggagagcagttggtgtcgggtctctgcgggggagcggggctgcgaggtggaggcgaggaccggggtgggcggaggcggggtaggtctggccgggaagtacccgaggccccgaggcatgagcgggggaaggtgaccaggacttggaatttcataaacgtccccgtcaggcgtgacgggtcgtcagggctgctatcaaagtcagtccgcccatctaccctcaaacaagccacctcctctccaccaaaacaggctgtgtaaaaagtccagctatagacgaccgccgtcgacttaatttcgaaaaagatacactttgtcttctattgtgttctgctcctactcctgtgcacacagtaggtgtccagtaatgtatccgagaatcaattgcaggggactgagtagaacgttgatgattgaggaaaaaatagagggggaagccctgatgtgtgatgcctccatttccttatgaattctgtgttgagcatttgttagaataaacctcatggcctaacaagtgggttttgagccatgttcagaaactatactgtgtgatgttttcacctgttttcttctcagccagaatctggtgatttagaagagaagattgaacaaccaagatgaaaacccctgcttcctttacctgaggtgtggccctgatggaggtgaagaaatcgcttctattggcattttaagttcagcaagaaatatggaagtgtacttaggagaggagtactgtggaaccagtaggggcaagaatgtttgtactgtcttggatgacagttgtgtgacttgtacacgggaaagtgttctcctgaattggtgtctttattctgttcaccttttgcaatattgattgactctctgacattgatgtttacattagagaagagaagataaaaacctactatggcatagaaggttagaccattaaagcatcttctaggcaatctagttcagcttcctcatttttaggaatgcagaaatttagagctaataaaggagaggtgagcctggagagggtcatactagttaaagtgtccaggcaagagtgcagtccttattgctgcttcttgactctctccataaactcacaatggtctgttttccagaaattaatttgacagtcagtctgaaactttgatcacatattttttaaggaacctacaagcccaaggtggtgccacaccagcctatttagtccatattcaatgtgttatagtttgatcttttccctagtcccttataggaacattctacactaatcgcgccttaatataaatcaaaacgtcaactattttacatattgtgcatattggaaataataaatacacgacacagggttattgaccaggtcacttgagaagggatctcaactgtttgtcccctaccaggcaaactgaatctcaggatttaagtaatggcctggaaacaatttttttttactgcagctgtttaaactgataatttatataagtgaaaaaataatttttattctattttcagtaaacgcgaaattattttctacaaaaattacttaatattggcatc

SEQ ID NO: 913649 - DNA, 4001 bp, Homo sapiens
gtgagggctcagagcagagccgctgccctcccagtccagggtgagggctcagagcaggcccactgccctcccagtccagggtgagggctcagtgctggcttatcctcacaatggacctatacatccctggacatcctagatggggctctgggatgccacccccagccaggacagactggctcatgagaaggaccttcccccacagctggcttccttcggagacgccagggccttggctgccgggagacgagctcagtgagccccatgagggcatgggtccctgaagccccttggccctgcccggcctggaatggcaatgagcaggccatcttgccagctgagacatgaagcccaggctgggcctctgtgccaggtcacacccctctcaggatgtgctagcgcctgcctcaggttggtttccaaagcctcatccagtaaaaccaggtctctcaaagcaattcctccaacaaaagggaattctctgcctacttcagagttttttaaagtgtaggtggtagcatgctagaactgaaggatttcagagtcagaagaaatggttcttattctaactctaccttccacctcttggttccctcatctttagaatgggaatctgttggggtgatgagacccaacaccaggtcgcgggggcggcaagtccagaggagtcaaaggaatgagaaagagacagtttgagagagaaaatgggagcggggcgccatcgcgagtgtggaggctgcgaaggcccggagttctgggaacccatgctatttattggtgatctaacaaagaaacaggtggtgaggatgtggcggttgaaaggaaacggtgtatcaagtgaatgagaaacatacggctacttgagaaaatgggagtgctagaagcaaggagccagccaatctagcaagccctgcctcagcttctctcccaacactcagcttttctcccaacaggaatcatacaaaactcagaggctagtgaaaggttaaagcaggtggtccacaccagctgcagagtcaaaaacaaaatacgcgtctgctgccatttagaaagaggacacaaactcaggcaagactgtttttcacacgatgacccatgagtggctcctggctgggcctccccacacatagctgctgacctctgaatacaacatacacttcgggaccaggtgcggtggttcacgcctgcaatcccagcactttgggaggccaagaggaatggatcacttgaggtcaggagtttgagaccagcctggccaacatggcgaaaccctgtctctgctaaaaatataaaaattagttgggcatggtggtgggtgcctgtaatcccagacactcaggaggctaaggcatgagaatcactttgaacccaggaggcagaggttacagtgagccgagatcgcaccactacactccagcctgggtgccagagcaagactccatttcaaatacaaataaaaataaaaataaacatgcttcaggggacttggatgaaattgaaaatgccctttttgactttgaacagacttggtgacttgtttagaaatctttgaagctttaaagttatggtaaaaataaaaatccatcttccttttcctgcataggttattcagaataggctgttttgacaagaaaggctccccagatttccagagggaagggtccaagctgccagtgttcacccagcaccaggactcatgccctgcccccaggagacctccccaggtctgcacccctcaactccgtgctgacttggtagagcaggggaccagggttcctgaggggccaaggcctcctcccaggtcctcacctgcctacttagatccgcctcccacagacccagtctgccccagatccccccagcccaggtagaaaggagccccaggtcctcactggctccctcggtggccttctcggtgcggtgggccaggccttcggcagccagcttccccaggcctcccagcatcgtgtggcagcagacagtggtgaactaggatgctgaggactggcccaacatgcttttatagctgcctctggtgcctgtctaggctctggggcaacaagcccttgccccagcccagtaggaggctggacaggtgagtcagcgagggcggcagcaggaaggggctgggcggagccaccctggcactggggtggcagcatcccctgacagcctgaggcttctgtaaccctgtcctagggaccccgtgaaggataggggcagggagcagggctggacaggagagatctggacatgcctcttccttgaggcagagggcctgagtgccagccccccgagaccaaaacttcccaagcctgggtactgatatgtacctggagacaaggcctaggattccaagcctgctgctcaaggtccccagtgtggcctagtaagaggtttaggggttctatgggcctggagacctgggcagtcctttgggtcatgaacacaagtggagtgagggtgactgccctccccattcctggagaccctggctctgcagagcagtttgtggcctctatgggacagggtggggcgttcagggtggtgccttgcctgagtcagaggggggcacagcactgggcagaagtgtagtcacctggctttgctcagctgatgctcactcacccaagagtgtctgtgaggccagcagtgccctcctatcccctggcagtcctggaggagtagacagaggcctccaccaccactcagggagatgcttctggccttagctagaatcccctagaaagcagcttccctggctcctggtgcatcacatgaggagtggcagggctgctccctagttactcatgatggacagacatgcctcaagccacctgccacatgctgcttcccttagtcaccagcccaacctgagcctccgtttcctcatctgtaaaatggggatagcgtgccttcctggctgtgtcactaatcgtccctgagacaaagcatgcaagctcctggtaaacacctgttccctccactcatcattgaggtgccctttggcagtgagctctgaccaaccggtagggtgggccaaggagtgactgggacgtgaggctgccttggagccagagggctggggaatgtgacttccgctggccaggagccaaggagaggtcttcccatcctcctacttctggggtgcaggcctgtggcaggggtctgaggctctctcttcaatgcaggctcctggagctgctctcctgggtgtgttggggcctgattagtttactggactgtgggccctcccagcctgggactcgggagctgagaccctcttgcattcctgcatggtgtttgcgggctccagggctacggccagtccccctagggtggacagtgggtatcgtgggcagcaggacctctgggtctcaagactacggccccacacatgccattgctatctcctttgggcaggggtgaattggggcttaaacaatttagaggggccctctttatgaaaaagaatacaataatatgattcttgcacatttttcatttatatacgtatgaacttctggacccagaaggggctgtgaaagtcgggggcctggagctcaggcgggtccagatgaccctgtcctccttttgtaacagccagagtccaggatgtttttgcccagggcattgggctggcactgcagaggcctgggggatggggggacacctgggacatggctggtgggaattgttctaggaaacctcagggattctccctggacctgtcaaagccccttccctgtttcttctgaggctgtgtgtcccccactcgcacaagggtcctttctatgcctgttccgctgataaatgtcatctgcctgctctagaatggcttccagaccccacagaccccctcctcacgagctcccaccctagggtactctccaccagtccccgctttcaggagctcaccagactcagacagcctgttgtcagagctcagccacacagcaggaccctggcccactgcccagaccagagccaggcccaccgca

SEQ ID NO: 913650 - DNA, 4001 bp, Homo sapiens
ccgagtccagggtgagggttcagagcagagccgctgccctcccagtccagggtgagggctcagagcaggcccactgccctcccagtccagggtgagggctcagggctggcttatcctcacaacagacctatacatccctgggcatcctagatggggctctggggtgccacccccagccaggacagactgactcatgagaaggaccttcccccacagctggcttcatttggagacgccagggccttggctgctgggagacgagctcaatgagccccatgagggcatgggtccctgaagccccttggccctgcccggcctggaatggcaatgagcaggcagtcttgccagctgagacatgaagcccaggctgggcctgtgtgccaggtcacacccctctcaggatgtgctagcgcctgcctcaggttggtttccaaagcctcatccactaagaccaggtctctcaaagcaattcctccaacaaaacggaattctctgcctacttcagagttttttaaagtgtgggtggtagcgtgctagaactgaaggatttcagagtcagaagaaatggttcttattctaactctaccttccacctcttggttccctcatctttagaatgggaatctgttgggatgatgagacccaacaccaggtcacgggggcggcaagtccagcggagtcaaaggaatgacaaagagacagttcgagagagaaaatgggagcagggcgctatcgcgagtgtggaggctgcgaaggccccgagttctgggagcccacgctatttattggtgatctaacaaagaaacaggtggtgaggatgtggaggttgaaaggaaacagtgtatcaagtgaatgagaaacatatggctacttgagagaatggcagtgctagaagcaaggagccagcaagtctagcaagccctgcctcagcttttctcccaacgctgagcttttctcccaacaggaatcataaaaaactcagaggctagtgaaaggttaaagcaggtggtccacaccagctgcagagtcaaaaacaaaatacgcatctgctgccatttagaaagaggacacaaactcaggcaagactttttcacacgatgacccatgagtggggcctggctgggcctccccacacatacctgctgacctctgaatacaacatacacttcgggaccaggtgcagtggttcacgcctgtaatcccagcactttgggaggccaagaggaatggatcacttgaggtcaggagtttgagaccagcctggccaaaatggcgaaaccccgtctctgctaaaaatacaaaaattagtcgggcgtggtggtgggtgcctgtaatcccagctactcaggaggctgaggcatgagaatcactttgaacccaggaggcaaaggttacagtgagccgagatcgcaccactacactccagcctgggtgccagagcaagactccatttcaaatacaaatacaaataaaaataaacatgctttaggggacttggatgaaattgaaaatgccctttttgactttgaacagacttggtgacttgttaagaaatctttgaagctttaaagttatggtaaaaataaaaatccatcttccttttcctgcataggttattcagaataggctgttttgacaagaaaggctccccagatttccagagggaagggtccaagctgccagtgttcacccagcaccaggactcatgccctgcccccaggagacctccccaggtctgcacccctcaactccgtgctgacttggtagagcaggagaccagggttcctgaggggccaaggcctccccgcaggtcctcgcctgcctacgtagatccgcctcccacagacccagtctgccccagatccccccagcccaggtagaaaggagccctgggtcctcactggctccctcggtggccttctcggtgcggtgggccaggccctcggcagccagcttccccaggcctcccagcatcgtgtggcagcagacagtggcgaactaggatgctgaggactggcccaacatgcttttatagctgcctctggtgcctatctaggctctggggcaataagccctcaccccagcccagtaggaggctggacaggtgagtcagtgagggcggcagcaggaaggggctgggcggagccaccctggaactagggtggcagcatcccctgacagcatgaggcttctgtaaccctgtcctagggaccccgtgaaggataggggcagggagcagggctggacagtagagatctggacatgcttcttccttgaggcagagggcctgagtgccagcccccctgagaccaaagcttcccaagcctgggtactgatatgtacctggagacaaggcctaggattccaagcctgctgctcaaggtccccagtgtggcctagtaagaggtttgggggttctatgggcctggagacctgggcagtcctttgagtcatgaacacaagtggaatgagggtgactgccctccccattcctggagaccctggctctgcagagcagtttgcggcctccatgggacagggtggggcgttcagggtggtgccttgcccgagtcagaggggggcacagcactgggcagaagcgtagtcacctggtgtcgctcagctgatgctcactcacccaagaggctctgtgaggtcagcagtgccctcctatcccctggcagtcctggaggagtagacagaggcctccaccaccactcagggagatgcttctggccttagctagaatcccctaggaagcagcttccctggctcctggtgcatcgcatgaggagtggcagggctgctccctagttactcatgatggacagacatgcctcaagccacctgccacatgctgcttcccttagtcaccagcccaacctgagcctccgtttcctcatctgtaaaatgggcatagcgtgccttcttggctgtgtccctaatcatccctgaggcaaagcatgcaagctcctggtaaacacctgttccctccactcatcattgaggtgccctttggcagtgagctctgaccaactggtagggtgtgccaaggagtgactgggacgtgaggctgccttggagccagagggctggggaatgtgacttctgctggccaggagccaaggagaggtcttcccatgctcctacttctggggtgcaggcctgtggcaggggtctgaggctctctccccaatgcaggctcctggagctgctctcctggatgtgtcggggcctgattagtttactggactgtgggccctcccagcctgggactcgggagctgagaccctcttgcattcctgcatggtgtttgcgggctccagggctacggccagtccccctagggtggacagtgggtatcgtgggcagcaggacctctgggtctcaagactgtggccccacacatgccattgctgtctcctttgggcaggggtgaatcggggcttcaacaatttagaggggcctctttatgaaaaagaatacaataatatgattcttgcacatttttcatttatatacgtatgaacttctggacccagaaggggctgtgaaagtcgggggcctggagctcaggcgggtccagatgaccctgtcctccttttgtaacagccagagtccaggatgctttgcccagggcattgggctggcactgcagaggcctgggggatggggtgacacctgggacatggctggtgggaattgttctaggaaacctcagggattctccctggacctgtcaaagccccttccctgtttcttctgaggctgtgtgtccccccactcacacaagggtcctttctatgcctgctcccctgataaatgtcatctgcctgctctagaatggcttccagaccccacagaccccctcctcatgagctcccaccctagggtactctccaccagtccccgctttcaggagctcaccagacccagacagcctgttgtcagagctcatccacacagcaggaccctggcccactgcccagcccagagccagg

SEQ ID NO: 913651 - DNA, 4001 bp, Homo sapiens
ctgagtccagggtgagggttcagagcagagccgctgccctcccagtccagggtgagggctcagagcaggcccactgccctcccagtccagggtgagggctcagggctggcttatcctcacaacagacctatacatccctgggcatcctagatggggctctgggatgccacccccagccaggacagactggctcatgagaaggaccttcccccacagctggcttcatttggagacgccagggccttggctaccgggagacgagctcagtgagccccatgagggcatgggtccctgaagccccttggccctgcccggcctggaatggcaatgagcaggcagtcttgccagctgagacatgaaacccaggctgggcctgtgtgccaggtcacacccctctcaggatgtgctagcgcctgcctcaggttggtttccaaagcctcatccactaagaccaggtctctcaaagcaattcctccaacaaaacggaattctctgcctacttcagagttttttaaagtgtgggtggtagtgtgctagaactgaaggatttcagagtcagaagaaatggttcttattctaactctaccttccacctcttggttccctcatctttagaatgggaatctgttgggatgatgagacccaacaccaggtcacgggggcggcaagtccagcggagtcaaaggaatgagaaagagacagttcgagagagaaaatgggagcagggcgctatcgcgagtgtggaggctgcgaaggccccgagttctgggagcccacgctatttattggtgatctaacaaagaaacaggtggtgaggatgtggaggttgaaaggcaacagtgtatcaagtgaatgagaaacatatggctacttgagagaatggcagtgctagaagcaaggagccagcaagtctagcaagccctgcctcagcttttctcccaacactcagcttttctcccaacaggaatcatagaaaactcagaggctagtgaaaggttaaagcaggtggtccacaccagctgcagagtcaaaaacaaaatacgcatctgctgccatttagaaagaggacacaaactcaggcaagactttttcacacgatgacccatgagtggggcctggctgggcctccccacacatacctgctgacctctgaatacaacatacacttcgggaccaggtgcagtggttcacgcctgtaatcccagcactttgggaggccaagaggaatggatcacttgagggcaggagtttgagaccagcctggccaaaatggcgaaaccccgtctctgctaaaaatacaaaaattagtcgggcgtggtggtgggtgcctgtaatcccagctactcaggaggctgaggcatgagaatcactttgaacccaggaggcaaaggttacagtgagccgagatcgcaccactacactccagcctgggtgccagagcaagactccatttcaaatacaaatacaaataaaaataaacatgctttaggggacttggatgaaattgaaaatgccctttttgactttgaacagacttggtgacttgttaagaaatctttgaagctttaaagttatggtaaaaataaaaatccatcttccttttcctgcataggttattcagaataggctgttttgacaagaaaggctccccagatttccagagggaagggtccaagctgccagtgttcacccagcaccaggactcatgccctgcccccaggagacctccccaggtctgcacccctcaactccgtgctgacttggtagagcaggagaccagggttcctgaggggccaaggcctccccgcaggtcctcgcctgcctacgtagatccgcctcccacagacccagtctgccccagatccccccagcccaggtagaaaggagccccgggtcctcactggctccctcggtggccttctcggtgcggtgggccaggccctcggcagccagcttccccaggcctcccagcatcgtgtggcagcagacagtggcgaactaggatgctgaggactggcccaacatgcttttatagctgcctctggtgtctgtctaggctctggggcaataagccctcaccccagcccagtaggaggctggacaggtgagtcagtgagggcggcagcaggaaggggctgggcggagccaccctggaactagggtggcagcatcccctgacagcatgaggcttctgtaaccctgtcctagggaccccgtgaaggataggggcagggagcagggctggacagtagagatctggacatgcttcttccttgaggcagagggcctgagtgccagcccccctgagaccaaagcttcccaagcctgggtactgatatgtacctggagacaaggcctaggattccaagcctgctgctcaaggtccccagtgtggcctagtaagaggtttgggggttctatgggcctggagacctgggcagtcctttgggtcatgaacacaagtggaatgagggtgactgccctccccattcctggagaccctggctctgcagagcagtttgcggcctccatgggacagggtggggcgttcagggtggtgccttgcccgagtcagaggggggcacagcactgggcagaagcgtagtcacctggtgtcactcagctgatgctcactcacccaagaggctctgtgaggtcagcagtgccctcctatcccctggcagtcctggaggagtagacagaggcctccaccaccactcagggagatgcttctggccttagctagaatcccctaggaagcagcttccctggctcctggtgcatcgcatgaggagtggcagggctgctccctagttactcatgatggacagacatgcctcaagccacctgccacatgctgcttcccttagtcaccagcccaacctgagcctccgtttcctcatctgtaaaatgggcatagcgtgtcttcttggctgtgtccctaatcatccctgagacaaagcatgcaagctcctggtaaacacctgttccctccactcatcattgaggtgccctttggcagtgagctctgaccaactggtagggtgtgccaaggagtgactgggacgtgaggctgccttggagccagagggctggggaatgtgacttctgctggccaggagccaaggagaggtcttcccatgctcctacttctggggtgcaggcctgtggcaggggtctgaggctctctccccaatgcaggctcctggagctgctctcctggatgtgtcggggcctgattagtttactggactgtgggccctcccagcctgggactcgggagctgagaccttcttgcattcctgcatggtgtttgcgggctccagggctacggccagtccccctagggtggacagtgggtatcgtgggcagcaggacctctgggtctcaagactgtggccccacacatgccattgctgtctcctttgggcaggggtggatcggggcttcaacaatttagaggggcctctttatgaaaaagaatacaataatatgattcttgcacatttttcatttatatacgtatgaacttctggacccagaaggggctgtgaaagtcgggggcctggagctcaggcgggtccagatgaccctgtcctccttttgtaacagccagagtccaggatgctttgcccagggcattgggctggcactgcagaggcctgggggatggggggacacctgggacatggctggtgggaattgttctaggaaacctcagggattctccctggacctgtcaaagccccttccctgtttcttctgaggctgtgtgtccccccactcgcacaagggtcctttctatgcctgctcccctgataaatgtcatctgcctgctctagaatggcttccagaccccacagaccccctcctcatgagctcccaccctagggtactctccaccagtccgcgctttcaggagctcaccagacccagacagcctgttgtcagagctcatccacacagcaggaccctggcccactgcccagcccagagccagg

SEQ ID NO: 913652 - DNA, 4001 bp, Homo sapiens; identical to SEQ ID NO: 913650

SEQ ID NO: 913653 - DNA, 4001 bp, Homo sapiens; identical to SEQ ID NO: 913651

SEQ ID NO: 913654 - DNA, 4001 bp, Homo sapiens
aaagaacaacaaaaacaataaaactaagcttttaaagatttttcctcagaacataaacaaataatttaatccaaaaagaaaaatatttccatgtttactgatgctaatcattttattctgaaactccgtgggttttttgcaggagtgggggattgcaatgtaagagagtaaaacgataatacatccagaaaaaaggaaatttgataccttaatcttttgaccatcaaggaaaattcaggattcaggtcagagtacatttttcactgaaaaacacagtgcaaatacaattaatgacaatgacttatttagcaagtaaggtaaaatataagttccacctgtatgaaaagataattttgactttgagagtacacttagatgaatgtcatttaacagatccaggttgtcaccttatattttacacaatatttcgagaactaagaactttctcttccatattctaaaagatgaataacatgaacatatcgggaagcaccatcgttttgcaggtccaatgggtgtcattttaaaaccacccaagtacactgagaccgctaacgctagtaatgtggtgtttggcagctagttttaatgactgtcattagagctttattttttattttctttttatagagacgagcccaggctggtcttgaactcctggcctcaagcgatcagcctgctttggcccccaaagtgctgggattacaggcgtgagccaccgtgccagcctcgttagtttgaaaagcaccaaaagctatccataggaatgtgaactttagcatttcctatcaagtatgtataaatacataactgaaccctcatacagcataaagcttataaatcatatactgaggccaggcgcggtggctcacgtctgtaatcccagcattctgggaggcctaggcgggcggatcacttgaggtcaggcgttggagaccagcctggccagcacagcgaaaccccgtctctactaaaaatgcaaaaattagccgggcgtggtggcgcgggcctgtaatcccagctaccccgaggctgaggcaggagaatcgctagaacgaacccagggaggtggaagctgcagtgagccgagatggtgccactacactcccgcctgggcgacagagcaagattccatctcaaataaataaataaaataaaaaataaatcatatactgaaccatttaacaaatacatatattcctgagaaagaatttcctgggggcattatcgcatttctagtttccttattttagactatttcagagggagatagggtctccctctgttgcccaggctggggtgcagtggagctatcgtagctcactgcagcctcgaactcctgggctcaagccatcctccagcctcgacctcccaaagtgctaggactaaaggcgtgagccaccgcgccgggccggagcctctgtctgcaaaggtgaagcagtcagtactgtggggcgacacaaccacgacgtgcgtaactatgcgatctccacactgcggagcagttgaacgggacaataaaagctcgcgtggtgagagcttgtgggcgagtgactcccttccagctcacgccagccacgcataatccaactccgggtgccacgccgctctctgcagccctggctggtgacgccgagccctcagcccggccttacgcggcggcggctctgcctcgctttcctgcccacgtgtcagcccctgcacgcccggccccggcctgaggccgccagaggacaggccagggtgggccgcccgttccgagggcgcgcgggcggaaaggaggggcgcccgtgactcacatgacccggtccccgaccagaccgccaagcctcacccacgcggcgctcggggggactcggcctctgagcgccctacagaggccagcccccgaccccgacctccctgggctacccccaacccccctgagggacccccgcggcgcacatacctgagagccccgccggaggcgggtgcggcctccgggcaaatccggccgcccgtgggcccgccccgacccgccccgacccgccccgaccttcccctccctgcccctcccgtccgttcccctccactctcctccccgcccttcctctcccctcccctcccttccccactggcgcgcgagcgtgcgcgccgagcccgcccgcgcctgcgcgcccccgacgccccgccggcgcgcgctgccgccagcgaggcccggggaggccgcggcggaggcggaggcccggcgccctgggcggcgccctgtccccgaagtccgtcctccccgttaggtggcgagcgcccgaggggaggggacagccgggcaagcaggaagctgcggcttaaaagggcaacccgcgcgggacccttcctccctagtcgcggggagtctgagaaagcgcgcctgtttcgcgaccatcacgcacctcccctccgcttgtggccatgtaccgctacctgggcgaagcgctgttgctgtcccgggccgggcccgctgccctgggctcggcgtccgccgactcggccgcgttgctgggctgggcccggggacagcccgccgccgccccgcagccggggctggcattggccgcccggcgccactacagcgaggcggtggccgaccgcgaggacgaccccaacttcttcaagatggtggagggcttcttcgatcgcggcgccagcatcgtggaggacaagctggtggaggacctgaggacccgggagagcgaggagcagaagcggaaccgggtgcgcggcatcctgcggatcatcaagccctgcaaccatgtgctgagtctctccttccccatccggcgcgacgacggctcctgggaggtcatcgaaggctaccgggcccagcacagccagcaccgcacgccctgcaagggaggtgagcgtcggccgggccccgtcccgccctccctgcctcccctgcggccctcccctccggcctcctgccggtgcggggccgctgctcagcccagcccagcccagctggagcgggccgggtccccgcccgggtcaccccgcctcggatgtggccggctctgtggatggtgatttttccgccttaaaatcatcatgcgattggcctgccccctcccccgcgccgtcaccccgggcctctgtatatgctgatcttgcatgcagagtagacgctgcaccggtctccttttggtcccggtgtctgtgtcacacacggcgggtcctgccgaaatgcacttctaggaaagggaatgacctgcccgtgtgataatgcctcgtcagtgttcttgggcttttgtgagtctcccctaaatgcaagctgtcaaattattttctggtatttgttcactcctgttccaatagtgacagatgatatccgaacatagaaaatgacttggcttctaagtttgaaatctagacagttttattaaccaaaggaatttactaatcacgcgttaatcgtttcaattaagtaattttcccattctgacaagttctgttttataccaaaaaaaaggaaaaacacaaaaaaatcacaagcaatgtaatatctctgacaaataaacacctggcgtcctgacagtaaatttacaggttgtaggctgcggatggccagccagccaatggaatgaaatagctctgggggtgtgtactggtcctggctagccctgaatttgagcttcaggaaaaatatagtacgtgaagaaaggggtcagataatgtttggtagtcactgggttatcctgtggtttaaatcatttaatgtctgtagatttggcctctgtagtcagattgctttcttcgagcaaataagagcttttttccccccaatacattgcatcatacctctttagtaacataaaatggaaaggacaaaccacttttgtctactgtaaaaaagaaaaattatatggaataaagagcccagggaggcgaggagtcttgttggaggtggattggctgagaagcacagaggatgttgggctagacccatgtctcagtaaacctggttctgtggtctttcagttatgccc

SEQ ID NO: 913655 - DNA, 4001 bp, Homo sapiens
gcctcagcctcctaagtagctgagattacaggtgtgcaccaccacgcccagttaattttttgcctttttagtgaagacagggtctcgctatattggccaggctgatcaactcccagcctcaattgatccacctgcctcagcctcccaaagtgctaggattacaggcatgagccaccacgcctggcctcttttttcaatttctttttttgagacggggttggggggggtctcactctgtcacccatgctggagtacagtggcatgatctcagttcactgcaacctctgcctcctgggaccaagcaatcctcccacctacaggcacaccacacccggctaatttttgtattttttgtagagacacgagggttttaccacattgcccaggctggctgcaaaccccttttaaatgcacgttagtgtgaataattaaaaaactgctgagttcaaaatatgatcatatgtcatctttttatttgctattagtagataaagacagtttaacttagccttagttcaaaagtaccttctggagaaactaagttacttaggttttgttttgaagcagtttgaaaatcacattagaaataaatacagtaatccacctggacaacatgtcggtatcccatctccacaaaaaatacaaaaattaatcgggtggtggtgcacgcctgaggtcccagctactcggaggccgaggcgggaggatggtttgggcctgggaggtggaggctgcagagagcgatgattgcgctactgcactccagcctggataagagggagaccccgtctaaaaaaaaaaaaaagaagaaagacaaagaaataaaaacagtaagcgattcccacataaacgcactgctttgaggcactgaaaaataatcagcatatttcttcagttttgctaaagcctaagcaatgttattgcgcacttggggaatagaaagagtttaggggtgtgcaaaaatctcgggaaaataaaactttttcgaagggaaccaacgggttccatcccctaaatactgcacgaggctgcccaaagatccccgtgtgatattttttaattatggaagataattacattcctcagagctaaccgagattccaccacacaggattgtgtagaaactcctgctttatttatgcacaagctcgatcacatgatgcaggagctctccactggtgggggttgggggctctgggatacactgcgagggtcccactcccggctctgtacggcctatggtgtgtccgtgcacaatgacggcctgggcctccatttgctcctccgtgaagtgggcgtcagacgtttcccacggcccctcggtccttggtgagagctaaaaggagacaatgtgtgtacaacgcgcagcacccggcccagcagtctccagctgcccggtcccacgatgggggccgcccgggcgggcagtcacccgtggctccgaggcagccgcccgcccccggctcgggggaaccggaccctgcctcctccccgccgcgccgcgccgcgccgccagccggctgctcccgcccggcccggccccgcccgcgcagcgcccctcgcagctgcccagcctgggagcgctcgacgtcccggctccgccgggcaacccggggcgtgcagggggagctccaccccggaatcttggaggtccccgggctccctcgggccgggcaggccccacaggcggccgcgggcgggcgggcgagggcggcgggccgggtcccctgcaccaaggaggccgggctccgcagtccccagtccaggcccaacagggagggggccgcgccctcctcatgcggtcggcgccgggggccgcgggagcccgggctgccccgggccgaggtggagcagaggcagaaccagggtgcgggcttccaggcagggcgcctacgtcctcaccgatcagcccgactccaagcatcagctgagtgtccgccacctcggccgcagccatcttccgccgccgcggcgcgcagctctggctgccgcctgcaggaccggcctcgcacccgaaccccgccccgcccgccgtagggcccgcccccatcacaggccccgcctccctccccggcccatcataagccccgcctccctccccggaccatcacaggccccgcctcccgctgtaggacccgcctccctcccgccccgccccatcacaggaccatcaaccccccccgtcggccccgccccacccgcaggcccacctattccagccccagtcctccctgccaggacctgctcagtgcagctccactcgtcttctgcccgtggcccttcgcccttggaaacctccttgagtctccgcagcctgcctcaatttctctaatccagctgttcatccttcttcttctcaatccactccaatctttcttcccgtcgtaggctttccttgttctacctctgccctctggtcaagctcaaaagaacaggtcaccttgttcctaaaaagaggcgtcctgaggatggaggaagggtctccatccattccttcatccagccacccccaaaacaaaacaaaacaaaaattgagggcctaataaggcactggggataccttatagggctgaacaagacagagcagtccactggggaagacagacaattggcgagtagaataaataatccaggccaggtgaggtggctcacgcctctgatcccaacacgatgggaggccaaggcaggagcatcacttgaggtcaggagttcgagatcagccttggcaacatagtgagacccatctctacaaaaaaaatttaaaaattagccaggcatagtggcatgcacctgtagtcccagctactctcaggctgaggcaggaaaatcatttgagcccaggattttgaggctgcagtgagctgtgatcctgccactcactccagcctgggtgacagagtgagaccctgtctcaaaaataaataaatagataaatagatgacagatagatagataatagtaaaaaagctcagaatgatatgtgccctggaggcaacgatatgtgccctggaggcagtgtgttagagagtggaggtgtgctgctctaaaatgggtgtcaagaaaggcttctctgagaaagggatatttgaactgagatctgaatgatagtaacgactcagacattggaagatttggctccaagattcctcctctggatctactgtctgccccaaccccaagtcacacagagctaattagggagggtccttggtgtctgcaggaatacaatcccaccctcatctttttttcttttttctttttttttttttttttttgagatggagtcttgttcagttgcccggcctggagtgcaatagcgcgatctcggctcactgcaacctccgcctctcggttttaagggattctcctgcctcagcctcctgcgtagctgggattacaggcgtgagccactgcgcctgtttttttcttttttctttcttttttttttggagacagtttctcgctatgttgcccaggctgcaatttatacattggagtatatttaggtgtgtatatggcattcctgtttctctcactaaactgaacccctggaaggcagcaccctgaactacgtgcccttctattctctgggcttcctgttgtagtataactgttaatgtgtctagttttcacagaaaagaagcaggtgtttagaggctgaggagtgggacacagatgtggaatcagtttggaagccaactagaaacttgcactaggtggggcacggtggctcacgcctgtaatcctagcactttgggaggctgaggtgggtggatcacgaggtcaggagattgagaccaacccggctaaaacggtgaaaccctgtctctactaaaaatacaaaaaattagccgggcgtggtggcaggtgcctgtagtcccagctacttgtgaggctgaggcaggagaatggcgtgaacccgggaggcggagcttgcagtgagccgagatcacgccactgcactccagcctgggcgacagagcgagactccatctcaaaaa

SEQ ID NO: 913656 - DNA, 4001 bp, Homo sapiens
ttactcttaaatagataaattaaaatgaaacaaaaacctggcctaataaggaacagtgagtttcacctggtcggctgactccattccttcccaagtcctcaaaccaggtggcatcttttaaacgagtccaggatctggagcaaggaggaatctccctgccagccggtggggactgctgggaacacatatgctagcatgtcatttggaagtctgctaatatgttgtaagcagcacaagacgcttgcctggcttcccaggccaataaacaatgccattccaactcctgcagcagtcaataggaaacagtcccttttctccaccatccaacaattgaacaaacatttgttcctgttgaacaaccgtcagcctggctccatctgcacccgctcctgcaaggcgagcgcggcggcgaaggcgacggcacaaatgcccaccccaggatcccagacccggaatgcaagccattccgggggccactttcctaacaccaccgagtccggagattgtaccgtatggaagactcggagtgtggcctataggaggcagaatcccattcatcaaacgctgcaaagagcttttctttgttcaccatcgtcctaagtacagtacgtgttaatgagcccgggcggtcagatggaaggagctcggcttcagggggcgtccgaacgcgagggacccgggcaaacctgtccgcgcggttcgtcgctgctgcggcgccccggcccgtactacaagcattgttccccaagtccgaaaatgggggtggagagctgggggctgggggacaaggtgggggggcggggggagcgagaacacacttgggacaacacaaaccgcaaaccctccccggattctgggtgtcctcgtttctttcgtctctgccccaagagaaaccctgagcggggaacctgactcccacgggcttgcaaaatccaagactagcaaaaatgtgactcgaccagtgtgcctgtgccggacggcccttctcgccatgtgcaaaagccacgccggcgcggacgcccccactccgcaagccccagcggtggcctccccgcgggcttcccccgcccgggacagaatgccccctcacccccatcctgaccgccccggacagtccagcagcagcggagcccgccgcctcgctcccgcaccccgggggtggcgggtgcaaacttccgcgaacaaaagagttgtctgcaaacgatgcgggaacttcggggcgaatggggccgcccggctcccgagactccgcgcctcctccgcagcggctagtcagggctcaagttgagacgcggagaggacacccccgggcgcagcagtccccgcgcccgcccgccctggcctggggagcgcagacttttccgccgcagccaggcttgttcttccccatgcctgtgctctgacaagtctcacgcctgcatcaggggcgagaccgagcgcccggagaaaccgcccgacccaacccaaaggcgaaacaaggcagaaaaaaaggaaaccagcaacattaggaaaaaagaaaaaaaaaaggcaagcccattgcgcacgcgagccgggctccctccagccagcggccgggacgcacacggcccggacctcgctcggggccagccccccggccaccgccgccgccgcccggccccgggtcgcttactgtgcgcggcggggcgctccgggcgcggaccccgcgccgtcaccgccagcgctcgccaagtcgtccggggtgcccgccgcgcgtccgccgcgcgcacgctcgcctgccggcgccgagcgctttgtacgagcgactcccggggaggaggaaatcgacttgtcacttcctgaagtgtttgcaactcgtccctttaaccggcaccggccaggccgcccgcacccgccgccgccgcggagccgccagaccgcggctgcgtgaactcggcccggcgcttagcgggcggtgtcgcgggcccgggcgctaggcgcggcggcggcgtgcaggaggcaggcggcgtgcggcggcggcggcaggcgagtgtgcagtgcgcgcagccgccgatgggcggggagtgagggactcgcggcgcgccgccggcggggctagagggcgtcctgcgggctcagccgcgcgccgctcgccgcgctcgcgcctgcgaggccccgggacgcgggaagtggccccgggcctgggccgcgccaccgcggctgcccgggccccgcgccagaggccctacgggcttctctccccgcccccagcacgagccgggatgaaaacgctgggccgcataggcttcaggcgtccagcttccgggttgttagatgccgaggttcaaaagaaacgatcacttcagtggcgtgcaggacagcgggcgggtggggtcggggaggggggaccttaaagtgttgtcacactttgggaaaataaagcgcaaatttcctaactcggggcgctgtgactgtgtacttcagaagccacatccaaaatacatgcaactggcgaaggaaggatttgtggttgctaagcagaggcagagcatgtttagttctgtaacttaggatgttgacttaagttcaggaatgtaaccctgatagaataagcagagtattttcattgtgctgctcacctgggggagggggattgttttccttgtgaagccctagatttcccattactccttcctactggtgtatgttattttattgaccttgtatccaaaaagcgatttttaaagagaagtttttttaaaactccctatgcctgttttgtgttctcctttgccaaaaaaacaaaacacctcattactttacatggattgtgtctgcgccatttgaatggttctattcataaataaggaaactttttctgttgcttctaggaacatttaattggttttaatccaatgtttcaatcccagtatcaaacataaatgaacaattaacttcttgagctttgtgtgcttgggaaactattatatttcatggctattgctgaaatatttcagaatatcatcacaccggacccattcttttcagaaaagcatgaactgacatctcctttcacactacagctcgctccactgagttctgctgcatgattagaatggacagcaatcagtggaaaggatatgagtctattcatttcaagttacatgatgtgggatagagtcagttcatcctagaaagccaaaatgagctaacatacagaatacagcatactaagatattgatatccttacccatatacgttgctttttaaaaatgcattaaggaccaatcttgaaaggaacaagatccaagaaccgatggtgaacaaaagaaggcccaaggaataatctaagaatgctgctatgcttaacgaaaagagtcagtgtttccctaaagccatctgatatcacacaatcacctcagcctttcagagctttaaggacagagtttaatttactaacgttttattaggaagcctagagtgactcctgctggcaaacattcagtttattcctacaattactagttcatcaggtcaacttaaaaaacaagatgcagggtcccaggcctggaaacaattattacaaccattattcttgttgctttcaggatgatttgcgtttcacattccaaggatggtggtcatggccagttcctctgctgtaacacctcctttccaacctaaagcagcctgtttttctggttctgaggctttcttgaggctgtctagaatatacttgcttaagaagttatgctattaaccaataaatagttacttctcattttctagatttgtatctccaaaggctaaaaagatatgcatacattaagacctgtgtcacacttaaccttccatactataggttcttcccacatgatataataatcctacagctatattataaaacatcctcacttcttagtgctcagctccatagttctttactaagaaaaaattctacccaaaaggttgttgttatattagagttctgctcaattcagaagagtagctaaaaatgtagaactctagatttaaagctatg

SEQ ID NO: 913657 - DNA, 4001 bp, Homo sapiens
agtaattcccactgcctggaatcccttgccctcattctttgctgggtcattctgcagacccagtactacttcctcttgggagcctttgtccatctcctcttcccccaatctccgaaccccaccaagacctcaggagttcttgagcaagcctctgcttagttttcctgggatgaccaaaactaacactgtccgatccgttgttcaatcctcaatccctagaacagagctgcaacataacaggcactataaatgaatgaatggataaagacagcactgaagaacttgaaattatagtttacacatgaaaacagtaacataaatctgaagaaataaagttcttttttttgttttttcgagatggagtctcgctctgtcaccaggctggagtgcagcggtgcaatctggcctcactgcaacctccgcctcccgggttcaagcgattcccctgcctcggcctcagcgtcccaaatagctaggactccaggcacgcgccaccacacctggcttttttttttttttttttttttttttttttttttttgtattttagtagagatgggtttcactatgctggccaagatggtctcaatctcctgacctcgtgatccgcctgcctcagcctcccaaagtgctgggattacaggcgtgagccaccgggccaggccaagttgctgtttttaaaaggtatatttcaactcacttctctaaggcgggaatatacacagcctgccatcagtttgacataaaacaaaaattttagcgttcttgtatgctaaatttcttttactaggttaaaaaaatgtagaatccaaagagctgtaaatgcaaatgacaaatactgtacaaaatctatcaagcaactataagtcacaacttgcaagctttctcctcagcaaatgagttaaaaggaaaagtatttgaaactttcttggtggaaaacgaatgacctttaaaaatgccaacattttccccagagaatagatttggtctgagttcttcatttctgaaattgtacaagataagacgacttggtttgagagtcaaactgcatccttctataaaggttttagataaattttaagtctccatacaaaacactccccttattttgagaacaaaaggaacaataagacagcttaggcggggcagagaaagaaaggccttgaaacaaagtccctggaaaggtaaaaacaacaacaaaaatagtaagttagagctcgtgtttagatctgataactcaaaactgcacaacttttgccatacatcgaaagcaacatgggaaaacagaaaaagagattacaaacattttttgagtgtcctaacttgtagaacccctaagaatgaatcaaatacacttggacaaagctcttcttttctctctctctccttcaagtcgcagactaggggtgtggggcggggggcggggagtaagacggggtctctaataaatacaagacccagcctcggacgtgtttaattgctgacattttagaagaaaaatgggctacttacaattaatgaaccaaactaccaaactaaaatcatgagtaggaggaggagtaaatggaaccgtccgggcgaagtttcaggaagacgcacgctggggtcgctgcgcccttccccacccatacctcggggctctccagtcgctcccagcccccagcgcggactctagggcgccggcggcccaaccatacagacttggcaggatgtagcccccttctcccctctccaggagagaaaagcgcgaggagacgcaaaccgtatttccgtgtccgagcgttgaaacctgcggagtcgcgcgcggggcgcccacactcgttcccggggagccccagcccggtcgcccgccccggtcccagctccagcccgggcctcccttactctggggctccatggtcggctgctccccggcctccgcgggcgaacccccggactcctaacgcctctcagccagggccggcgtcgctacggttgccctgacaacccggaggcgaagtgggcagaactaaagggacggcgagcgggagggaccaaaagccgcaggaagtgagggagcgcgtgaggacccgcgcgtcgccggggacactgagcgagggtagcggccaggtcaccggctgaggacactgctcctgaagcccggtcaggcggtcgcgccctccctggcggcccccgcggccccgcaggacctgtgccccgacgtcgccgacccgcggtccccgctgtcgccgacccgcggcgtccgtcgggcgagtgggcctgcccgcgggtaaggcgccggccctgggccgccctcccgggaatcgggagccgccgctgcaggtaacagcggggccccggcggcggaaggggtcgggggtcggcgcaggggcgggcgcgccccgagccgggtgggcggccccggcgcacctgttgtagccgcctgggggtcccctgcccgcagttggccgtggacgttccccgccccgactccgaaacgccgagggcggcctccgcgcctcctgctccgggagccgcgcctcagcgggaggacggagccctgcgggcagccctcgcaccaggggctccctccgagcccgggcatgggccgggcctggggcggtccctcgagcccccctgacgggaagcgtggagcaatgcgagccgccgccgtcgtcgctgtcgtccccagtgagcctggcgcgtctcctgaatcgcgagagccaggagcacggttttgcccggctttgccccgtcatccccgtgtcccatttcaggcagggggcccgggttggatctttctcgctggcttcgttttttgtgtgttgatttgtttcagtccttcgcgtttccggttgagttacggaatctgcccacacgttttgtggccaaactttgtagggctgtgaaacaatgtaacattatcccacacaatagtctttcatactggttttaaaacacagtgattcagggtttgctttaaggaagctttgaggatcacaagagattattatctggtaggttgtaaaaattcaaacaaccaggagagtatcataggttccggaacaccagaaggaggaaagaaaaatggagacgagagaaaaaggataagcaagaaagtgcaggggcattaagggtgtggggggctgcaggattgatttggtattcaggtctggagattatggcccctctattaattccaaccgctgctccagacagtacttgagggaaatggaaggaagagccgttttgggggtcatggaagtgattactaatcttgccagtagaaagatttccactccatggatgacaaggacactaaggagaattactttcctcttagggaatcattgagaggttaattgaacttgagaagcatatattctgtgatggaaactgacatttattatattcttccaaattaggttttccccctctcagactatatggggactttttcagattaattgtcaaaacaagaaggtttatgtgtggatattgacaagcagcgtgatatatacagaacacataattcttaagctgaagtattaaggtaataaattaagggtggaaagtaaacacttcatggaaccttaactccctgttcctgaaatttagagacaggggcttcatttttagacagaaagtataaagatcagcagtactcctgtatccagtggttctcaagttctagtttacatatcattagcaaaatcacaaagcggtcttttcattcaagatacaaatagagtgatcagtatatcataatcaaaagtgacaagatagtgatttaaaaaacacctggcatttattgacaaaagaaaaggtaggattaagtctgctcaaacagtaaaggattagcattagtatttttttaaaaagaagaaacaacagtgcaggtctctatgctaaagtaataaggactgaagaagttttaagtttggaaaaaatggggatatgtattggtgaaacactttgtaatcatatagaatgattattttatcagcagctgttaagttgac

SEQ ID NO: 913658 - DNA, 4001 bp, Homo sapiens
cagaaaagcaaagttttcttcgggctttaaacacgcagcctctggtaaaggtgctattggtacaaaagttcaacaagcatagctccaagctttgacaattttcttacactttactaatactgctgtccaaaaactatgagattttcaaagcagccaacattgcagtggtgcaatggttaataacaagagagagaagagtgtggcctgaggttgtataaatgttttctcaatcttgaatcattaattttctccaaggaagtttctaaagaatcccaaatagtgcacactatttctgaaaggaacaggatttttttttctaatcataaaatggacccagacatctcagcctcttggtgtaatctggatatcagatgcaatcagcgaacagcctgagttttggaattagatctgagttcaatcccatatctcccatttactagctgtgtgatcttggctgaattactgaagctctctgaacctcatttcgccatctgtaaaatggggatgtggttatcttccccactacatggctctcgtgagaatccgcggagatcacatttgtaaacacttctctcgctatgcctggcactttgttggggcccaataaaataaaaatccatggactctcagaggctccggtactcaaatgagcctcctggatccacgtctctttgattagccatctgcaagctggcatttctgagcgagggacttttcaaaacaggctgctcaagtttcttggccaataataggcgccgggttctgtgcggtgggaacgagtaccaccaaccccagcaggagaccaagcagaaatcaccatgggagtgcaagctaagaaagggcaaaagaagaaagagaagggcagaaaaacaaaacaaaatgaaaccactcaggcagcgacttacagtcttaaagagagaattcccggaagggagacaaggcagtttctttttctgtgtgacaataaaaaacggtaaacaagcctccagaagctcattcagcccccatataactttttcgagaaagaaaaggtgccgttcttccgagccctccggcttaaccactgcttcggtgctgacttatttcctacgtctgagaactgccagaaaatgagcaatatctgttctgaaggctgcaggctctctccccgcccccgcggggcggcgcgcactcacccacccgcgccggagcggacctttggcttggcttgtcagggcttgtccaggagttccgctcctctctccaaccggggtccccctccagcgaccctaaagcttcccagacttccgcttcaattcctgtccgcaccccacgcccacctcaacgtggagcgcagtggtctccgaggagcgccggagctgccccgcctgcccagcggggtcagcacttcgcatcaaggcccaagaaaagcaagtcctccagcgttctgagcacccgggcctgagggaaggtcctaacagcccccgggagccagtctccaacgcctcccgcagcagcccgccgctcccaggtgcccgcgtgcgccgctgccgccgcaatcccgcacgcgtcccgcgcccgccccactttgcctatccccgggactaagacggggtaagcctccacccgggcaggagagggctcaccagaggtaggagggtccagatgcccagcatggttgttgagcaatcctccgaagtgaaagagcttccccaactccgtactgagcgggtccaccaacccgcgggagaagaggcagctccgcctgggcagccagggctggcctcagggtgtgttccgtgccagtgcccgcccctgaggctccagccaagtcactcgtaaaccgcttccctcactccccagaagcgtctttgaacacctgtgtgtcactcttgcgcgagatcagagacgagctcacgaaaagccccggtggtcaggaggatgggaaggaagcctcgctggggaacgcccgggttggggagggctccattgattcagcaacttggcctgcgcgcgggtagggagggggagaagtcagggtgaggaaggagtcagggttcgttgcacaaatgggcattcctgtcccggggcgttcctgcagtggctggcatgctcacttcaggtgaggacctcgagagccggcctcctgccctttctaaaggcttctgctgtagttcaacctgggaagttggggaggtcttgaaggagaatggagctcagagcgcagaggtcctgcctgggtacaggagccttggctaattgctggagtcactcagagaaagacttgcggggcatttgactgggctgtccatgttgtggctgcaacatgagaggctcacagacgtttctggaatggacagttaaccatatgaaaaagtacagatgttgcgccatagggctctgaaaagggagggccccttagtttttatttctcaagaggaaaacaaagctaacaacttaagccaaatcgcatagccccagctatattaaacattcacaattacttcctgtccttcgttactcattatttcctggccaattttctttaaaaaaaaatcttgtaattctttcgtgctctggtgaacactgttcaaagtcactattgctttggaacggtagatagctcttaggtagtttagcatgaattttacagaaggtatgtttggataatgacatcattactgaacctgaatttggatgcagttccagactggacacactaaaggtttcagtattcctttggcatcgtccaccaagctctgcacctcactctgcaacctctctcccttcccaattagattcaacccattaataacacattaataaccctttgcttagcccactgttcatccttcaggcttcctctcagttgacattttcttctggagcctgtttgggccctcaaatctaggttaggttaccctcctgagggctttccatcaccctgtgttttgcatctgtcactgcacttaccaccagtcttgtaggtgttgataggcttgtctctgttccacctttcagtagactgttagtgccatgaggaagaccctgggcgtgccagccttgtgcacacactctgagcatctaatagacacaaaaagaagtgggataaggaggatggtatatgggcattctctgtattatctctgcaaattttttgaaatcctaaaactattccaaaatgaaaagttcatttaaataaaaaaatgtaaaaagaaggaaggaaaaggggtgtgagggaaggaaaggagaggtaagggaagaaggaatggaaggagggaagagagaaaaaaaggggaaaggacaattgacaaaatcagtatctcttgagtgtgaattataagccagcaactcacatatgtggatcttccttacttaatacttatcattatagcccagtgagatgagtgattattaaacttactttacaaataaaaaaatgtagccaaaaaagcttaagcaacattggcaaagatggttagttaataaatagcagagtcaggaattaaacttagatattcttgctcccaaggtcctgctctttctatgccatacccccttcccctaccctctgcccacgtacgtctaattatcctcaagttcaaggagataggaatatgtgctttgtggggagacatatgtttcatggtcaaataatcttagaaaattctgggttactttaatttgaaaactttctgaatccaaaacttctcagggcccttagtatgctaatgtcaaagggttgggtaattatatatactgttccccaaacttctttgcctttggaatcctttgaagaatctattgaatgaacacctaatgaatgctggtgttctggggaaaacagtttgggcatctctaaaggttatttttattttaccagcatattcctgagagtcctcaggccttcaagggcaaagaaataaaattttaataatagaatttcaggcactccaacagatgttggagatattttggacaaccatccttattcaaaccataccatataagttaaagcttct

SEQ ID NO: 913659 - DNA, 4001 bp, Homo sapiens
atgcggcccgcgggatctgcggacccacctgcgggcggggaggcaccccaactctcagcccgtcccgcactcctcagccgcctatgcacccctgacctgagttcttttctggcagcctcctgctctcccaggagagaccccactttccctctgagtcgctaccgagtatttgccctttggtgcgtggatcccttccgggcagccccggcggcccaagggggtccagaagggcatactgcggggctgggggctgggctagaggcggggcggtacccaggcaggggcggggcttcagcccccggctcacctgcgcggcatcgaagcgacgcagcccggccaggtgaagctgcaccagcgaccggaaggcccggctaacgcgctgcagccggagcagctggcgcagcgggacccggttcaggacgtgtgggagcagcacgtcttcccagggcaggtccaggaacctgcgagtaaaggggcgttggcactggcgtcccggggccactattacctgcgagtccgcctccgttatgttcctgcgccccagctcccaagagcggcccccagacccagccccggctcggctcccctccctcaggttcctcttccctctcggcccctccggtgctcggtacctgacggctccgggctcttgctcccctccggacggctccatcggtggctccatcggctgtctattgcgcgtgcgcagtaagattttctcgctttggccttggagtggccgcaccaaacccgcctccttggcctgtagagacagacctatttaatcgagtgccgtctcaccgaggatccgatctgaaagcttttcgggtggaccccgaaacggaggcggaacagaccggtggtgtaacattaggcctcgccttctcggctacagggcttgaggcctgaagctggagaatgcggtgggcatcagagactggcttctgtcgtcctcttgagccagtagccgcctctgagcgaagtggtggtgggaggagcaggcaaggccaaacgcggagggggcggagccaggactcttaggttaccggcctctcctctgccctctggtcgcgtttagcgactttgaaaaacggggagaaactatccaggctcttactgtctgccacgtagcaggtgttcaataagtaattgttgaaataatgaatgaattggcgaggctataatgtttccctcatcaagtaaacctgctcaaacctcccattcctgattaattatgaagagctatccagcctcttccacttcgtaacagtttgggccgcgtttccgccgggggagagagatgtagggggcgcgaagaaagactatatttccaactgggtccctttcatttcctccaaaggtccagagtcctaagaagaatgagagctcagctcagcccgccagtggtagtgcttctcggctggccttgggtttagttgtagggtctggggctgggtccgccctgggacaatgacgccccagacctctggactcagcttcagggctgcctctcaccgcgtccccaggtcccagtcccaggatccgcttcggggaaccccaggagtagtgccttcccccatcatccacgggatgggtgtggggggatgtgaaggacgcgagagccactgcaccgctgacggtctggcgctccggtgcaaccgcttcagctggctcatcacaacgaaaaccacttctcatctgttatctcgtcaaggcttcgggcacctctgaaaggtgggcaggtctatgctatcagtccattttaaagatggggaaaccgaggccctggagaggaagccccttgtccagaatcaagccagacgggaatagagaacccagacatctggttttcccagaattccttccacgtttccccaccccgcaaggcagcgagaagggagaagctagcagcggggagagacaagaaaggggtcaagttaggtgagggcttgctatctcttcttcctcagcctgcttagggagggggtagctgggaggacagacccctgcaaagatagagccacgtgagcgcgcaccacctccggccgcgcgcctcgtccccctcccctctttgttcgcgcctctgcgcctgcgcagtgcgacaaatctggcgctgtccccttcagcaccacgcggagtccgcgccgcccctccccgcggtgagccccgcgcgcccccgcctcgcacgtcctcgcgccccctgactgcccgaacagaccccttcttccttccgaggtcaccatctgcccgccctggccctcccaaagagagtagttgccatagtaactccagcggctctttcttaaaatagcagggcccccttctaccctggccaagggcacaagggttgccggtcccccacgtcttccggtccctagttcatcccgtctaacctcttacccctgggcaggcgtgacgacacctaactcaggcagcaaggaagttcttcctgaagtctgatttaacatccccctgctgcatcctgggagggtggtcagggttggatctcctgggtccgagactcaaaacccctggcgggttcaagacggtgttccctagatctcctttccatagttgatggtctcctggatttagggggcgggtccagtctacacccataccgtgtgcttggcgcggccgcgtgctcgtgggggcgggagcgcgtgtggcatgtaacaggtcatgtggcagcctcctagggacacgcgtggggtctggagcgggacacgcgtgtgcagccgggccttacgtgtggctcaaggggcggtgggcgagagagacgtggacacaagtggggtggggcacgtgagggtctggggaatagaaccaggggttccatgcgccctcctccttgtctggggcgggtcttaggttggcgggagagcccagcggggacctagcgacaaggggggctggcagcctccggggctctgggccctgggagagggcggggggtgggggggattagcgttgcctgagcggcgcgtagggggtagggggagggactgagaggcgggcgggcctggagcaaacgggagccgcgctgccttcacagctcagctgggcccagcctctcctctgtctctcctcggtctcagctctgggcgagcagcggtgagtactgaggtggcattgagttggggctgcaccgggtatgcgctgggaccccgttgagcttccggaacctgcctggcagggttgctactcctgacctctgcccctcccctgcattgccaccagaggcccctttacctggttatggtctctcctgggcgggatctgtcttacccctggggagagagggagaggagaggaatatgggtgcagattcccctcaagagaccccagtaggtgggggggaggggacggtgtgtgtccctgcttgagtgtgtacatctgtatgtgtacatctgtatgtgtatgtgactgtgagcagtaggtctctgtgagtgtctgatacacctggacctctgtgtgcactggagaatgacagcttgtgtatatatttgggtacctctttgtgtgttcctgtttgatgatggtgtgtgtgtaaaacaagcatgtgccttttcattacacacatacttgttatgactgtgagagtgcatgagggtgtgtctttgagcagtgtgtgtgtgtgtgtgtctgtgtgtgtgccagagggtgttgcctatgaatgtgtttaactgtgtactgacatatttgtccttatgtatgtgtgtgcgtgtgtgtgtgtgtgtgtgtgtgtgtgtgtttgtgtgtgtgtaggtgcctgtctgtacctgtatgaagaaaagaatgtccctggccgggtgcggtggctcacgcctgtaatcccaacactttgggaggccaaagtgggtggatcccctgaggtcaggagtttgaaactagcctggacaacatggtgaaactccatctctactaaaaatacaaaaattagccaggcatagtgctgagcgcctgtaatccaagctattcaggagtctgaggcaggagaa

SEQ ID NO: 913660 - DNA, 4001 bp, Homo sapiens
aaaaaacagggaaactagagacataatgcaagagaagatagtcatctgaaactgggagaggggcaggggtaaaagcaaaaagcatgaagctaccagatgcctcaacttccaatttgcactaacttcaacggcagcagaacactgcttggcacgccctacacttttgtgcatttcaaacaacttttatgccttcctttttttcttttgctggagtgacaaggcacgacagaacaataacctgagcaaagctggtacttggactagttctgtctccagaggctatccacatcactgttaccttaaccaaactcaatctgctcatgagtaaaacggacttatcttcatgggcccattccagaagtcttttcatttatctccgctcattttaccacagcggcagacgctggcggacactcaacacatgctaccatcctgccttccagaagactttattacctgtaattctgtaagaaagtcactgacttggttaggcctccacttccccacctgtaaaaccctactgatgcctcatagggttgtcttcggaccacagactgcaataaaaaatgtaaacggcactcgtttttaggcctggcaaataggagctactcccattctactccctaaaggaatcgaaaacatggagaggttaagtgactggcacctaatcagatcgggtaaggaacccaacacctactgatctcttccatcacccacagcctgcccagctctcgccgtgccctccaccagcgccaggcctcccacatcgccttaggcttcccatgctcagaggaggggcagagaagctaccgatgacacaggggcagagggcagcgaaaaatgacttgcccaaggtcaaaacgtcagagtagacgggaaagcctggcctcctagcagccgaggccacgtccccgcgcttgccccttcagccccgaggacccacacgctgcgccttcctggcctcggggggcagcgcgggggccgctcccgaccgagttcagtgagcgccctggcctcccccgcgcacccccgccgcgccctccacctgcccacggcccggacggccgagcccccacgcccgcgcttgcccgagcccagcctcgcgcccccggggcccccgctgccccaccccgggcccggaccccccgcgcaggaccccggaggttaagttttccacacggcggagcccctcccacactccctgccacgtctgcggcctcacgcactgtggcgctccggacccggaccccgctgccgccgccgccgggcccgcgccgccggccgctcagcccagcgtcccccggcagcgagctcctcctctggccgggacctggagcccgagacgcccgccgacttcctccgcgagctccgccccgccgcagccccgggaagcgcccgccgccggagccggactgacggcccccgcgaccaatcgggacgcgagaccggagggggcgtgctgacggacggccactaacgccaatcgaaatgcgcaatcggtgggggcgcggccacagctaccgggccacgccccatccgcgcttccgctcgggccggggcggagcgggaaactttcccagagttccttcgagctccccgagtccccgcggagcagcggcggtcgaggggcggggacgggggcggagcccaggaacgccggcccccaggggctggaggctggggcggccctgaggacgcgtgcggggcaggtcacgcttgggcctggctgcctcaggagccaccctgcacggcgccgggcgaggctgtgcgcgccctcccggaccctccactttggggctttgcggtgtagcggcgcgccccactcccttacgtgttcagtcccgaatcacgtacgggccgctgcagctccaggacggcggacgccagcgctctcggatccccaggcccctccgtgctcatcccggaccgctccgtccctgaggaaaaaccgccccgtgcccggaaccgcggcttctcccacgcggggcaggccggggctgtgagggggcagcccgcctgcggactaggccgggggtttgaggaggcggctctgccggggacaaagccgggggcgtgaggggcggttctgccgggttcggggcgcgcggggcaggttgcgtgaagaggcggaaagtcccactcgccctcggcttctccctgcccggccgccggtgtcccgcccgccgcctccccgcgcagcccggcccgacccgcggcgatggcccagcccggggacccgcggcgcctctgcaggctggtgcaggagggccggctgcgcgccctgaaggaggagctgcaggcggccgggggctgcccggggccggccggggataccctcctgcactgcgccgcgcgccacgggcatcgggacgtgctggcctatctggccgaggcctggggcatggacatcgaggccaccaaccgagactacaagcggcctctgcacgaggcggcctccatgggccaccgagactgcgtgcgctacctgctgggccggggggcagcggtcgactgcctgaagaaggccgactggtaggtgtggagcggaaagacaccccgcctcccctctactcgcagagtcgtagcgagttccctgtgcttctccgtccccttggacaccgtagctgttctcagctcctagttctcaccccaggcctgctcagcggcagggacctcctgcccaactttcccttataacgcagatgacctgcagagtccctcgttcctgcccttgtgggttaactggtcggggcagtcacctccctttctagagcacggaatagtgtagaatataaccaaagagaatgttaccaaacaatgaagtgtgtgcactatacagatagcctccggatgcgatgttctggggacatttagctaagttacttctgcaccaatgcattgtttcaagtggcattgctccaatcaatatccagaattcctgagttatacacgcgctcgtgtgtgtagagcacagtgcagttgtatcacatacgtgcagccttgcataaccaccacagtcagagatactctgctccaccatcacacaagccaattgcatttcgtttgttagattgacactgattttagtactcactaggtcaggttcgttagagggcgtgaacatctttaggaacatagggaagtacatcttccccactggggcaggggaatagacttcgttatgtgttgagggttgtctgtgggttttcttagctctgctccaattcactgctatcctgtgaactagcttataagctgctttgtctcccaggcaccctctcctctaggtacacgttcgttacaatcattttccccttattatttctcccagggtcctcacagaaggcacagaggttgccggtcaaagctgttttcctgcctgccagacccctgaatcctctaggttttccatctgtgccaaggatgtgtgtgttttgaagacctggcccctggcttctaatgtctcagctgcctccatctgacagcttctcctggttggccttaggactcctctgatgatggcctgcacaaggaagaacctgggggtgatccaggagctggtggaacatggcgccaatccactcctgaagaacaaagatggctggaacagtttccacattgccagtcgagaaggcgaccctctgatcctccagtacctgctcactgtttgcccaggtgcctggaagacagagagcaaaattagaaggactcctctgcatactgcaggtacagcctacagctctgcaggtgagcagtacacacatgtggctgcttcacccagcactgcccaaccgcatcttgttcaggtcaccttcaggggaaaggaggattttggaaaacagaaggcagagaataagaacatctgggggggagggggtgggggcgggggcgcgggtgcagtggctcacgcctgtaatcccagcactttgggaggccggaggcgggtggatcacctgaggtcaggcgttcaagaccagcctggccaacatggtgaaacgccg

SEQ ID NO: 913661 - DNA, 4001 bp, Homo sapiens
agaccacaacctccaaaagtctgcacgaaagaaatgagcagcccaaccggaaaacagcaagacccaggaaacagctccatccattagcttactgttcagatcccgcccctctagaccaagcttttgcccagaaaatcacaggagctgcgggacagattcacatacattatcatttagttatccaaagggggatacagagcaaagaaggttcatagagaagacacaagaggcagaatcgaatgtgcaacaccaatgaagtaaccaattatcctgggttcaaatattccaacctggctaggcacggtggctcacgcctgtaatcccagcatttgggaggccgagctgggtgaattacttgaggccaggagtttaaagaccagcctggccaacatggtgaaaccccgtctctactaaaaatacaaaaaaattagccgagcatggtggcacacgcctgtaatcccagctactcgggaggctgaggcaggagaattgcttgaacccgggagggggaggttgcagtgagccgagatcgtgccactgcactccacccggagcaacagagcgagactctgtctcaaaatatatatatatattccaacctactgtgaacccgtgtgtcccaattatgtttaaaaaacagggaaactagagacataatgcaagagaagatagtcatctgaaactgggagaggggcaggggtaaaagcaaaaagcatgaagctaccagatgcctcaacttccaatttgcactaacttcaacggcagcagaacactgcttggcacgccctacacttttgtgcatttcaaacaacttttatgccttcctttttttcttttgctggagtgacaaggcacgacagaacaataacctgagcaaagctggtacttggactagttctgtctccagaggctatccacatcactgttaccttaaccaaactcaatctgctcatgagtaaaacggacttatcttcatgggcccattccagaagtcttttcatttatctccgctcattttaccacagcggcagacgctggcggacactcaacacatgctaccatcctgccttccagaagactttattacctgtaattctgtaagaaagtcactgacttggttaggcctccacttccccacctgtaaaaccctactgatgcctcatagggttgtcttcggaccacagactgcaataaaaaatgtaaacggcactcgtttttaggcctggcaaataggagctactcccattctactccctaaaggaatcgaaaacatggagaggttaagtgactggcacctaatcagatcgggtaaggaacccaacacctactgatctcttccatcacccacagcctgcccagctctcgccgtgccctccaccagcgccaggcctcccacatcgccttaggcttcccatgctcagaggaggggcagagaagctaccgatgacacaggggcagagggcagcgaaaaatgacttgcccaaggtcaaaacgtcagagtagacgggaaagcctggcctcctagcagccgaggccacgtccccgcgcttgccccttcagccccgaggacccacacgctgcgccttcctggcctcggggggcagcgcgggggccgctcccgaccgagttcagtgagcgccctggcctcccccgcgcacccccgccgcgccctccacctgcccacggcccggacggccgagcccccacgcccgcgcttgcccgagcccagcctcgcgcccccggggcccccgctgccccaccccgggcccggaccccccgcgcaggaccccggaggttaagttttccacacggcggagcccctcccacactccctgccacgtctgcggcctcacgcactgtggcgctccggacccggaccccgctgccgccgccgccgggcccgcgccgccggccgctcagcccagcgtcccccggcagcgagctcctcctctggccgggacctggagcccgagacgcccgccgacttcctccgcgagctccgccccgccgcagccccgggaagcgcccgccgccggagccggactgacggcccccgcgaccaatcgggacgcgagaccggagggggcgtgctgacggacggccactaacgccaatcgaaatgcgcaatcggtgggggcgcggccacagctaccgggccacgccccatccgcgcttccgctcgggccggggcggagcgggaaactttcccagagttccttcgagctccccgagtccccgcggagcagcggcggtcgaggggcggggacgggggcggagcccaggaacgccggcccccaggggctggaggctggggcggccctgaggacgcgtgcggggcaggtcacgcttgggcctggctgcctcaggagccaccctgcacggcgccgggcgaggctgtgcgcgccctcccggaccctccactttggggctttgcggtgtagcggcgcgccccactcccttacgtgttcagtcccgaatcacgtacgggccgctgcagctccaggacggcggacgccagcgctctcggatccccaggcccctccgtgctcatcccggaccgctccgtccctgaggaaaaaccgccccgtgcccggaaccgcggcttctcccacgcggggcaggccggggctgtgagggggcagcccgcctgcggactaggccgggggtttgaggaggcggctctgccggggacaaagccgggggcgtgaggggcggttctgccgggttcggggcgcgcggggcaggttgcgtgaagaggcggaaagtcccactcgccctcggcttctccctgcccggccgccggtgtcccgcccgccgcctccccgcgcagcccggcccgacccgcggcgatggcccagcccggggacccgcggcgcctctgcaggctggtgcaggagggccggctgcgcgccctgaaggaggagctgcaggcggccgggggctgcccggggccggccggggataccctcctgcactgcgccgcgcgccacgggcatcgggacgtgctggcctatctggccgaggcctggggcatggacatcgaggccaccaaccgagactacaagcggcctctgcacgaggcggcctccatgggccaccgagactgcgtgcgctacctgctgggccggggggcagcggtcgactgcctgaagaaggccgactggtaggtgtggagcggaaagacaccccgcctcccctctactcgcagagtcgtagcgagttccctgtgcttctccgtccccttggacaccgtagctgttctcagctcctagttctcaccccaggcctgctcagcggcagggacctcctgcccaactttcccttataacgcagatgacctgcagagtccctcgttcctgcccttgtgggttaactggtcggggcagtcacctccctttctagagcacggaatagtgtagaatataaccaaagagaatgttaccaaacaatgaagtgtgtgcactatacagatagcctccggatgcgatgttctggggacatttagctaagttacttctgcaccaatgcattgtttcaagtggcattgctccaatcaatatccagaattcctgagttatacacgcgctcgtgtgtgtagagcacagtgcagttgtatcacatacgtgcagccttgcataaccaccacagtcagagatactctgctccaccatcacacaagccaattgcatttcgtttgttagattgacactgattttagtactcactaggtcaggttcgttagagggcgtgaacatctttaggaacatagggaagtacatcttccccactggggcaggggaatagacttcgttatgtgttgagggttgtctgtgggttttcttagctctgctccaattcactgctatcctgtgaactagcttataagctgctttgtctcccaggcaccctctcctctaggtacacgttcgttacaatcattttccccttattatttctcccagggtcctcacagaaggcacagaggttgccggtcaaagctg

SEQ ID NO: 913662 - DNA, 4001 bp, Homo sapiens
ctcagcttttagccctaccccagcaattcctggcctttgctgactttgaagtggtcagatctggagtttagccctccaccacccctcaaatctcttcaccttgatgacagtctatcccctcccagcccactctgacccactccatgccctggtgaggtcccccgatggagatgagacccttatcagtctcccctgaacgagtccttacaagaactctgctacggggaactaaaaggaagggaccacgtctatcccctcattcctcaaagtgcacaagggggaaacaagagacactcctgcagtcgcagagtgagaactgcgtgtctgccactcctcccctatgctttcatttgcctggcttctttttttaatcttctttattgaaaacaacttacaaaacaagtcacagaaagtgaaactgagtgtttcaggttttgctgcaaagaatgttgttgctcttctccctgagcacacagctgggctatacttcccagtcctgcgtgcaggtggatgtcgccttaccgctgggtgccagccaatgcaatgggaacagcagcagcacacgcctcttccagacctgccctccactcttctcctcttccccttaactgggaagctgattcccaggacatccttagaagccgggtgttcaaaatagaagagcctccagcagcctcaatcctcggactactgctttaaaaagaaccctccctccccacacctacacacacaaactccaaccaccaccatgacctgtagcctccttagattgttatgggattgaaaaataaacgtctattgtgaggccattacatgtctggatctatttgtcactgcagcaaagcttaccctaaccattcaggatcatttgaaatggataccaaataatttcctttcttcctctacctttactaatcagaattcataccaaaaagtcctttaaaacttttaggttacagacctaaatggacaagatgaagacaataagtacctagaattcctggaagtaaatattattattaaataattgctttttcaaaaaaaaatcaagttgactcgctagtacaaggtacctgactggagaaactgctacaataccatacccaactttaacaaagatccacagagggcagttttgctaatctggacaattttggagtcagctaaccgccctggtcagtttcccacatgcctcttactttcagcgtgctctgtgaagaccagcaagtgggcactcgtcctctggcatctcctgtggagatggcccaggggccctgcgcaatgtagcccattatcacatgactcaggcacttgacaggtccaatggcagcctgtgaaacgggaatggcccaatttcaacagttaactgtgttatctctcaactccagcaccataaaagtattcactcaagccaggaagcacttcgcaggaataaaaccgccctgtacacccgagatacttgtaacaattctttgtgtaagtgtgcatttaacatgtgtcttatatgaattattgtttttaattgcactgtattacatattatattaataacaattatttgtataagtctgtatttaatacgtcttccatcccagactaaaagctctctgctctagtgggaaggagtagagaggtactcacacccagcatgtaacacacattgcttcataaacaattcctgattaaacgaacaaatgtgcagctgcagcacttcttctgaagtgtgggctgtcttccttggctttgaagctctcaactctcccagagctcctaagtgctttacagcttttgcagttctttcctatattctcgtctgaccctcaaagcaatcctacaattgtgccatgattaagctggggctcagagaggacttgcctgaagtcacctcgtagctcatgagtgatggtgccaacacaagaacccgggtctcctgactcccctagtccagtgcacttcctactgtgacattcttcactctgtatctagacaccttgaaagcagcttctgaaaacctcaagtttaatttccatattacatttttttaaaatcattgtgaaatgtcagaaccaaagaaattgagaagtatttggaaaacataactataaggaaaataccactaaatgctgtagacccgaaatggaaaaacttcaaaatattgtgtccccattagctctaaaagaaacgaatgcagaaagcaagcaaaatagagctccagctcctttcccaggtattcactgacgcagagccaggctaccacagcctgcttctccagaaatccaaaagttcccaggcagtaagctcaatctccccgggatcctctcacatctgagacacctgtgactcccttggagacagcactcgtgtatgacagccaacaaggatgggctgggctttccgttctatgtttttcctaaagaaagaaaggaatgtttgaaaaacaagagaaagatcactacttatggtctagaatataattttatatatttgaaaggctttttctacagtcaattcattccacaactacttttacgtatctgctatgtcccagattcattttaaactccatgagagctttgtcttatggtatccttggtgttaaatgctattttagacattagtgatacaaaagtgaataagcctacccataaggcagctaccaaaacaaacacaagttactaaagataaagtaatataacaactacataaatgcatgcatgaagtgttatgatagtaaagaaacataaatagagttaggcaagttgaaaaaggcttcacgaagagttgagtcttgaaagaatcatgggattcagtaaggcggaaggaaacaatgtgtgcaaaaatacagaggcattaacaatgcactagagtggcaggaaagctgggcttcatcaaaacaagaggttccctgatgaggaatgacaggagataaggctggaaaaggaatttggagccacagactacaaaggtccttacacataatgataaagaaattgggcttcaaaaaaagaaattggactttatcaggtaggggcttcaaggtatcatccaattttgtttgtttgtttgttttttgttttcagacagagtctcactctgtctgtggtccaggctggggtacaatggcacagtctcggctcattgcaacctccgcctcccaggttcaagtgattctcctgcctcagtcttccgagtagctgggactacaggtgcacaccgccacagccagctaattttttgtattttagtagagataggatttcaccgtgttgcccaggctggtctagaactcctgagctcaggcaatacacctgcctcggcctcccaaagtggtaggattacaggcgtcagccaccgcgcccggcctcatccaatttttaaagcagggtcattacacaatcaaatttacactttaggacagtgactcgggagagaggatagaaggtggagagacatggagattgtcaggaaaacaactcagaaagccaccatatcaacctatgtgagaattggcaaaggcctgagagtagcagaccctgcaggtgcataagaacatggctttgtttgacaagacagaaagataaaagataaagagcaacaaggataactggcatttctagtagaacattcaaagagatgttaatgtcattaaccatgttaaggaataaaagagaaacagtgtttgtgttttaatcactttttcccccggagtgagagggaggctgaaagtcctagttttaaaaataatttctggctttaagttatctgtggaataccatgtttatgctccaggaggtcctctgaaatctgagactggtcttcaaaaggcatgtgaatgacagttacagatataagatttgagatgctttctaaaagtaggtaatttcacagccagaaaggcaaagatggaatccaaattcagtttccaaataaaatcagcctaggagggatagaggaatgagataagcagcaaaaagatgatgtcaacaaacccaaaattagaa

SEQ ID NO: 913663 - DNA, 4001 bp, Homo sapiens
atttataggaaaaacaagaagaccccagtaataaatgggcaaagagtgggaagagacagtctcccaggtgaaacaaacacatgggaatatatttatcccagccagtggtaaaagagatgcaaaataacacaactttggtaccttaaatgaccactaaagtggcaaagattttctaaattctcacataaaatttgttcactctgtgctggtcccactataatttggtacagcacctctgcaaaccataacctttgctataatgccaccttgagactttatcctaaggaactgatttttaaaaaatatgtatggtaatgacatgtgacttatatttcagtaaagctgttactcaaaaatgcattatttcattattatctataataacaaaaagctgaacactacatgtaagtttaatagtagagggatgttctttaatctcattatgcgacagcccacaaacatttactatgtacctattctgttaggatcagtaagatagcaattatatgtgcaactgaaaaggtttttaaatgaaaataattgtctagaggtgatggtattatggctttttatgtttttaaaaacgttatttaatgttgtcataatgtactagaaagaactactttttaaaaaatgggtggaatagggggcaatctgaaagctcttattcccccaattccctacatgttttttccttcctatttaacagtttaagtggttcagaaaagtttttcattcacaggtctcagaccctaccaaaaacaggccaaattgcaataccatgtcttgtacacatcctggacagactccagcctcctgcctcaagcaggccccctttttcgtgtcgctctgcctatatgaagtcataaactatggctgaacactgggaccgagggcttctcttaaggtccgagccctgaagcttaacaacctttagaaaagggtagggaggatgaaagatgaaagtccacaaaaatttatgatagaccacttaaggaacctgagtcctagacctggactcaaggaatcgtccaaagcaccgtaccagactggctcctctggggcgaaggaaccggggcagctaaacctctgcaaaaacacacaatcgaaagctgtagggagtgcctaagatggctaattgtgaggagcggcccacccgggagggtgcctactgagggatgctctcgggaggctgcctcagatggaggccttggggaggaggggcaaaggggtccccgagagtgctcgggaaagggtgtaggcggaggtcaggtgtaggcctagaaactcggggtgcgacacgaccctgggccgaccaggccgcggcgccccgccctttcccgggacgcggggccggctcggggcggggagcgggcgggcgagcggacgcttacaggtcggtgccgagccgcgtgaagccggagttgagcgaggcccgggctatccggcgccagagcagatcgcagctggtgaagcgccgcagccagcggcacacctgggccaggcggccgagggcccgcatgtccaggtaggagcagatgagcagcagcagctcctccggcaggcgccagagcgcaggccccgcggccgggcgggcagccgactcccgagccgcctcctcctcctcctcctcctccccggccgccgccgccatggccacccctgtccccgcgatgtcggcccaagcctgaccccctcgtccctgtgctcttcccggcctggcgccctcccgccgcctagccctgaccctccattcctccttcttcccatactctcttccttgtgcctccttcccggcccctgcgctcccctcgactcccttgacgatgcctctcgccccttcctccacgcttctgcctccctctgcttcctcccttgggcatgccctcgctcccgcgtcagcccccggcccggctgcctccttcgccgtctgcggcccgggcttcccttccgccccgcttcctcttccgccttgccccgctctcgcttttcccttccccttccccttccttcgcttccccctcgccaccctcccttcctgcagcttcctcgcctctccgccctcgccctcgccgggcccgccgttcccggggggccccgagcggccctggctgcccatgagcggccgcggggccggcccgacgcggagcccagcccgagccgccaccgccgccgccccgggaggaggcgacaccatgtcggaccgggtcacatggggcggcgcgggccgagccctgggcacgcccctcacacctgcagccttggagccacttcggggtgcgggctggggccggggcgctgacaccacccccgcatccccgagagcgcttggtggaagcacaggagttcgcgctgcaaacacgtgaggccggtttcagggccctgcctgaggccacaagaggacccgctgccctcaggaagcggccatttggagcacctgccctcaagaagcccctagttgggtggccttgcccctctagaagccctcctcttcctcgagtgatgcctcctttccacgggccacatgtgagggcccaacgaatctgcagccctagaagttgacaggttccatagcttaggttctcacacaggcccggaagcacggtcctggcgtgagcttgggtgttagacgtatttggggatttgcagtcttctagatcctgagtccataacttcaaaaacagtcatgtatcaggaaatggcacagctagggcttcttatcagtcaccacccaagtgcaagtggattctccaaggactcagcatccattcttcataccacccattcgattcacatggcattaatctgaagggagagctactgaggtctagacctgtgctgtccaacagtgtcctccctcgtcacatgtggctgctgagcatttgaaatgtggctaatacaaattgaaatgagctataagtgagaaatgcacaccagattttgaagccatacaaaaaaaagaatgcaaaatatctcattaataattttatattgattacgtgttgaagtgttaatattttggatacgctgtattgggctaaatacaatatattttaatgtaactactagaaaatttaaaattatacatgggacttgcatttgtggctcgggttatttttctattagcattgggctaggcagtaaaacttggaggaggggaggaagatgccaatttctgtctgtttatcctgtactccaaatccaggtaggaaggattggagagttttcttttgtacttatctacatcttaacactcattttcagggagcagggaagaataaaaattgaccctgaaaattattcaacacctagcatagccaaagagaaacctagggaagcaactacattgtattatggtgctgcaagaagcatcatgtaacaaggtcagaccggaatctggctttgccctagaattactttttgatcttagcaaaacaacaacaaaaagccccacctatcttggccttttagtgttctcaatctgtagtggagataatgcctctgccttactttcgagggataaatgagatgatccctgtaaaatgctttgaactcctctaagaaaattcttaataatagttacaggtcaaatcctgttacaaaaaaatgccatccctccccctctccaaatgcaacaaagactttgtgtagaaaacgatttccaaactcaaggcagtggtttattgaaagcactattttatagatttcaatgcggccaaagaatttaagccatgttttagagatcattataaagaaatttacttattcacaggtaccatactgttagaagactactaaggcaggaatacttcacatttaggtgatgtcatgagttcaatatttattgattttgctacatttgtgtactatgagcgaatcaagaaggaagacaaatgatatagcaggaatatggttcctgcattttgtgtttagatttgtgttagagatgtttgtaatttcttactgtttgagtacttaactcattcaggatacatagtaaa

SEQ ID NO: 913664 - DNA, 4001 bp, Homo sapiens
aacccccagagaagctccacctctctgtctcaggctctggagggtcacacagtcagggggtgtccctggtgggctgtgtgcatctccataaccaagccttcccctggtgacatgtcatttctccctccctactcccctctctgaccacttcgaaggtccctctttgggaccgtgattcctgtttgtgccacgattactcagggcgccccatattcactcctaggtggagagggagcttaagggtagggggttccaggccggaaaaccagtgaccccggcagggaaggggaggccaagaacccagccacgggcagaagctcctggaggctgagcccccagcgcacagacctaagtcctttctctatctctctccgcgaggcatggagaaccaaacacactgggaagacagccagacggcggccactgtcctccaccgtgactccgcgtctagattccctcttccgtgtggatcccggcgcacgaaccctgcaaccaccgggcaaagcggcaagagaaaaagacccgagctcgggattccggaccgcgggacttgaggggaacagagccaatgtcctgcactatccgcagaaccttattccgatcatggtcactcccacccctatgagctaataatgacaactattgacccgctatgtaaaacagagctcgtcggtccagcctctgtaatctgcacatttcaggcgcccaggacacctcgaaggtctagtgtaatccttccgttttgcagctgaaaaaactgaagaccccggaagggaattctgtcacaagtcccctaaagacagcattgcatctggggtccccgggtctcacatgcctgtccgcgcgctttcaaagcaggaccataacccaaccctggacaggagcccaactcctccttgaattacgggtaaacttctggaaggagcccatctcctcctcgaattacggataaaatactctgggcaagttattatacacttcggtgtgcctctggttctcatctgtgaaatgggtgtgataataacagtattgtagcacctggcgaggaatcatgattcaatacaaagtgtttggccaccctgcacccccaaagttccgtctcgctcctaaactactcgttaattaacctcgcaacagtcattgcattttgcaagaatttgggggactccacttacatcatttaggagggcgtgtgcacagcgttgtagtgagatttaagagattaaacttcacagccatgggcacaagatttggcacaacgattaagtgcaataaatggctattgttgttcttgatcatcctcatcccagcttccgtcggggccccgcttcccagcctgcgcaggacacctgcccggcacacacagaggggcgctcacctggtcggcgccggggagccgttgcgggacgactcggaagaagacgcagagaggcagagcggcgaccgccgaatagccccagatgagcgccagcagcactgcccgcgcccgccgcccaggaccccgcacgccgcgctgcaggtgcacgatgcacaccatgcgctccaggctgaccgcggccagcgtgaggatggtgacgctgccgctcagggtcatcacgtagaagagcaggtggcaggcaacggggcccagcagccaggcctcagtccagcgcacggccagcaccagagggatagcgctgatgaagagcaggtccgcgcagaagaggttgagtaccaggcaggcagtcgcgccgcggcgtcgtcggcgcgccaccagcaccagggcgcacacgttgcccagcagcgacactgcaaagatgagcaccagcacggttgtctccaccgcggccagcaccagccggtggtcgcccttgacgtcggagaagaagggaaagcgggtgcggttggcttgctccaggctgcgcaagggcgcgtcgcccgctgcccgcgcgcattcaggggacattcccggcgcctggcggcccgcagcggtctgagagagtgctcatctgggaggcgactgagtgccaaggcggggaaagagggagggaggcggttgcgacatctcgcctctggccccctcccttctgaggagcgccagcactgggtgcagggagctgcacccggggcgcgcgggaaccaggaagtgcccggcaacactggccgcgaacaccgcagctggccggggaggtggcggccaaggcggaagcctcgtgccctctggccctttgaaagtgtatccagaagccagaaaactcacttagcgaattcctcgagcccccgcagggcctgcccaacctcctttatttttcagggacactggatgtgcgaagccttttgtgaacggatttagctaaaattgatttaaaagggtcagagctggcctttggagattattttggcctgtgtcgttcaggctttactaaagaaactccatgggtctggaggtagatcctaaaacaacttgtaatgagtccatattttttgtgggggagagagggagtggagatcttttatcactacttaataacaggtctttaggtggattatctactccctctaccccagatttttaatctataaaatgggaataataataccccattaggttattgtgaggctcacctagagttttgcacacttggcacacagtaattactcgttaaatgttatcaaatattagttattgtaactaaaatgcatatacattttgcattctgaacaatgacataaatgctttcttataaaaagagtgagtccttccaaaatttttaataaacttgccatccaaggaagacagatatttcaaggctggcagattcacacacaagctatgaatgtgccccaggtgccacagtttgaggagcactgggcaatccagtcccgttagagataaggaaactgaggcccagccagagtgacttgtctaagctgtcctctggttagtaatgaaagccagtcacctgtccccgtcccacacatttccatcacaccactgcagtctcgttttctgtaaatgaggaagctggagatggaaaagtatgcctgtggcctaagatccagtggccacttccccaaccagccaccctcctgccacccacaccttcaccccctcttccctctgccatattaccaggcctctcccagttgcccactctgtcttctaattgtctttcttaaggttgggtcttaagaaatctaagcactgactgggcacagtggctcatgcttgtaatctcagcactttgggaggccaaggcgggtggatcacttgaggtcgggagctccagaccagccatggccaacgtggtgaaaccccgtctctactaaaaatacaaaaattagctgggcatggtggcaggtacctgtaatcccagctacttggaaggctgaggcaggagaattgcttgaaaccgggaggtggaggttgcggtgagccgagatcaggccactgcgctccatcctgggccacacagcgagacaccatcttaaaaagaaagaaagaaagaaagaaacctgagtacttcaggctggttgcgccagagtctgaagtactgtctggggagggggtccatttgtgtgtctgcttttcacggtatcaaacaggtctgagctgatgatgtgacttctaacctgagaagtagatgctcagcttgaacattgactaggttcaagttgaaaaacagaactggtttgcttcctgaaacagttgaaaaagggcaaaaaattgaaataaagggaactcagacaaatggggttttggcaactgtctgattagggtcaggggatattagtgtttgtgtgagggaaaggaaactataggtatatgtatgtgtgtgtgtgtgtgagagagagagagagagagagagagagaaagtaagagggaaaagcacagacagagacggagagagattgattacatcacaggctgatgtgatgagatagacacagagaggtttccctagaatgtacaaccagggtgggctctttgcactaaaaggccttctccaacattaacctcc

SEQ ID NO: 913665 - DNA, 4001 bp, Homo sapiens
ctgcccctccctggaatgggggtaggggcagagcccctggctgagaccagcattcagctccagctgtggaacccccagaagattctgagggccctgggttgaccctcaatggtcttcagccacccttcttcctctgccccagagaagatgggcgtcctgggatctgaagggtccgaggtcaagtttcagtcctgtcccagcctctgccagggagcctgtgctggaccaggattcctttacatttggatttggagaccctcctgagaagcggaccctcacctagttcgttgaaattctcatctccccaaaagtccgtttctctgggggagaggagcagatggggacaccccgggagcaagcacctggctctgccctggcacgccccgtgactgacagatgcaaatgtcccgccgggcccccgcaggccgctccctcccttgctggctcgcccgcctcccggccagctccctccctcctttatcttatcaaagcccggtaattacaattgctattttgtttcctcgaatctgcaatcagagctccctggcccagatgagggagcgcctgtcaacctgatcgctgagtgacagcccggccacctttcctggccgcccccacactccgcaaacacaaacacacacacgcacagacacaaactccctcgcctgcaaacacaaacacacactcctcgccaacacaaacggcccatctccgcagacacgccctcgcctgcacccagacacactacttcagcctatttccaaacgcacccctcgatcccagcccatcccccggcccctccaatccacacccgccggagaccgcagctcgctccgacgcgcgcttcctgcgccgggcgttcaaagcgccgcggactcactgccgaccgttcaaatgcaaatcgccgagactacgttaagcacttcggccactgtctgggagtcgtctccctcggcccccaaatagaagcctgcccttcctccagcagtcggcaaaccccggcgtatgccttcatcccccaggggtctgaggccacagtgagccggcagcgctcctactgtgcgctgaagggcaaagaagagggctcgaggagaggctggggcgaggagagaggaataaaccttgcccagctgtgtccgcggggcgccccaaccggccgagaaactcttgggccgagaggctgatgtggattgggcccccactgcgggcaggagcgtgctcggcgcaggcccgcgcccaccgggagacctacccggaaaaccggcgagaaatgcaaggagcgatcagtggcatcgcggggggtgggtggggtaaatattggggcggagccgcgcagggggtagatgggtcagctagggaggcctcccaggagagaggactcagccagtctcccgctcctcctgccaagcacgtgccgaggactttggaggctggggccaagaagaggaagggaaagaggagtgagggccacagccagacttccccactccaactcaagtcgttcgaatgaatgaatgaacgtatgcacgcatgcatgcaagcctcagtggcattcccccgccttccgcccaagattcggccgcccagagcagtggcgggactcggaggccccggccccacggcgcccgcccggagcctctagaggccagggaagcggtacgaccacgagcggcttcaacctcgcccgccagagggcgccagccccgacttccctctccctgccgaccgcgctccgcagcgagacccatggttcccagccaggccgcccctccgccgggctccccagggaagcatttttagcagcgccctcctggatcggagaaaggcgcctgcgacccagatcaccgcaacacagacgggcgtcatctccctttgtcctcaacttgaggaagagggaggttggaaactggacccctagttcctcaccacgggctgggggagaacctccttcactagggatgcgctgaagagcgtgcgggtcggtactgcggacgcaaggtcttcaaagctgacctcacctgccccagaaccaccagcccgcgatatcccggggcccctcccccttgactagaggctgggagtgggagttggcctgacccccatcaggccctgttctctgtctatcctcagcctgtctggccccaggttgtctggggaggcaatgttttgtttgtttgtttgtttgtgggcattgacaaccctccccccacaaccaacacagctgctgaactgctgaccccagagctggtcacatacactcatcctcaaaccaggtgtgtcagttcttcctggcacaaaggcagccaagtgccagaactacctgattccaggcaccaaagacccccagaccccacggtgtgtgggggacaagaatcccttagtccaggaggcaaattccctggggcccctttctgcccccatatgccaggccacccggattctggtttccctgtcacccaatctggccagtcccctccatctggcccccggagtcaggtttctctaagggcccagccctgctcagagacagcctgcaaggctcaaaggaggagcgaagcctggtcccgccctgccctcacaggccctctctgggccagagaccctcgtggggctagggacgcgcattcctcaggctgcctaagctcgcttatctgcccccctgcccatcagccgagtgctgacagaggcccagaccccttgtttggatgctgataacctcctgcgatgaccctctcccacctgcagagactgggaatgggctgagtgttgggaggtccccttccagcaaggcaactggggcccaggccccaggtcctagcccagggccatgagggtagaggatcccacagttctccaccctcccccaggcccagggccacgctgggtgcttccacagtgccacctggcggtccctagggaaacatcacccagcacaggaagaagccacacaagagctgcaaaaactccacaccactttatttcaacctttatccaaaaatgtaaaaactattaaaaatgtgtagctctgagcttcaggcactaacctccaattctcacaggcaggtgggaagggaggccccgggcatggtgaaaatcagaaaaccacggctgtgtggagcacaggccctctcctagcaccaaagacccaagtccctcccacccaacccccacccaagctctcctcttcaaggaagaaatatttacaattgttgaaacttgtcagggaacagggtgcatggcggtgcatggcacatggagctgacctgaaaagaggaaacaaggaatcagcatttaggccctcacctgcttctcctgccccttcccagagcctgctaggcacttctccccgcaactcacctaggagggctagggcctgcccccctgctttttggcaggaaggatggggcacagctcaacttcttcctcatcactgtcctcttcctcttcctcgctctcctcctcagaaacatcattgctcatcgtaactggtggacacacaagcagtagaaggatggggtgttaagaccagaccgtttcacaccgcatgccatttcttcacgccgtggtgttaggcttacagggaccatgacctcccagtgcttatgggctaggtgggaagaacctcagaccctaaactgggtcacaaagagccaaaggagtcttcattattggagctggagaagttgggccatgttccatggaggaggtaggcttgagtagacggaaaggagagggcatgtcatgcacagggcacagcgtggagggcacacagacctgtacagggctgcactgggagatgagggtgggatggggcaggagtgcggagtgggggaagcctgatgggagagtccactggaagcaaaggagagggccctcccctcttctcaccaatctggtgccgcccagtgatccgcacagggccagagcccgacttcaggcggaaggttacaggtggttggagctggaagtcatccagactgagctgggaggaagacaaggat

SEQ ID NO: 913666 - DNA, 4001 bp, Homo sapiens
aaggtttttaaactcacaataatcgctctctaaaaacaacaccagccgcccagagggcttgcttttctcttggtacatccaggactctggaaattggccccgtttcaaggcaggaatattgaatgttttagaaatcaatcagtcctcagcctctctgccggcagtagctctccgcacttgccaccccacagggagccgggagccctgccccagccgcctgggttccccagggaatggagcagggagagcccccttccaagcccagtttccacgtgtaaattgacccatccgattaaagtatttaagggttcccagcaacctccttttccaactgggagagttgaggggatttctctcccttctctttcccactctccttttgtgggccctggcgacatatcctctttcaagcgcttgccttaaacctaggccccctccccctgaaccccctgcctccacctgcagctggggaggagtgtatgaaggggggaggtgtaaagggagattcctagattcattcatttgctgggcagggaagggggcacctgtggccaagtactccccgaggccccttccctagccctctcttccccagctgaccctcaagacacctttctgccttaactccttcccttctgagctggggaccctgcaggcccccggccagtgcagttgggactggtggtccaggcgccgcgcatcccacaagctaccttcagcgcgccttaccgaaggggtcgccgtcctctgccatggcgttgatgcgcttgttggccaggacctgcacgtgcttcccgctggtgcggctgtagagttggtaggtccggatgaggcggcggctgagctgatccgtcaccaggctctgctccctcacatgctgtgtaaaattaggtgaggactgaacagttacctttaggaaattgaaaaatacacaatacaccattataatgctactccgcccaggggcccgagtggccccatcaccctgcgtccccctcactgccccaagccgccagcaggtgctgggggttcccccaacatgccagcccaggccaccatcccccacccacgcaagtcgggcagacccagcccaggatgaacgagccccagggagaagctggacccacctgttgggagacaccctggggctcccggccagcccggaacagggaagcgagctccctgcccagcgcagggcccctgcccgggccttcctagaggagcagggcgcttttaagtagggaggcagccctccccgacccctgacatttataaagacaaatttacggagcaaatgttgagagtgcagggaacctgggcacccgatcattgggccaaatcggccacaagcctcccccgaggggcgctgagagggtctctgctgcagtcacccggcttcccctggcatcgaacatccatcccctggccgcggctgcccccttcctcggcggctgggtgttccctatgcccccagccggcgaggatgcatgggggacagtgctgggctccgagaccttcgtttctatcctggccactcactcgctgtgtgacctcaggaggggtgctacctctctgtgcctcagctccctcctcggggtggctcggggctgggtttctaaggtgccctcagccctcccgcgccggccgcagagtcagtcccggtgcccccgaccggcgctgcccacccgggtctcacaccggcgcgcccggcccccgcctccgcgcacccctcctcacctgggcttggaggcagaggaccagcaagtgcaacagcctgtgggagacaaaagcgggcgggagagagaggcgcgggtgaggcgaggggcgcggggggcgggtggcggggcagggcggcgcggtactcacaggcagctcagcgcggagcgggggctgcccatggcgcgcggccccggggcaccgagagcccggcgggtcacgccgtcccgcgggccgccgcgggaggacgcgctgagcagggcgcgagcggagagggtgcgggtgcgggaggccggcggcgatcacgacgcggctccgcgggtcccgtggaacgtcgtgctcgccgcgccgcaccgaatcgctgtgcgccgctgccggagccggtggccgctggctgctcgggagccggagcgggcgggagggtcacgggctggcggggtgggtggggaggtgggagggcggggaggggtgggggcggggggcgccgcaccgggcgcgaggggggagcgcggggcgggcggcgggagcccgcagcccccggctgggaactggggcctggatgcagcccggggcgggggcggggcggccggggaggggcggccgacgggttcgggattgagggtctgggctaggggaggggtctggggacccgcgggaggggcgggggcggccggtctgggcgcctccccctatccccggcctgtcccctcgcgcgctccccggtcccggacgcgcggggatgggggcgcctagggctgcaaactctgcgggccgggagaccccgagcctgggcttccccgaccgcctggagcgcccgagtctggcgggtctgggtctccgcctccgggcccagccgcttccgccgccggctacgcagtggtctccgagccacctactgtgtgtcccgccgggcccctgggagcggccgctaaccatgcagcgaatggctgcgcacccggccctcgcgcagtgcgtgccggtgccacccggaccccgctcccctgtttcggccgcgtgccccgtcctgtcggtctctccagtctccttcactctcccgaggaggccctgggagccagaaatgcctccccctccccccatcccattatcactatcaccccttcccctgtgcccctcaccacacacacacacacacacacacacacacacacacacactagcctgaagcttgaggagcaccccgagccacctgtgtggaagagagagtccggaggtccctggcaggacccactgtccccgtacctcagcaggcagcaggggcaaaaaaactctcagtagcttttactgggggaagggacttccatccaggccacccagccctttccccctcaaagccccactcgtttttcatttcacaggtatttacacacctactgtattctaggcaggggctggtcagctgggcttggggcataggagaaggtaggcacttgtctaagcctttcctagccccccaccttgtggcttcccccctgaggtttctggaaaccctgagcccccatgctgcttctgtgggagcagcctgggtggacagagatgctctgggacaggtgccttgtgaggagcaggtgatgccctaccagactgctgtcttcacttacaacctccccttccccagtgaccctccattcccctgggggtagggctggagggtttggtgtggtcccaggaagccattaggccaaaattagcggcagccctagtccagcagcacagccaggccctgcctccctccctgctctgtgtcccacctttccctgtgccccatctttccaactcccagccataaatgcaaacactgagcaatggagagatgggaaaacagttagagggtgcgttccaagatcttatccctcctcagagaagtagacttccagagcacacttgccatcctcctccaggagtctgttcagtgggctcttgcccacacagaccttgcccacaaggaccatgtcttatgagctcagaaatcacagctcgtggcacaaggctgggcagagctgttctgcaattaagagttcgttgaatgaatgaatgaatgaatgatgggggaagtggctgagcctgtagacttcagcctatttgcaacttccccaggaagacctgccttcacctcctcccaacagattatcaccaggaacaccaccagttagtgagcacttgtatctgccacaggcttggcaggcactgtctcctctaaagcccatggggaggtgggtccatcaggcggagacaagtcaggtggacacaagtggccacagcccagg

SEQ ID NO: 913667 - DNA, 4001 bp, Homo sapiens
gcactccagcctgggcaagccagaccctgtcagggaaaaaaaaaaaaaaaggtagctcttctaaaagaatggaaaggaaatcattctgcaaaactttccttggagccagttttgacctgtgaggcttctgtccctatagaggttatctatgacacccaccacgccgcatccaagtttataccaattcagaaacggaaaaaaagtctgcagtcttgttagctgattaagtgagaagacattgattcaacctggctcaggttggcaattgctcatggctgcatttaatagaaatgttaaacaataaacattgcatccccctccccacatgggactcacatcactttagtcactctatctcccccttattctcagcctccctctgcatcgatttctctccccagtctccagtttttgcacatttaaagtacgcctatttctgtttccattatttttcctgctcttaatcaggactgagacttttcaaaatttttaacttctctgctatcccagagattctccataccccttacactctcatcccaagcatctcacccttacccttgcccccacccccattcgagaacctggacttctccccaatctctatcacagtaccccccggtctaagacgcccttagctttcccttccccacgcctcccccatcaaccctccctaagccggcaggcagtctcagccgttccagaaattgacaaagaagttgcagagggagtgccacttctcagcgcagtaggtctccgtgagctccgcgttcccgtccagcccgtcggggtcgggcccggtccccatgggtcgctcctcgttggggaccaaggccgccttcctcttgccctcgttggtcttcctctctgaggggttttctttgggcggtgcgctttggggaggcggggtcccagcggctgggccggacgcacgctcccgggtccgcccccggttccgggcccggggcttggactcccccgcgaatcccgcgacggtggggcgtgcgggcggggacgcgcggggcactagccgcagctcggcgccgtggcccttcttgcccgcgcacaagcgggcctggagcggcgcggggtcgtgacagggcctccgcttcttgcgcagccctcccagcacctgcttccagaagtgcgcgcggcgagcggcgtaggctgcgcagcgctccggatgcccgcggtaggcgcactggtggcgcgccccgtccgggctctggcagcgcagcgccagctcgctgcccgctgcggcctccggggcgggcagcaggagctgccagctgcacgcgtgctgctcggggctgaggaagcgacccgaggagccgccagtgggcccggggaccggctccgccacgttgctagccgcccctttctccctccgagcagccgcgaggaggcaaccactcagcagcagcagcagcgacggcgacagcgacgctcgcagcttcggaggagtcatgctccgcggtttccgcgctccgctgttctcagaccacgtttgtcggggctggaccaggcaaagagcattccccaggacctgcggacagaggcagagactgccaccaactgagccacacgcagcgcttcgcccagacacatgcacctgcgaactactcttccgcagactttctagaatctgcagcctgcgaggagaccctctgaggagctttcctggggaaactgcttactgtctaaataatcactttcgaaccatgtatgcattgagattttcttccccttgcaaatacgatagcaaaacgatgcgtgataattgccccctctaccccttccttcattttctcccttctccaacctgcaataaactatctacaaaatcatttcagatgattccttggaaacatgcactttactacactttgaacttaccgagttctgggagaggcgccaaagccttattagggtagagggaacgactgcacgggggagtagtctgttttagccggctccctgtgaatgaacgtggtatcaatggaacagaagaggcctacccttcttcgcccctccccgatttctctcacactgggagacttatcaccgccgcgcttctctctctctctccctctctctctctgtctctccagatggatgatggaagcggtcctgtagtatgaaatacaaatcttgtattttgcttccaatgtttaaaataatcaggcaaaattaaccaagtttttcttctttcatgtacttaaccatccaaaaaataaaaattaaacaaaagatctaagttttaaaagttaaataaaatgaaacaaaacaaacttcagtattctaaactaggcattttttacacaattatatcatttacattctatttctcatattctgagttctacatttttacctattatttccaatagcctttcttaagactctcaatcttaataattgttactactaataaaaatataatatcctagtttattaacatacaatagtgcccagcagttcacccaggagtggacatttgggctttttattatttttaggtattagaaatcagttataagggtcctccaaaaattagaagtttaaaaaaattatttgtattatagtagttgaacggtaagattaccaattgaaatggtataatagttaagaatgtgagaccagcctggcctggtgaaatcccgtctctactaaaaatacaaaaattagccaggcgtggtggcagatgcctgtaatcccagctactcaggaggctgaggcaggagaatcacttgaacccgggacagggcgagactgcctctcaaaaaaaaaaaaaaagagagagagaatgaatgtgttcttgaatcttgaaaatgttacatttaagcaaagctgctttttctggagggggggattgtgtgtgtgtgcgggggtttgtttgtttgtttgtttgtttgtttgttttgagacgggagctcactctgtcacccaggctggagcgcagtggtgctatctcggctcactgcaacctctgccttcccggttcaagcgattcacctgcctcagcctccccagtagctggaattacaggtgcctgccacaacacccagctaatttttagtggagaaggggtttcaccatgttgcccagtctggtatcgaactcctgacctgagatgagccacctgcctcagcctctcaaagtgctgaccaagcaaagctgttttttctttctttttttttttttttgctctttttaaaatttttatttagaagcctacttgtagaagttagcataattttacagattattagaaaaattcaattattttctctctgcaaacagttataataggttaggaataatagattagaaatgtactacattgcaaaaacagtggcctataactatctgtacatttactgtgcaccttaaggaaaagaatttgacagtgtgctatacttacactgcaggtaacatatttttattctatcacacaaaactgaccagtggtagtgcttgaatttataaatggccattaaacagaatatttaaactgagatgtatatttagcatgctaaaaagtgaaaaaaatttcaactgaagttctgtggctcatcagttcaaatgtttcatggcatttttttctttaaacgaaaaattttgatattgtaaaacaaataattttacataataaatgcaaaagtataaaattttctaaatttttagaaagaatatttccattcattttgtcatgggttttgtgtggctcctcttaatatattaatgatattaataagacactggtcctataccactttcagagtccatcttcaattaaaaactgtaacaaaaataaacagtatgtagagtaacacaaagtaaattaaatatactaaactcacacaacaggtagaataaaatgaaaccaaattacataatggcaggttatacattttaaagactctctttccacttagtcaaataagaaagacattgaaatgttaacttactgatttctgtggggttttccccactggttc

SEQ ID NO: 913668 - DNA, 4001 bp, Homo sapiens
ctcggccactgggatcacctggtgttttgttcctgggtagatttcacatcaggaaagtcaacagtgtccggctcctccaaagtgcagacccatctcttcgcttaaggcctccctacttctccccagcactgagtaggagcgggagctgtcaaggggtcaaggctagggggaaattcctcaacaaattgaaatctcaaaaaacacacactgacccaggaccacaaagccctcccggtttaatgcttgcgtccaatcagaacttgcgagcagcttgggggtgctccccaccaccaccccctttcagggcagcacttctttcatttgtttgcctgaaatatcctgtttttctcccccttctcggggcgctaaagagctcagagaaatctgcattttaattgacattccagggaaagagagaggggcgcctgattgcttttctattcaaactaaacaggcttttcagatgaaaatgagtcgagcccggtggaagatttacagggatttgggaccagggagacaatggagttttaaatgttgatagcgtttcacaccaaacacataatgggtgccctgagtttgaaagcaggtttgcctttaagggtaggttttattgaattgggagaaaggaaggagggtctggagaacggtctgcaagggagcggggtgcgaggagagcgacggaggctggtggtccccgagcgggcctcctgcgccaggtccgtggtccgcgagggtcggagccagcgccacgcagggccctcggcttttttccccagcgcggccccgtggccgaaaaaaatgagcgcgcaagttagaactcgcctgcgctttcgacatctcccagccgctgcggcagagcaggcaggcgaactagaaaaagtcggtccagttcgccccctagccccaggcgcactgcgctccctccagcgccgacggcggctgcgggcgaggggcgcccaggcaccggagccgtcgcctccccagcagtgccacccctggccatcgccacccctacgggatgtcaccggccccaccccagcggccccctcccgaaaaaggggtctccgcagggcctggatggtacggaagttcccaggacacacggatggggcacctcggagatgaccccgggaaccggcctgcggggctgtgccacgggcaggcgaaccttccgcccgtctgctctggggtcggagaaacgcgcccagtcagcgggaatgcgcccgccagggtttgacagggaggggggcgtcaacgccagaagcagatgtcagcatctggatgggggtagcagaggcagaacttccagaacgccggccgtcagcacgcacccacctcccccatcacctatgcagccacagagggaggacacggagcgtcctccacaatgctagtccttccgcgccccccgcccggaggacggtgcacccggcgtcccgggctcccgtggcgcccacgtccccggctggcgaagctccccgaggcgtcttgcgcggcgattaccttgaatggcaacgctcctccgcgacctgtgttgtccccgcgccccgcgtgggtcgggatggagaaagcgacgagcccggggttgcggggagcaactccaaacgcagaagagtggtccttgggtcttcgccggcgccaagcctcccgggcttcacgcgtaccccaggctgcggaggagcgcgggcatgacgcccgcgggctgccctcggatttggggaacgagaggaagaaaggactcaggcttggcgttgcctccaccaaactttgctcgcgagttgcgaaggctcagagcgcgcaggcaagctgcggcctcggggcccccggggctcgcggccggcccccgccagcccggagagcagtcgccgcgccgggccaggtacgccgcatgcagccccgcggcgcccgagctttgtggcggccgcgcgcgctccctcgcccgctccgcacccgccgcccgcccgctcggctctccaccgcgctctcctccagccgccgcccgcgccgccgccgccgcccccgcctcctcgcggcgggtcacgcccccactgaaacccgagccgtttcctggacggcggcgccctctctgccaatcagcgccgcgcgcccgggccgccccgagtcccgcgcggctcccgacgcctccgagcagccggagacaccggcccgggaggcgagggctcggccgcgatgcggccgtagggatgcagcgacagcctccgaataaggcctggtcccgcgccccgcgccacctcctccctcctccccgggcgagcgaggctggccaacggctcgctgagcgactgcgttacgttgttttatgtcaagttagaaaacaaatgaccgaaggctctaaccctgccctcccgctaaagagactttaaaatgcgcctgcttgatactgcggggagggttgccaggcagctgaagcttttggaggagaggaagccacttggaaatgttcgcaggacattgcatgtttctgtccttctaaacaatagaaatgagaggaaaaaactgaatattaatggaggccctactatgggagggtcacactacataggtgattctatttcatctgcccaaccaccctgcagagtactattcccagtttctgataaggaaacaggatcagagaggttaagtaatttgcctaggaccacacagctggctactaggacagcctgactttgaatgtggctctctcagaaaaagccaaaattgcatcaaaaaaaaaaagtgtttaataatatatgtttggattaataaaaagaaattcaaaggagtctaaagacaactctaccataaatagaccttgaacaaagtaattcctccctctgaatcttagattaaaaatcataaatgcaaaatctgattcttcaactgcacaccaagctgtaactggttaaagttcctatgtccatttaccttttcactaagccgtgtcttcggaataatttattttaaatatgctttttctccctccttattcatccagctcctgagcagccgtgcttaagttcaagaccatatagattaaaaccttaattatttttctttagaaaaggtcactaaacccagaaatgctttagaatccttttgaggcctgaagatagatgaagcattgagaacaaacctgacttggaaaacagacttttcctggatttagaaacatatttgcacctgtgtcactaacattgcacccttcataacatttacaaaaatatttttcaaggtgctacatgattagaaaatcatttttattcacaaatatagcacagaaaacgtttatgcaagttatttaaaagccacacaagtaagaaatccatttaactgcctcaggcaaaaggctataacattgtattttggaaatttgatagcaacaaaataaaaactggttcttaagcaaaattatccctctatatgcttggtgggagggtatgtttttggtcaagtcctctaacctggattagccccagagcctatacattaacggacacctcagcccaggttgacacttagccattcactcccacacgggttgttctgatagcagtatgttttcaagttctcagaaaagggatgcagctgaacgtgtctgcctgctcgcaggttgccacttacatctttatattccccaccaatgggaaactcgagtgtctcaggacagttcctttcccatcctacaccgcatccatcagccattgaaaatgctgttaacacattctcacataaattaatggtgcaggaagccgctgtccctatcccccattcatcaatagctttatgcatgttgaatggaaaggaagctttccgctgaaaatgacaaataagaacacctactttcatgtccaggcacagtttgcagaatgtattttttatagaaatgaaaagacaccaatctatcaaaagctccttattccctaaagagggctcatatataagggactgaaacccacaagaccacaacaggaaactcttcagttttgaggagggggggg

SEQ ID NO: 913669 - DNA, 4001 bp, Homo sapiens
aaacttccttcaagaattaaatacagtaaaacaaatcctctgggaccattttacactttatgttgaaataaactcacaataacgctgccctgaaaagccaaaatgaaaaatgacagtttttccctaacctgggttgctcctaaagcccacaccgtaggaaatcccagctcagcttcctcagtttttgccgagccacgcactcaagggaaaaccagcaatcacggaaacatccattttaattattagcaaaattaaagacgtacaggcatgactttcagaaaccaggaactttttccctcttacatgaaagccctgtaaaaatgcatcaccactgcaaattacactcatcctggtgtcccagcacaaatcaccaagaggcagttccataatcggcctgtagctgtagctatacaagcctcagacacaaactcctaccagattcccttcccagagacgcagggagatgtcaccacacctgttaattatagagctgccatccctctgtgtaacgaaaagttccccagtctcacacgattgcttcaggtgataagtgcttcggtcctcatccttcaatgacaagtgcctggggtcttcctggggagcccatgtctctcagaactctcatctcagatggacgcaaccctccttcctaaactgtcctgatccagctaaggaggctgggctctctgtcctctcccagcctaccccactgggtaagtgtgctgttcattcaccccacgcacgagatgtgttcccagagcagctcagcttaccccagacaccactcggactgctgcgggttcctaaagccaggcaggcaccaggtggactctccacaaacaggttcattaagtggcgatgagtgctgggatctgccgttttattctcggattaccactcgaaaaataactcagctaccaatattccctactgatgacagatttcagtgcagcaccaagtagaggcttggctcacgttgtctccaaagggctgggagagaggttccaaatctgctaagctgaataattcagcctcatgtagtcctcgtaattggacttacaccttgaaaattaaatttccaaagctgtgacaccggcgcatgccctgtgatacttggaggttctcggagctggaggagatcccctggcacattcactttcaagtttacctaaactagaatctgccactctgtgatgatgcattgcttaagtattatgaattacaatggctaaaaaaaaattctgagatgtcaagcctctctctctgtgctaaacttcagaaacttcttttctccttaaacaatgaaaataagatgtcagcatttcagatgttggcaatttcttttagtggttcatcttgtccgaaaatagcaattctttacattgtaagcagtaggaatgatgctgggggagactagagatgacattcatcctcccaaggttcatcccttccacagctctctcgggcactggataaaggccaactcccagctgtctccctcacccagcacagagaaacacacacagcaagaaaccaccaaactataccatcctgcctgcagtgctgcggcaaaggaccttctctcatcagctctgccttgccgggagccaagagaccacgatctggtgctcttagaagccccatttacaatgcaagggtagctgattctaaaacaggccttaacaatctgcccccagacaaatcccaaaacaaacctgaaaagtgaaattaaatgacttaccttctggctctaatgtggtatcctcaactaaactgaaggagggccgggccagggacaaggttgccatggtgaccacgaccaggcagatgaaacgaccccagctgaccatggttacggtaccaatccccggtcctcttccatatctccatgtggacgttaatcccatctgcacacttcctctacgggcatggactacgcgcaatgccttcagcctgcggtgggctcaggaaccgaggcgctgccgctgctgctgcagtcactaaaggaaagagattggcgagtcagggaatcttccccaatgccaaatcactccagcccaagtgggataaaaccatttttcagcctctcaaatgtgcgcaaacagagttctttttcattatctgctaaatccttccatcctcacctcagagtcccaggtgataccaccagaccggtccacagaaatgtgtgaggctaatctttttaaaagcatacttttaagaaacagagataaaacagtagctacaggactcagatacgtgcagccacttcagtgaggcaatgtgtgctctcttctactatccactatcgcctccaccgccctcaatgagcagaagcaacgtgaccttagtttcaagggcaactacaaaagcaagttaaaaatgctcgggttggcataaccaacctcgttcccttctcttagtccaactgggctttagaaagctaaactgttggaggagtctgctcacagctccgtatttctgctgggctggaggtgagcagtctcccaccctcactgtcgctcttgggaagaaaggagaccagcaaaatcaaaagaatcccaggaaggctacagaaaattcccaccagtttacacttgtcaggattcattttcaaatggagaagtgtctttcagtcttccgccaagcagccacttacgaagagtgaacacaactgcagcgcattcaacgcagctgatccaaaaaggacttcgaagcctgaattcccttcccctgtgactaaatggcagtccagggctgctaaatgtcttcaacctctgtagaagggtgaggaaactgagcagatgcaaattctgatgaataatgcaggaatttattaataatgatgatgtaaattatgtaaattatagtcatggtatgtgattggaccaataactttccatatgcaaacctactggctaaattttcagagtataagttagaagaggacactcaacttaatattctgttcacccatttgatccaagggaaagagaattttccaagaaagcttaatatattccaagcaactttaaattcactcagtactctctgtgactaagggtacagtaaaatgcacaaactttagagaatgattaaaacaatcacaagaaggggctcatcaatctcaggcttcagattctgtgaaccacaggaatgaaccacattttctaagactgggggtggcagggaggcctttaatacaaaaatctctaaactctacattttttatgtacccactcgatgtttcaagttatgtcataggatttcaacactgctggagcctccccaaatctcatcataaaaactgctccttttagctttgactgaggacaaaaatggaggagggaaaagaatatgccacatcatttccaaaggaggaataaagaaaacctctgcttcaaagatagcacaggtgaaacggtgtgattcacagcaaaagcaagaaaagtatgtgtgcagtgtgtgtgtgtgtacacggtgtgtgtgcgtgcatggtgtgtgtgtatgcacggtgtgtgtgtgtacatggtgtgtgcgtgcacggtgtgtgcatgtgctttcagatagcttgaaagatttttcctcttaacttttctttcctcttagtcaagagcctcagaagataatttcggatctatttctacatacatgtgggaggaaagtacacaaacattctcattgatttactaagcatttgcagaatgcaggggaattttctacctctaacacgacttcaggaacaatcctaagtcctcgcagaggtttcaccccaggctccttccccggcctgctcgcccacctgtccctgcccagaggagcctccttggctccaggcagagaaaggtggacagggcgctccgctgaatctcaagccgttccatcatcccgctagctggcactagaaatttgcatttcagccatttccaggtccaaaccccacggcagccccctccccaaaactctggaaggcggagacctaaggcgacaggtctgcacag

SEQ ID NO: 913670 - DNA, 4001 bp, Homo sapiens
agcgcattcaacgcagctgatccaaaaaggacttcgaagcctgaattcccttcccctgtgactaaatggcagtccagggctgctaaatgtcttcaacctctgtagaagggtgaggaaactgagcagatgcaaattctgatgaataatgcaggaatttattaataatgatgatgtaaattatgtaaattatagtcatggtatgtgattggaccaataactttccatatgcaaacctactggctaaattttcagagtataagttagaagaggacactcaacttaatattctgttcacccatttgatccaagggaaagagaattttccaagaaagcttaatatattccaagcaactttaaattcactcagtactctctgtgactaagggtacagtaaaatgcacaaactttagagaatgattaaaacaatcacaagaaggggctcatcaatctcaggcttcagattctgtgaaccacaggaatgaaccacattttctaagactgggggtggcagggaggcctttaatacaaaaatctctaaactctacattttttatgtacccactcgatgtttcaagttatgtcataggatttcaacactgctggagcctccccaaatctcatcataaaaactgctccttttagctttgactgaggacaaaaatggaggagggaaaagaatatgccacatcatttccaaaggaggaataaagaaaacctctgcttcaaagatagcacaggtgaaacggtgtgattcacagcaaaagcaagaaaagtatgtgtgcagtgtgtgtgtgtgtacacggtgtgtgtgcgtgcatggtgtgtgtgtatgcacggtgtgtgtgtgtacatggtgtgtgcgtgcacggtgtgtgcatgtgctttcagatagcttgaaagatttttcctcttaacttttctttcctcttagtcaagagcctcagaagataatttcggatctatttctacatacatgtgggaggaaagtacacaaacattctcattgatttactaagcatttgcagaatgcaggggaattttctacctctaacacgacttcaggaacaatcctaagtcctcgcagaggtttcaccccaggctccttccccggcctgctcgcccacctgtccctgcccagaggagcctccttggctccaggcagagaaaggtggacagggcgctccgctgaatctcaagccgttccatcatcccgctagctggcactagaaatttgcatttcagccatttccaggtccaaaccccacggcagccccctccccaaaactctggaaggcggagacctaaggcgacaggtctgcacagttcctcacaccagtggacaaaagtatggtgcgacctcctaggcaggataattaggtccccaggctcggtgttgggaatacaggcccagcatgccgctggcggccacaatcccggcttcctgccttcaataccataatccttcctggagtctgagccccagtgaaagccccagcgtgtttatttttccccttgaaagggaactctcttctcagcctgcacgcgggaggagttgtcaccctccctctgatggatggctcttctcggccgcccgccccccggtccattttcacctcggcacaagcctgcccccaaagacaggcagagtgacaagcaggaagggcttggctgcggagcggtccccatgccaggcctgtgctgggctcttcaatttaccatgacattcccaaaacccccgccctccaagaaggcagaccaatacagtgccctccgctttgggcttccacctaaggggtgatctgtccactgctggctcggccactgggatcacctggtgttttgttcctgggtagatttcacatcaggaaagtcaacagtgtccggctcctccaaagtgcagacccatctcttcgcttaaggcctccctacttctccccagcactgagtaggagcgggagctgtcaaggggtcaaggctagggggaaattcctcaacaaattgaaatctcaaaaaacacacactgacccaggaccacaaagccctcccggtttaatgcttgcgtccaatcagaacttgcgagcagcttgggggtgctccccaccaccaccccctttcagggcagcacttctttcatttgtttgcctgaaatatcctgtttttctcccccttctcggggcgctaaagagctcagagaaatctgcattttaattgacattccagggaaagagagaggggcgcctgattgcttttctattcaaactaaacaggcttttcagatgaaaatgagtcgagcccggtggaagatttacagggatttgggaccagggagacaatggagttttaaatgttgatagcgtttcacaccaaacacataatgggtgccctgagtttgaaagcaggtttgcctttaagggtaggttttattgaattgggagaaaggaaggagggtctggagaacggtctgcaagggagcggggtgcgaggagagcgacggaggctggtggtccccgagcgggcctcctgcgccaggtccgtggtccgcgagggtcggagccagcgccacgcagggccctcggcttttttccccagcgcggccccgtggccgaaaaaaatgagcgcgcaagttagaactcgcctgcgctttcgacatctcccagccgctgcggcagagcaggcaggcgaactagaaaaagtcggtccagttcgccccctagccccaggcgcactgcgctccctccagcgccgacggcggctgcgggcgaggggcgcccaggcaccggagccgtcgcctccccagcagtgccacccctggccatcgccacccctacgggatgtcaccggccccaccccagcggccccctcccgaaaaaggggtctccgcagggcctggatggtacggaagttcccaggacacacggatggggcacctcggagatgaccccgggaaccggcctgcggggctgtgccacgggcaggcgaaccttccgcccgtctgctctggggtcggagaaacgcgcccagtcagcgggaatgcgcccgccagggtttgacagggaggggggcgtcaacgccagaagcagatgtcagcatctggatgggggtagcagaggcagaacttccagaacgccggccgtcagcacgcacccacctcccccatcacctatgcagccacagagggaggacacggagcgtcctccacaatgctagtccttccgcgccccccgcccggaggacggtgcacccggcgtcccgggctcccgtggcgcccacgtccccggctggcgaagctccccgaggcgtcttgcgcggcgattaccttgaatggcaacgctcctccgcgacctgtgttgtccccgcgccccgcgtgggtcgggatggagaaagcgacgagcccggggttgcggggagcaactccaaacgcagaagagtggtccttgggtcttcgccggcgccaagcctcccgggcttcacgcgtaccccaggctgcggaggagcgcgggcatgacgcccgcgggctgccctcggatttggggaacgagaggaagaaaggactcaggcttggcgttgcctccaccaaactttgctcgcgagttgcgaaggctcagagcgcgcaggcaagctgcggcctcggggcccccggggctcgcggccggcccccgccagcccggagagcagtcgccgcgccgggccaggtacgccgcatgcagccccgcggcgcccgagctttgtggcggccgcgcgcgctccctcgcccgctccgcacccgccgcccgcccgctcggctctccaccgcgctctcctccagccgccgcccgcgccgccgccgccgcccccgcctcctcgcggcgggtcacgcccccactgaaacccgagccgtttcctggacggcggcgccctctctgccaatcagcgccgcgcgcccgggccgccccgagtcccgcgcggctcccgacgcctccgagcagccggagacaccggcccgggaggcgagggctcggccg

SEQ ID NO: 913671 - DNA, 4001 bp, Homo sapiens
tttccctcttacatgaaagccctgtaaaaatgcatcaccactgcaaattacactcatcctggtgtcccagcacaaatcaccaagaggcagttccataatcggcctgtagctgtagctatacaagcctcagacacaaactcctaccagattcccttcccagagacgcagggagatgtcaccacacctgttaattatagagctgccatccctctgtgtaacgaaaagttccccagtctcacacgattgcttcaggtgataagtgcttcggtcctcatccttcaatgacaagtgcctggggtcttcctggggagcccatgtctctcagaactctcatctcagatggacgcaaccctccttcctaaactgtcctgatccagctaaggaggctgggctctctgtcctctcccagcctaccccactgggtaagtgtgctgttcattcaccccacgcacgagatgtgttcccagagcagctcagcttaccccagacaccactcggactgctgcgggttcctaaagccaggcaggcaccaggtggactctccacaaacaggttcattaagtggcgatgagtgctgggatctgccgttttattctcggattaccactcgaaaaataactcagctaccaatattccctactgatgacagatttcagtgcagcaccaagtagaggcttggctcacgttgtctccaaagggctgggagagaggttccaaatctgctaagctgaataattcagcctcatgtagtcctcgtaattggacttacaccttgaaaattaaatttccaaagctgtgacaccggcgcatgccctgtgatacttggaggttctcggagctggaggagatcccctggcacattcactttcaagtttacctaaactagaatctgccactctgtgatgatgcattgcttaagtattatgaattacaatggctaaaaaaaaattctgagatgtcaagcctctctctctgtgctaaacttcagaaacttcttttctccttaaacaatgaaaataagatgtcagcatttcagatgttggcaatttcttttagtggttcatcttgtccgaaaatagcaattctttacattgtaagcagtaggaatgatgctgggggagactagagatgacattcatcctcccaaggttcatcccttccacagctctctcgggcactggataaaggccaactcccagctgtctccctcacccagcacagagaaacacacacagcaagaaaccaccaaactataccatcctgcctgcagtgctgcggcaaaggaccttctctcatcagctctgccttgccgggagccaagagaccacgatctggtgctcttagaagccccatttacaatgcaagggtagctgattctaaaacaggccttaacaatctgcccccagacaaatcccaaaacaaacctgaaaagtgaaattaaatgacttaccttctggctctaatgtggtatcctcaactaaactgaaggagggccgggccagggacaaggttgccatggtgaccacgaccaggcagatgaaacgaccccagctgaccatggttacggtaccaatccccggtcctcttccatatctccatgtggacgttaatcccatctgcacacttcctctacgggcatggactacgcgcaatgccttcagcctgcggtgggctcaggaaccgaggcgctgccgctgctgctgcagtcactaaaggaaagagattggcgagtcagggaatcttccccaatgccaaatcactccagcccaagtgggataaaaccatttttcagcctctcaaatgtgcgcaaacagagttctttttcattatctgctaaatccttccatcctcacctcagagtcccaggtgataccaccagaccggtccacagaaatgtgtgaggctaatctttttaaaagcatacttttaagaaacagagataaaacagtagctacaggactcagatacgtgcagccacttcagtgaggcaatgtgtgctctcttctactatccactatcgcctccaccgccctcaatgagcagaagcaacgtgaccttagtttcaagggcaactacaaaagcaagttaaaaatgctcgggttggcataaccaacctcgttcccttctcttagtccaactgggctttagaaagctaaactgttggaggagtctgctcacagctccgtatttctgctgggctggaggtgagcagtctcccaccctcactgtcgctcttgggaagaaaggagaccagcaaaatcaaaagaatcccaggaaggctacagaaaattcccaccagtttacacttgtcaggattcattttcaaatggagaagtgtctttcagtcttccgccaagcagccacttacgaagagtgaacacaactgcagcgcattcaacgcagctgatccaaaaaggacttcgaagcctgaattcccttcccctgtgactaaatggcagtccagggctgctaaatgtcttcaacctctgtagaagggtgaggaaactgagcagatgcaaattctgatgaataatgcaggaatttattaataatgatgatgtaaattatgtaaattatagtcatggtatgtgattggaccaataactttccatatgcaaacctactggctaaattttcagagtataagttagaagaggacactcaacttaatattctgttcacccatttgatccaagggaaagagaattttccaagaaagcttaatatattccaagcaactttaaattcactcagtactctctgtgactaagggtacagtaaaatgcacaaactttagagaatgattaaaacaatcacaagaaggggctcatcaatctcaggcttcagattctgtgaaccacaggaatgaaccacattttctaagactgggggtggcagggaggcctttaatacaaaaatctctaaactctacattttttatgtacccactcgatgtttcaagttatgtcataggatttcaacactgctggagcctccccaaatctcatcataaaaactgctccttttagctttgactgaggacaaaaatggaggagggaaaagaatatgccacatcatttccaaaggaggaataaagaaaacctctgcttcaaagatagcacaggtgaaacggtgtgattcacagcaaaagcaagaaaagtatgtgtgcagtgtgtgtgtgtgtacacggtgtgtgtgcgtgcatggtgtgtgtgtatgcacggtgtgtgtgtgtacatggtgtgtgcgtgcacggtgtgtgcatgtgctttcagatagcttgaaagatttttcctcttaacttttctttcctcttagtcaagagcctcagaagataatttcggatctatttctacatacatgtgggaggaaagtacacaaacattctcattgatttactaagcatttgcagaatgcaggggaattttctacctctaacacgacttcaggaacaatcctaagtcctcgcagaggtttcaccccaggctccttccccggcctgctcgcccacctgtccctgcccagaggagcctccttggctccaggcagagaaaggtggacagggcgctccgctgaatctcaagccgttccatcatcccgctagctggcactagaaatttgcatttcagccatttccaggtccaaaccccacggcagccccctccccaaaactctggaaggcggagacctaaggcgacaggtctgcacagttcctcacaccagtggacaaaagtatggtgcgacctcctaggcaggataattaggtccccaggctcggtgttgggaatacaggcccagcatgccgctggcggccacaatcccggcttcctgccttcaataccataatccttcctggagtctgagccccagtgaaagccccagcgtgtttatttttccccttgaaagggaactctcttctcagcctgcacgcgggaggagttgtcaccctccctctgatggatggctcttctcggccgcccgccccccggtccattttcacc

SEQ ID NO: 913672 - DNA, 4001 bp, Homo sapiens
cccgccgccccttcaaggcaaatccctcgagagcacaggttctagacgcccagggcggctggacttagaggcagagcagggaggttccgaaggtcgcctgggtgaggggtgcacagcagaagggccacccaccccaaagcccaagagccgctcagcccagctccctgctggccgagccgcccccggctctgcgcttcctcccagggcaccaaggccttcaacgccaacacgtggggctgtcaccaggggaaaccggaggcctgagctcagcacctctggacccgcacccggctagcctccagcctcccttcaaacttcggtcccttcccggctgtagaggaggtgactgaggcggaagccggcggccgcggtctggtggccaggggcgaagccaggggaggggttaagggtctggggagcgtgggtggcgactgtcggtggccgcctcccgaaagaaaagtcgcccgccaggcccccggggaaggtgccaaggccgccagccagagcgctcatagcagaagcgaaaccggagaagcaggtggcggcctcgggtgcggatggagagggcgaggcctgcaggtccaggcaagccgcgctcgggggctccagcgctggcgcctcggcccctcccacgctcctggctcccgagcgcacggccgcgctggcttcagctctcctcttcctcttccttcggaagttcccgttgtcaaacatcttctcgcagttggggtccagggtccagtaattgcctttacctgcagaagaagaaacagcccagttcagaaggttcgagctttgacgggccgtggtgtgagccagcgaggaggtcagcttcagaaagatcccctgctggcccttacagagggtctgagtcctcgcccccattccacccttgacgggcactctgtacccgatgggcctccacagcaggactgggaagaaagtgacaatccagaaaggaggaggaagggagccctgggaaaggccgagccccgttaaggtgaaggaaggcctgcgagatgctaatggtgggactccgccagccgctctgccaaggacagcgcagaccacgccaggcccccaggtaggctccagagctttccaaacgggcatcctatttgttttgcccatccttggggtaggcgctgtcttccccattttaccaggtagggcactgaggcccagggaagttgagtcactcccaaggtcacccagcttgctggctctcccgcttcttcctccgaaggagcgcacagagattgagagccccgggaccgccgcactgtaaacgcgggcctgtggtgggctcagccgctgtctgagaacctgtccatgcccaagcacttcttccccttctccctcctccccgggtatccccaaccgcgcagggagaaattaggttgtctaaggtgctcccacccccggagtgcccgcggcccggcgggaagatggggagtcctggacggagcgagccggcgcgccgctgttacctgggtcgtcctcgtcgcggggcaccttcttgaagcagtcgttgagcgacaggttgtggcggatggagttctgccagcccgccttgctgcgcttgtagaaagggaagttaccagccacgtactggtagatctggctgagcgtcagcttccgcagcggcgcgctctggatggccatggcgatgagcgccgagtaggagtagggcggccgcaccagcctcagcagctcctgctggccggagaggctcagccaggcgaggtcggcgcccgccaggccgcccggggcgccgaggagcgggccgggagccccgtagctcggggccgcgtagggcggcgcaggcccgggacccgaagcgtaggacttggggctgagcgctggcgcgttcacccacaggagggggcccccgcccaccgcgcccagatcccctggctcatagcccggggggtgcgcggtggcctgggcctggccgggcggggccgaggaggggcccaggtcgtcgcagtaggtggccatgtccagccgcgcccgggcctgggccagcggtgccgcaccgaaactcactggcgacccatccagcttggccgccagcagcgcccgggtgcgaccagcccggcccagccctccgccctttaaacaccgtcggggccagagcccatggagagtgacggtggcgagcccctcccctggcagccctggaggagcgaaatccttgtcctcgccctggtgtcagttttccgccccgcccaggcctgacacgtcctggaccggacgcccctctgattcccccttcctcctttgtgcgatccgtcccgagtccacagtcgctcgcggtcttggttgcagggaccctaagtccgtagcctcgtctggcttcacgggccccgcagccccgactgccctggaccgtaccacgactcctcaaggcccccagggctgtggcttgggagccccgtccaatgcgcggcccctttgctcggctcgggacatctcgccccaaagaaactcgcctcgccggggcccctgggttacccgggactcggggctagggatagagggcgactacactgcgcaagagatcgcaatgaagtccgtagatctccaggctggagccgcagagcgaggtggcgaggtggagaacgcggggctgggcctggacagcggccctggggtcgtctggagtcctcgctccctcaacccggaaggcagcggactgacatctgcgccgaagtcgcgcgtaccccacggagggtcgggaccctggaaatttcgaacgccccagcagttcagggcagtcatcgcttttcccaagccggggagtccggggccccgccaggtttctccgcgctgtgacctcgggcgcgcagagcggagagcgccaagctctctgctgggtgtcggaggacgcgccgaaaacagggacgtctctgcagtgcgtccgacaccagctctccagtcctgctgccgcccggggttgctgcagcccgggttatcccggccccccaagctgcccggctttcggcctcccctgctccccgcgctgtggggtggcggaggatggacccaggctgacgctgggctgggtacctggaaagagggcccgcctcccggactccgagtcgggcacctgtgcgaaagaggcgaaaattcaggcctggtgctcaaggctcagagatgaggagacctccccatccccccagattcctgccggcggtgttggcgctgacctcctggaagctggcctcgccctgggtattccccagcgttacgcgggcctgtggatctaattttaattcatttgtaaaacaaaaggaccaacccttcccgacttttggcggtggaggaggcttgtaggttgaggccagcggttcgatcgaggaaagagtttgggtttggggattaaagggcccatttgagtcagcgacttactggtggtgcagcccctcggcctcccagatcgtagttccaaattttatgtaaaacaactaatttatggaacaatttaacaaatggcagaaagaagtgagagtccctctgttgggacgttggcctctcgccttagaagtgaagccccttcagaagtggtgggtgaaccgaaggcatttcccaagcagtcaagagaaaagaaataccccaaaatggttctttgaggtcggcttttcggctggactctgcccccttttccttccccctttcccaaagatttctgatttttgtcaaaggaatgctagttgtgggggtcccaggtgccttttacgaagccgccctccccttccatccccgtcgttgcaggggcggttgcggggtcaacgggaagtactcggggtgggacacgcctcttcttgctgagtctcaggtgaacacagtctattgcttccacccaaaagagcagccagtgccacctgccactcagcttagcgatttccagtgcccccctcaggggaaaccatgctgctgtccgtaggtgtgaccagctttttggtgactacctcttgaagaaagtgtctttccctcag

SEQ ID NO: 913673 - DNA, 4001 bp, Homo sapiens
tctatttacaaatccagtaagtggctaatctgctgtacttgattcctgcgcccacaatttcaattactccaaatttcctctctggaatatgatttactatattccaggagaattacagtatttgtgaacagtacatcatcaattgatgaaaattttcctgtaatctttttcaatatatgtagagatttccattttcttttgagtttctttaaggtaaaccaccttgccctttggattagtcagctttctcttgtttcattttatttatccagttatttttggagagtctcgctctattgctcaggctggagtgctgtggcgccttgatggctcacatcctcaacctcctgggctcaatcaatcctcccacctcagcctctccaagtagctgagactacaggagtgcataatcacacctggcaaacttaaaaaaattttttttttgtagataaggggtttcgccatgttgcccacgccggtctcaaactcctgggcttgagcaatccgtccacctcagcatcccaaaatgctgggacttcattttagaactgaaattcttagaaatgctggaagacctcagttgccactcaattgtattggaagaagctcctagttccagctttgcactgaatttggaacacacactaagaaggaaggatggactatttgatgtcatacataactaatttacatggctggaaggaacagtccaggttaaatgatatatcaaattgttaaaactaatataacgacagcaagtgcagctggaaaaagaggaaagaactctctaaacttcattgcattggatctagggtaaacgacatgtttctagtcctggctaccttgaataagtcatttcatctccctggacttcatctattaaataagatagctacatgaaataatctttaagttgtttaaatctttaaataacctttaaagtctgtaattccattttcaaacataggtgtgtgggtatatacctctcttctctgccccactaaaatcctagataggaagatgctagttaaggttggagatgaaggtttgaaagcccgagttccaactctaccctcccttacatctgttattgccttacacacctggattttacacccttttttaggtcaactccagctgtcttaccacatctgttcaagccatattgtcctctcactctttgtcctatgtcctcacgttctttacatcttgatgggggacagctgtagtgtgtttagagatatattctaggatcagcctactagatttcactgcttggctctgcactttccatttgtctttctttgggcctgttccttaacctctccaagcctcagtgtcctcatttataaaaagaggctagtaagatggctgacctcatacgaatggagattaaaagagttgcctcatctaaagggttttaacggtgtcttgtacagtgaaacccagtaaatgttacatcatcatcatcatcttttccctcgccccaggacacgacttcctattcttgctcccactctcccatttctttattcgctggccgctccatccgacccatacctatcttaactcactggttgaactaaaaagctctcactcacttcaggcctacgaatcaactgacaagagcggggagaaactcaaaaacggagatgccaggtgtctccagaatctgtcatccaaaaaaaaaaaaaccaaaccaaaacaaaaaaaaacccgacgatcagctagtactatatgaaaaacaagttttgaggtccttctccctgatgccaaatatacccacagccctcctcacacaccctttcccttcctccctgtgtgccaagttcgcccccggagtcgtcgtttccttctttcccggcagctgcagcgacgacccacggcctgagagagccgctgcagcacaggtcccgtgcgccctgccgcacagcctcgccacaaccaccaccgccgccgccgccgccgccgccgcccgcaacccgcctctccctacgggtcccgactgggcaccacttccggtccgacacggccacgtgttacatctaaatggcaccgtcccccgagtgcgccgaccttgtgctacagccagaacagctccgggaaacaagggcagcgggagaaacggcccggaaagggacgaagaggcttccagctttcgccaagtcgcggctcccagtttttccctgggcctccttcctttcccctctagggaatccggcatctagtaccgctggcactgcttgctgcttagcccacgcctctcatttgaaaatatattttgttttaccgtgcctatcacctgccgtcctctctctagtaaccttagtaacgcctcctcggaggatcctctcagagcagctcatcagcgcttcagatcagcctctccctccttcccccagtaaaacagttctcataattagaacaaaaatatctctccatcgtttcgccacccacacaatagataccattccaaaagcagtgctgatggcagaagagctcatcgaatttgtgaggaaagaaagaataggaggagagatttctcagggttgaggattctctgccgacaagcgacctggcacatgcgaaaagggatccaaaatagaatcttaaaaagaagaagaaaaaaggcaggaaaagttggattattttaagcgccactaggttcttcctgtgctttgcgttttctacatcacgacgccccactctttccactctagttgtttggttcatgtcttgtctctcgctggcattagcagctattcattttttgcttcctcctcagtacccaaaacggtgccttggaaatcacaagtgctaattaaatatttgttgaattgaactggcacgcttctggcgtttacagtgggccctttttagagaaaaccttggcacttaatgcacagtcattttacatcttttgccctaaacagtagataacgatatccttatcagttcaagtctctaaccctgacaataaattatagatacattctgctttatccattgcactgaatgtgatcttaaaaggctataagataaattaaattattgtaaattaacttattccaaaatgcaatcagattatacttcaataaaaacttttactaaaaaaagtgaaagcaataggaagccttacaatttgacgttatagtatatggaattattttgtcaagcagtttcttttttggtaaatatattaaatatataattattttattgttaataaaactaaacagacctatacctcatatccaatttcctttctatccatatttgacatttattagcatttttctaccatccctagcatcttcttgtttgttgcttcattttactcttccaacaaccctgtgctgctgtgttattagcctcattttacacataaggaagagaggcacagaacctaaagccacaaacctggtgagggtcgagaactgggtagtacttgtgtctgtctctctataagacccagtttctctctctctctttctctcttttctctctctctctctgtctctctctcccccacttcatggattgtgtgggaagtagcttctggttccaacatttctaagaatttcagatctgttgctaccagtccattcaggcaaagatttccattttttactttgagacagcagttactgaaaaagagtaaatagaaaatatatattaggcatagattgcatgatctgaactagaaataatacaggatagaaaacccacctgcttaggaaatctcaagttaacaattatagctcaacaacaataaaaaacacaaacatttattcagtgcctactctgggcaggacactgccctagacatcagggttacaggtatgtaacagcaactccttatccttgaaggttgactagtaagacagacaatgtgtggaataactacaacaatatattctatcatataccaagtgtctagtacatgcatgaacctgttgttcctaatttataaaatatgttatttcaatggatatgaaaat

SEQ ID NO: 913674 - DNA, 4001 bp, Homo sapiens
cggagcgcggccaggggcggtggtcgcctaccgaagcacagccgcccagcacgtccgcgctttcccacacccgcggtggcggcgacgcgcgtgtcctcaggagactccagcacttgcaaaacactgcgctcttctccgagcaccggcagaacctggctactctgtcccgcaacccagtgcgtgcccaggaaacagtgaccttgaaccgaggagaggcgggccggctctgaaaatacactttagacagggcgtggggttcactccgcgcctctctacccttccaccaccattcaatactccccgcccccacctcctttccccacccgtgtcgtacagccttcccccaccactctgagaagagagacagttgcaaagagagcgcaggggttaactcctattcaacccccaaagggtcccttcatggcaccgcatgtttggtattaagcagcacctccaaagacacaagatggtttttttaagtctggcagattgggctgcaccctgaaattatctactcatgttctcctcccccaaagtggatcaggagccagccctgaaaaggtaaagcaagtaactggcatcatcctccgtggttccggcgcaccgcgatccggagaagcgtggattgtggccacatggtcgcggggctggagggcactgagaggctgcgaggaaatgcaggctccgcggccaggtcgggtcacgccaaataaggagtcctactgacttgtacgtttgaggtgcgctctgtaaaatctgccttaaatagggccaaagtccttcattccaaatattttggccctcaaccccagttacccgcgaaacactcgcgatttttcggttcctcgtcattagctttttactctcgcttccaaaagccagagttctccaccagcctgagtagaactgcagccctcaagggaaccccttgccctccagtctgaggctggcgctgtggccaccccgggcgtgttagctgccaggcacaagaacgccgtcgccagttctgagctgcgccctcccggaggcgccagggtcactgcaggccgcgcgagggctgcgaggcgaagggggttcatgcaccggggccgacagaggtcccaggagcgggcgttggggaagctttgcacgtaactgcagccgtcgcgaatgaagccttcgcacggcctccttgatgaggtttccagagagcactagctgctgcagaagccggtgcgggtcgtcgtcgcctgtgcgggtttctggttgggacccgcgtcgctgctgcaggcggcgggaggcggcggcgccccggagccatcctcgccggcacggacccgacagcggctgcgggatgccctgcttgccagctcccggaggcccatcaaggtcggcctgagggggcagtggggacagcgcgctggggcctgtggcgagctcggccacgcagtagggcgcagcgcggccccgcacgcggccgcggtcccccagggcgcagcgcaggaccccagggggcgccgggcccacagtctccgccaacgcgggcggcagcagcagcggcaccgccggggacctggccttgtccgccggcaccgccgcagccaggggccccggggcccgcagcggcgcccccgggggcccgcacggcgaggccgggctgtgctgcgccgcgtccagctgcagcgtctcgccgatctgggccaccagccggtccacctcgcccgagctgcccagcgccactgactgctgcagtaggaggaagctgtcctcctcctcttcctccccctccgcctcctcgccggcttcctcttcctcctccctccggcacggcatggccccctgtctgggcacccggagctgtgcgggcgtcgctgggggctcggctgccggcgggcgcggtgggccgcggcggagcgggcgcggagctgaagactaagtctggaccggggccggggcggacgcggaagccggagcccgccaggcactctagccgcgcgcctgcagccgcgggagccggaatcctgccggctcgggttgatttgtaaacaatgggtgacgtcacgtcgggccctaccaccgcgccggggagggggtgctgtgccgctgggggacggcgcttctgtgggattgggggtctgggtgaagccggactgccttctgagctccttcgctcagggtgctgtctgcaagggcgccctggggacctgatcctggctcccgcagtcgggcgcgattggcatttccagaaatgggcaccagcgtgaaccctgttggtttcttccacacacaagcaagcacgcacactaacacacacccacccacccacacaccccttctctccgtgcgtcaactcaaccggtttttagcgtttgcgcttttgaggtccggcatgcgggcgtctggtgaggatggaaaggaaagggagtcaggctagggatttgtacggagattagggaaatgaagctgacgggaatggaaaggaagaaggggaccttgtcgttcgatggaggtggcagagttggaaatggcaaagaaaggccacagattaatgttttttgatcgagatcctgggcggatgggggcctggactggggttggcattgctggagaggaggttgctagtctttttgtttatttgtttgtttgtttttttgagacggagtctcgctctatcgcccaggctggagtgcagtggctcgatctccactcactacaacctccgcctcctgcgtttaagcaattctcctgcctcagccttccgagtagctgggattacaggcgcccaccaccacgcccggctaatttttgtatttttagtagagacggggtttcaccatgttggccaggctggtctcgaactcctgacctcaggtgatccacccgcctcagcctcccaaagtgctgggattacaggcgtgagccactgcgcccggcctaggttgctactctttttgttttgttttgtttttttgagacagagtttcgctcttgttgcccaggctggagtacaatggcgcaatctccgctcaccacaacttccgcctcctgggttcaagcagttctcctgcctcagcctcccgagttgctgggattacaggcatgcgccgccatgcccagcctaattttgtgtttttagcagagatggggtttctccatattggtcaggctggtctggtactcccgacctcaggtgatccacctgcctcggcctcccaaaatcctgggattacaagcgtgagccaccacgcctggctataggttgttagtcttaagaggggctatgtccagaaagttgtttaaaaaaaagcctcagaccagtaggggggatgggctctgaggaggtacgtagtagcagagaaaaatacctgtttggatgaaaatggagatacgcttccttccttcctttcttccttttctttctctttcttttctttctttgacagaatttcactctgtcacccaggctggagtgcagtggtgtgatctggctgattgcagccttgacttcccaggatcaggtgatcctcccacctcagcctcccgagtagctgggacaataggcacgcgccactacacctggctaatttttgtatttttagtggatacagggtttcgccatgttggcccgtccggtctcaaactcctggactcaagcaatccctcctcccgaaatgctggcgttacagacatgagccaccgcgcccagcctggaagcaactttaaaattctgagcatgatatagaaaataggatacaaagaaagaaatgagcctggagatccagataaatagaaaacgagggtcttgttgggcagttccaacgataataattataggagcaaacctttaggaagggatgagtgcaggaaagaggtagggaagttggtttaaaaagagttgggtttgtttttgtcaagtgtggaggaaaaaatgtaaaaacagaggaagagacagtttaaacaaagccattggatttctaatctacgaaatctggatttctacagggtgtcataaggttcatcac

SEQ ID NO: 913675 - DNA, 4001 bp, Homo sapiens
atacagccagcggcttcttctctgggagagtcacattttaaaaccggtttcagacacaaaagaagggctggcacgggaggaggaaataaattgtgagggtgaggagccgccgaggccgaggcccatgactccatggagggccagaagagagcagaaaaacgtccagggtctctcatgcattcctatagacaccagaaagggtggaataagaaagctcagctgggaggacaagaaagagactcaagagatcgtttatgactgtttctgagaaagctcctggcatggccatgagtggccttccgggagtcctgtaaaaaggaaagcacagaaaacaggaaagaactctccctacacgtccctctctgcctgtttgtgtcctcgggagactccaagcggtggtaaagcaccaacagggctcttcttggagcaagagaaagaaaagactccggggtgagtaagctctcccaggaaccccacagcaaaccgtgaccttgaacacagatggcaaggtcaagtcatttacaagtccacattcaaatccaaatctcccacctgcaaaattcttcacctctctccagtcccttaattggagttcacatctcccaccttcaccagccaccgaatcggtgggaaaaaggggcaatgccaagccacccaccaccaaacttttacattcttctcccctctggaatttctttgcacagcaattgtagcaccacttactaagctcctccaccagaaaataagaaaatgtatgcgtgtcgttagttttcaagtattgttataaagccatcgcgattcctacccctgagccctccttaaacaatccaagctcacgacgcccccaagggctaagtgaggtacaagtcgatgcaagtagctgccatagttctcccagtttatcccaggtccttgggcttggatggcccgggaaattctcatgccccacggaagcaccctggcgcatacatttctccacgcttaagttttctccgacggcctcgccgcggctggtaacttctctggttgagatctctccccacgcgcctccccgcagccaaagtggtcgctcccaggctggcgacgtcggcttcagctcagagttagtaggaactggacgctgttgggtctacgcagcggcctccacttcctcctccaggaggcctgcgtcagagcaaggagcctgagggctgcagggcaatgcggtcaggtccgctgcggcctcccccgggcccaggggcgcttgcggggcccgtggctgcaaccgcggcgacggctcgttggagtctccgcacggcttccttgatgaggtttcccgagagcacgagctgctggaggagccgatgcgggtcgtcgtcgccggcgcgtgccccggcttgggtccatcggcgctgctgcaagcggcgggaggtgaccgcgtccctgagccatcctcgccggcacggccccggcagcgcgctggggcctgcggcgacctccgccacgcagtagggcgcagcgcgtccgcgcacgcggccgcggtcccctagggcgcagcgcagggccccagagggcgccgggcccaccgtctcagccgaagcgggcggcagcagcagcggcaccgccgggggccgggccttgtccgccggcaccgccgcagccaggggccccggggcccgcagcggcacccccgggggcgcgcacggcgaggccgggctgtcctgcgccgcgtccagctgcagcgtctcgccgatctgggccaccagccggtccacctcgcccgagctgcccagcgtcaccgactgctgcagcaggaggaagctgtcgtcctcctcttcctccccctccgcctcctcgccggcttcctcttcctcctccctccggcacggcatggccccccgtcctggcacccggagctgtgcgggcttcgctgggggcttggttgcccgcgggcgcggagctgcgggcgaagccggagcaggggcggacgcggaagccggagcccgccaggcactcgagccacgcgcctgcagccgctggagccggaatcctgccggctcgggttgatttgtaaacaatgggtgacgtcgcgccgggccctaccaccgcaccggggcgggggtgacgcgcgagcaggcacgggggcaaagggcggcgcgggcggtgaccgaagccgtcccgcgcctgtgttcgttgtccctccaggagggggtccggggcgtggggactgatttccgacctcccgggcccaacgagccgtgctgaaacgtggcgcctcggaggaggctgaggttggtttctcccacgcacggacacacccacacccactccgggcccgcctcctgggccgcggcctccctccccacgtgtcggccgcgcctaagcccgcccgactcccgccccgcgcacccgcagttcccggccctggtcgtgggggaggggcgggccgccgcgggtccggcttcgacgaggcggggcggggaaaggcggagggaattgggagtgaagaggcggcacgttacttatttacttatttattatttagaaaaggtctctgtcgcccaggctgaagtatagtggcgcgaacacggctgactgcagcctcgaactctggcttaagtaatcatcccactttaagcctccggagcagctgggaccacaggcgcggccaccacgcctggctaattaaaaaaattttttttgtagagacggtggtggggggggggggtctcactatattgcccaggctggtctcgaactcttgggctcaaggagtcctcgctcctcggcctccgaaagtgttggggttactggcgtcagccgccgcgcccggcctaagaggggacgctttgaagcagagcagaatcgctctgaggtgaggtcccagaggctttccctcccgcagtcttcaagcccccggacatatcatgagaataggactcaccgccgctcggctaaagaagggtctttttttttttttaaggttcaaatagaaatataggggattggccaggagcggtgggtggctcatgcctgtgatcccaacactttgggaggccgaggcgggcggatcacctgaggtcaggagttccagaccagtctggccaacatggtgaaaccccatctctgctaaaaatacaaaaattagccgggcgtggtggcgggcgcctgtaatcccagctactcgggagactgaggcaggagaatggtttgaaccctggaggcggaggttgcagtgagccgagatcacgccactgcactccagcctgggcaacaaagcgagactccgtctcaaaaaaaaaaagaaaaatataagggatggaaaaaatctctcatggttcacatttaaatttttttcctttttagcctttgttctatgaaagtgtagtatacaaacacatgcatacagtgttacacacttttccactttgccttacatcataaacgtttttcgtgttattgcatgcactttgaaaacattttaatgattacataagtttccatcaagtgcctatgtttttaacatttgcctaatttcaccatcgttaagtgtgtaactaacatttttgtgcgcgacactttaagatattgatgattctttccttagggcatattcccaggagtggaattttaagtcacagtagttgggtattttaaggtttactgataaatgttcaggaagtgtctttccaagagttaggtaaatgtactctaccatcattaatgcttgagcatacatcattacaccttcactagtatttgagtattattgaatttttttttttttgcggattatatagggaaattttctcccttcagtttgcatatctttgatttcagttaggtagagcagttttctaaatgtttgttaacaaactgtacttcctttcttatgaattgtctatttcctaataagattttcctagggagtgtttcttacgtatttgcatgactcctttacataccaaatgttaacccttttcatattttgccgcaaatacgtctccaggcttttgttggct

SEQ ID NO: 913676 - DNA, 4001 bp, Homo sapiens
tacattctaatgtttttctgattatatagaaatgcatgactgtcatcagacatccaaaaggcatcaaatgtctaacatgaaatataaaatttgtctatagtcttagcggtctgcaaaattcagggctctcaccattctgagtataccgctcaagtttctttcctatgacttcttcaggttctgtcatttattaacacagtgtgtctaaaattgtcactgctggtcatctggaagaatctgagaagaagcagatccttgttctcattcccagagctgcatctctgctgaatagggtcagggtgctcacagcttagcctcatctgatccactgacagtctcagttatctcctgcccagggaagggatgggcttctctatccagggctgattccccaggacctggcagtgtggctgggacaagccagctctcagcagggaagacataagctgcctgggtggccatggaatacaaggtctgcacctgggcacacagaggcccccggagccgagtgagcagtgtcagctgctcacaggtaagtggagaatggatctgctgtgcccacacctgggctaggtcttgataaacagcctctgacatagctcgcacagaggtcaccaagctttttcgaattgacggtgtttggactcctagggcccgagacctatgccgcttgctgcgcccagtgcaagccctggaacgtcccctatggtgggcatcacaggtctcctggatttcactgttgtgcacaggagtggaggatcttgattttttattcaatgacaagctgcactccttttctggacagttccctgcaaagaaagcatgtgagagactcaccagagcagtccccacagaccctgatttccagaaccccctgtacacccaggtgaaccccacttgtctctcccactccttcctgaccatctcagcactggaatgaagtgaggctgaaccccttgtgagtccccaaatattctcagagtgctaagatctcaaaaatttactcgtcaataagtaactccctttccgctcaagcctcgtataaaagtttcctgattatttgccttttggggcaaaccaaaaacaaaaaaaccaccaccaacaacaacaaacaccaagattctacctgctgtgtcttggcagctgtccttggaactcatttttcttttcctgcagttttcccgatatgagctggactctggttctgtgaacacaatgagagtttgagaaagtgcctccaactgaacaccctgaaattcctagtccatcctggacacacaggagctgaggttaccaccaaaccccagctctcttctgttctccagtgtccaggatctgtacggccctggctgccaaggagctcccagtttccttgccaggggagcctgtgttgcttccctgtcccttctcaccttgaaagagtcaaatcttacctgatccagcagtgctgttcccggccttgagcttggtttcctcagaattctccttgtttggattgggctccgatcctgctgcaagagaaggtttaggtgactcacctctccctaggcagagtcccacagtctatctctgatgcatttttgcggatcagtctttcatgtgaagctcttctgccagtgtcacgagtgaacacatttctcaagtcccctgagggcactaagccatttcccatccccaaatctcaaaataaaaccctgctaaagacacagctcagtatccctgattccaaccctccttccagactccataggagcagcccaaggccttaccttgcctttgtatgtgcttctcactggaatgggagaaggcggtcttgcctttttctttgaatggtttcttctcatctgagcccttttctgtaaaggagatctgttggaaagggggctggtcagtggagcactggatggaggagcagtggagatcggggtcttcatttccctttcccatgttgaagctcaagtgaaaggtgcgctctctctcacgtccaaaggcagagtgtgggttagtctgctagacctgccttttatacgtccctcggctgggcgtggcttactcttattggctgaagagttttctcattcctgccgcttcttagagcctcaatcagaagtttcttgctgtagttctactggggacctagacacagttaaagggagacattttcaggatcctgtcatggtgtccagaaaacaaagaaccgggagcacagggaccggaaaatcggggaagcatttcttcctatttctgtcccagttcctacctggaaggatttatgatcctgttcacctttcaagatgcacaattaaacatgcctatattgtcatatgttatatattttgcacagaaagagaatttattatacatagtgttaacattgtatgcatagatattataatttcttaaatgcttggaaacaacaaatgtcaaattatggttgattgtattagatccacacatatatgatgaaataaaaatgcagagaaaaaataaataccaaatgaaatggcccttcctaccttaaaaatggggaagataattagatcaaatgcaataaaattgaattgattaggttgagtcagtgctaacctaattagcccctgattcctgaggtagcaaaaagtctcggtggaaaaactttcccccattctcacccttcctcagtcatcctgggagcgccattgtgttctgtgggctttattcagccctccctagtgaaaatggacttggtctcaaacaggtaacccaactgatcacaagacaaacagcctagattctgaacatcagctcctgtcttcacactgcggacaccacctgaatcccgtcaaagcccacattgtttctcaacatccaccagcaagacgtattccagggcagcctctcaaaactgcctcagtgagacgggacaaggtgtggtggagctccaggttcagaacagctgcctcatcccttcctactgcggcggagtctgtctctgctggtcagagccctccaactagcctagtctatgtccaagcaagtgtcccctaaaaggaccttcttgtctccccctctgctgaggaaagcatgcaggaacgagaccttctatgttaaggagtactcagcctccagtcccagatgacttgattgactgatgaactgattccttgaggaggagaaagacacagggaagagactgtgttgggtgagtctgtgttttcccagctgtgctgcctgtgcaaatagtggaacgaaaaaagaattagtggtagacagacactgcctagtgaaattgtctgaaagtaaatggaacttatcataatatgatatcgttatatattataatattatgatatgaaatttgacatctaaataaattttgatatattatgaaataatatataaaatttggtcaggtaatttcataaattttgtaacaacattaacctataaactcaatagaaagctaggaaaattgtctgctcttgtgtaaatgactgcgttttggataactctgtaaaagctgtgaagaggggtctgctacttacgtgatagtaagtacttgataagacatcgacttgcacatctttgctgtttttaaccaatgctctctcaagatatgagaatattttactctaagaaagtattttcctagatatcgtaataggaattttgttaattttagttaataaattattataacatttagtgattattaataatttatgtcattgttaaaatatattcctacagagaacatattacccatgtgtttttatttgtcctttaatctcaggtaaattttttaaatttttatttattaaattctatttattttagacaaaagagaccttgtaactgccatatgatgtactttcttagaaagagaaattctcaggcaaaacttaggactggctgggcatggtggcttatgcctgtaatcccagcactttgcgaggccaaggcgggtggatcaccttaggtcaggagttcaaggctagcctagccaacataaggaagcccca

SEQ ID NO: 913677 - DNA, 4001 bp, Homo sapiens
tcaggtaatgggtaatttctctggaaactgacaatttcatttcttctagtcctactcccccagtgaaatgagaagtcagcagaggcccatgagatagatttcaggcaattcaactaaatctgtggacccagtggaattttgagcaacgaagaaccaagatatctgttccttttaacatgacctggcttgccacccagggggcaggcttcccactgacggctcttccaagtcacctccataaactcatcaggccttgcaaagttgcatttcccctcctcattccgaagacacaaatcaatatacacagaagcacttatgcttggttcataaaatctcctgtgtaaatgctggaaacatttccatgccaagcctgatgcaggctacttccgacaacagccagtattaccgtggtgtgtgggaaccctgggaaaggagagagatgcaaaaccatggcaaaagccactgctgaacctagtgtcaagccaaaagccaattgggttggaacaagacagtgcccatgtccttgtgtgctttaatatggtaagagctagggctttcttaatatggtgaaaattccagaggggcataaggtgagtcagctgctcacacacagataaatgcctggacaagtcctgccaaggttggccatcaatggtagataggaaacaagctgctcccaactcagtagcccaagcatcactgaagccacagtgaacctcctccaccacctctacaggaaagtatgagcagatatatgggcgcctagaaagaagaccccattctgtcaccccatgggcaacagattccacagttgccctgagaagatatccaaaaacaaacacaatcagctcaatttagatgcaaaagacaagggggaaaggatgctgggagctggaggaggcatcctagcaatctatttcgaggggctcttagcacctgtttgcaagcacagctctcaaaatagcattcagcaacaagtttctgaaatggcaaatctacagcttcttttccctgcaagtgctttgtcatgctgatactctgacccaagaaagcatttccaaagagcctgcgggataaagcggagcaatgttgaacatgtctgcagccactgcagcggcagcagcagcccacggtgcaggggaggctggagtggacgctgcccgggccccacctcctgtctgaacactcaccatcagcaggccgagagctgagtcgggcaccagctgcactgccatggtctccgattcccatgcacgaatcctgctgccgagtcagtcctcctgggccccgggtggctacagagcatccaaaagcacctgcagaaaaagcagccaaaatccagacttagggagcaaaaggctcaaggggaagataggccacctttcacacagggtggggaggaggtcagggaagacagggtgggaactgtgcttagggaggaaaaaaaaaaaaagaagaaggaaaataggaagctgcaggttatttaaaagtgagccctccctagcttcgcaaagcggcacagacagggagaccgcatcaaacacaaacgtgaaagcttagaacacggaatgtttaactgctaccttcgccctggcagcaattcttcctttaactgacaattaaaataaaacattccctattgcagataaatcaagcagcccgagccaccccctctctctgcatctctcagcaattctgctgcataaacatgctgaatgtcacaacataccgctcgcaatctggtcagtgtcttctttgctgcagataggtgtgtccctttttgcaaaatcagatatctgggagtgagacagccgagtctgaccatgaggcaccaggcagtcactggagatcagcaaatgcccttaccatccccgaggaggaagtcacttaggaactgacccttccaccttccccagatctacttttcctctccaagtagactggccagctcagctcccggtagggctaacatacttaagaggaacatggaattgcactgcctgttctgtgagcgttctgatctccctggctgtaccacatgtacgccgcatacagacacactctacctctctctccctcccttcctcccgcccttcctccctcccatcccttccctcccatctctccacagggctgcctgttaggaattttgaaggagcctccctagttcagggaggcataggaggtgaatttgtcacaagggacactgcttaacaggaaaaggcaagttagccttgaaaatcatatcatgcagcattttccccggaagatgtcaatgaagggagaaagaaaaaacctgccgaatcttgttatataatgggtagctcaaagggctttccagagtcaaagacttaagaaaattagatatcttttcatgagcactgtcaagcttgtatcttcttctggagtccatgtattcaactaaaaatggttattcctgatacttctagtatgtccttttctgatttcttcctttactcacctcctgtaatggctccaaaaaatcctgaaaattaactagacagtgtgaaatgtagaaacatagagaacagttttcgaaataagaaactagggggaagaaattaatgacctttcatgttcctgtgcacgagcatagctactgttcctttattacttatacttttaaaactattgatttgggccaggtatgggagctcacacctgcattcccagcacttctgggggttgaggcaggaagatagcttgagacccaaaattcagggtgagcctaggcaacatagcaagacttcatctctacaaaaaaaaaaaaaaaaaagaaaaatagaaataaaagaattagccaagcatggtagtgtgtgcctagagtctcagctacttgggaggctgaggtgggaggatcagttcagtccaggagtttaaggctgaagggagctatgactgcactcctgcaatccagcctgggggacagagcaagactctgtctctaaaaaaatttaaaaataaaaagtatttgctcatcacagtgcttagcacagagtaagtactaaaatatattcaataaatgagtgaaggctgggtgcaatggctcacgcctgtagccccagtactttgggaggctgacgtgggcagatcacctatggtcaagagttcaagaccagcctggtcaagagttcaagaccagcctggtcaacatggcaaaaccctgttctatgaaaaacacaaaaattagccgggtgcggtgggcacccgtgttcctagatacttgggatactgagacaggagaatcgtttgaacctgggaggtagaggttgcactgtggtgagatcgcaccactgcactccagcctgggcaacagagcaaggctctgtctcaaaataaaaaaaaaaagaaaagaaaagaataaaacaaaataaaataagtgagtgaaaaattttctcccattttgtttttcctatagtggcccaatgagcttgaaccttgattccacagtgtgtggatggagtctcatgttactgatccccggaacaccagagcaaccctccttgccagcaggtgcctggagattcaaagcatgacttgagtcgcatgcatgtggccttgcacagaactgtcaggacattctgactgtgctggtggattgcaatactattcaaaataatatgtatagtcacatttgaaaaataataacaatgatttaaggaacaggtctataatagtgatttaagggaccttatcctaacttttcagatggatttctaaatgtattcaactgatatttgcagaatgccgactttgtacctctgccctcaaggaactttttatctggtagaatcattaatgatacaagataatatgtaagaaatgcaaaaaaaaaaatcccaaatagtttggatagcacagagtagggagggcttaccatttcttttttttgtagcttttgcactggaacttcaggaacagcagaacatctttttcaggacatttgctttctgattctacatggactatgtgtttggaaa

SEQ ID NO: 913678 - DNA, 4001 bp, Homo sapiens
caaaaatatcaaccaacattcatattggaactacattcagtggtcaattgcaaacaggctgaccaagggtataagagttcagcaaaaatcaacaaatgcatgctgtgagaatcaaatggctatatagaatttgtaataaagagtattttatattttattacttgtaaattgtgcaatatacatccttcatatcagtaaaatttataatgaacttattagatgcatatgtatttgtttttgctcacagtgctggcagcaccagcttggagacctccccttctctacattccactgttgttttcttaggttaggccatctgtcatcattccaggtttcatcctctccaatcccacacccatattgctactagattaatcttcttaatattaaatgcagacacgacacatccttcattaaaactaccagtgcctatctgggaccttctgagtgaactctgggccatagaaggccttccttgctctcccctgttcacctctgcagcctcctttcttatcagattcccctgttcccactttactaaagttaggccaaactgcctgctgttcccagagcatgctttacttattcatgccactgggcctttgcatgtgcttttctctgcttgggatgccttttccaatccccctgctcccaactcctgctagtgttcgcttagcattaaagccatgctcaagcaacacctctcccaggagcccgtgccacctccatttcggcacttgctatcaccgccagttttcatgcaggtccagcattctgccccccgacccccactgtcctacaacctggaagatcctctgggctgggggagacatccccagcatttggcatgtggccccaggagataccaagtaagttctcgttgaattaatgaactacttaattggtttcagctacagcctatagcaaatcacaggatttagccaggagaaatagacacgactcatctctgaactcaattgttgctttaaaaaaaaaaaaaagttgtttacactgttgaaaacctcaactgagttttttctttcctttaagcatacaaataaagccaggtgaatcatttcttttccattgttttctggaagtcagctaggcataccctgagtcttcttactttaaaccactgatactctttaagcaataaccaaaacacttgcttctgaaagatagtgacagccatgatttactgggctactcaaatgctccaagtatgttctaagtgccttacgcgtgtcaccccatgaatcctcagcaacatcgtaacgcatggggcattattatccccattttacaggtaagaaaaacgagtcttaggaaagttaaaagagtcatttgaatttgcacagatgctgaatagcaaagcagtgattcaaacaaggggtggtctgattctaaagtccatgttttctcttctgagcccattctttattgctaaaaaacaaatacaatgtctatcaggcttagccaatggcctggaacaaataatactccaaataataccacaaagggcactgacacaggtccttgcccagctgtgttcttcttattccggatacctagacccagtaagaagtttgccctttccctgaccagatttataggagaaaactgaatgatgccaaggaatacctgcgtccttcgttaaaggctgcatccaaaagtctccgtgaccaggtctaggccttcatcatgggacaactttccaacaaggagcaggggtctcttgcaagtctgtccgcggagctccctgccaccagcactgttgccgctgtctttgtttactgcttgtcactaagcacttgctgcccagcgagtgagtcaacaaggccccttccctttcctgccaccactctcattccctgggtcctgcgcagtctctggcctgttagcaggcactgccaccccagcagcctgcgtcctcaaagccagtgacccgtgagagagccaggaagagctcaagtggattaggtgccactgaaggcaatgggattgctgctcagcagggcttttacgctgatgtctctttatctcctggcccaatcaaaagaaagagctctgcaaggaactgggggcagccccagagcagaggcttagtgtcatcaactcaagagtcctccatgccctttcatagtgtcagacattggacctgcaaccaacaggacagggaaccatgtgaaagcagcaggaggaaatgataacctggatctgtctgtgagaaagcaagaaaaatgtggttagagaaagggggaaaggaattcttactctttctggtgcttggattcagaaaggaaccagcagagatggggaacagcaagaagtagatcatagctctgtagtagaaggggcaaaagaacagatctctcaagccctttaaatcaatagcagtgtcaaaactgagacgtatttatttaaaaagaaaacatgagtttttgcctgactacagaataaaatactaaaatttgaggccgggcacagtggctcatgcctgtaatcccagcactttgggaggccaaggcgggcagatcacgaggtcaggagatcgagaccatcctggctaacatggcaaaaccccgtctctactaaaaatacaaaaaattagctgggcctggaggcgggtgcctgtagtcccagctactccggaggctgaggcagaagaatggcgtgaacctgggaggcggagcttgcagtgagccaagatcgggccactgcactccagcctgggtgacagagcgagactctgtctcgaaaaaaaaatctgatgaaactcagtgctggtgagggcatggagaatgagtactctcatatgccaatagtgagattacagataagtgcaacttctctgcagggaatttggtaatattcatcaaatttgtaaatgtacatatcctttgtaaacccagctgctaagaagtaaccccatggacattcttgcaaaagttcaccaaagcatctgagaaaggatgctctttgcagtgtattttggtagtagcagaaaactgaaagccactgaagtgcccatcaacagtgattattgtagttcacacacagtagaaaaccagctatgcagctgtgtaaaggaaggaagtagatctgtgtgtgctggcatataacaattgcctagaaaattctttaagtgacaaaaggtatggaatagcctagtatgtttccttttattacaaataggtacataaagaccaggtatatttacgtatatttatgtatacatattctttatacactgtagtatattagaatattatgtagacatattcttgtggttctggaaggaatcacaagcaacttaatagtggttgctaggggaaagagttttggctcattatttagtcaggaaaattattgttcattttggtattttccccctataaccttatgttatattacttgaaaaaaactaaaaaacacaatgttttacatttttttctgcttaaagctatctatattgacattccctgctagctagcaaaacatttcacaatatctgcaacaatcttttactgttttttccaaacttgtcttctcatcagattcagccttgaagacgataaaatgcagattcccaggcaccaccctgaatctgctgaacctgaatctctgggcccgagccagagcatctgtattttcagcaagtgtccaggtaatttttatttagtaattttttcaggctgaccacgcaacctttctcccagaagaagaaagttgacttctccagtcatgtggctcgttcacaacagaacaaaaagcaacacctaagtcatctgccaacaggtaaatgctggtctgcttaaagtcaccaccactttcactttttctgttaaaaatactagcagtaacccccttctattgttgctctgctaacatttcattaagtccatttttttgcataaaaattttatcaatgtgtttttgtttttcaagttatcaaagctaatagtttctctctgagttatctctgtgtcattccctat

SEQ ID NO: 913679 - DNA, 4001 bp, Homo sapiens
aggcactcccttgactctgcaaatgcttcttaattttcgaatccttcctataagcagactcatttgaatctctcaactagcctatatattgggatctagacccagatttctcagtgcttattagacaagtgcacctgaaagcaacacatgtacctccacttcacacatgcagtgccacactcatcttcctcccctcactcaccctcacttcccctcctcgttcttcctaaaacactcctcccctcgcattggctcaccccaccattaacctgccaagggccacatttggagtggtccagctctcccccatctggtttctaagatgtgaacattccccatcaagaacagctcctcagtgccccctcccctccacctcctctctcactgccagtgacccgctgggccgtggcaagctctggttaccttggctcactggaccctgtctgcacccttcttggtccaccccatcatggctgccagtgaattggtctaagacaaaaactgaacatgcaacattcttgatttaaagtctccaatgcttcccatcacctaagacccaaacccatggcaccccaggtctgtaccacctgccctcccctttctttccaatgtgatttcccacatttctccccacaacaccatatacccttgtcgccctaagtgtgattcaagaaccagcagatagacatcacctggaagcttctcagaaatgccaagctcccattcagggcatgtggccctgccttcatcttcctgttgcacctgtcactcagcacctggcccaggatcccagagggacaattcctacctgcttaagctgccaggaggccagccaagtaccctctctacccatgctcattagcaaaggtctaaatatcagaaggtgccaataaattatggctctgttctcaagataggtcaaccaaagtcactaatataagcaaatttcaccagacaccagaaaaccgctttgggaaagaaagcgaaaagtggccagaacattgccccaagcttgctggaagggccttcaggaatccctcctgtctctgttgactttttagttgccaaaagagggtgatgccagctctgtggctcaggacacagaggcagttagaggctcctaacctcaggcagaggactcggcacagtgggataacatcgagtcactgcggggcagggaataaaggggacataaaggatgaatggctctgctcttggcaccctgaattcctacctcattgtgaggaaaagaatcccaggacactctgacccacgccctggtgggtacaacacagggtgagggggaatggcatgaacagggaacggagtggggtcatcctatgcaaacgtagggaggtaagaaggcccatggacacagggccagcggggctggggcagccagagccaggctagagcagtctcttcactccatcttctccattccgctgtctgattccagaattcaggcaagccaccagtaagtttctaaggctatctatggggggtgagattttttttactcagaaacatctatctgctatctcctgggtttcacatccccatagaaaagtgagggtaagaagaaatggaagagaaaaaaaaaactaacaaagaaaaagtcttgtttcttgcctgcctccctcccacccagaggcgatttcagcttctgatgttgttcaggaaagttccggaaggaggggaagctggtcagcaacagtccactcacctgcccaggacccgtcaggcactgcacagcctgcttgtgggtgaggccgcacagaatcactccatccacctgcaggagtcggtcacctgggaaagggatagatgtcatgtcatgacctggtgcttgaggctgcaggaggttcccttccaggaggcccctgcccggcacccctccatgcagcctggagaagtgggaaaggaagctgaggtgccaggtgtccccctggagtcagcaggaatcctgcctctctgagcagtctcactcccttcttctcaggcacatcacagatcagggatataaaagcctttctattattggctcacagaatggttgagccagctctgttcaaccttatccttcctcctgttttcctgtgaaaccatttttggaagtattttcaagtcacttagatatttatatctccagcatgtattttttttatttcaaaaaaaggtcagggaggcatggttgacgctggggacaccagaattctaggggaaatggagataagtaagatcctaggttccccttttggctcaattctggcagttttggagaccagtaaaaatcacccccttccatcagagaagtgggagctgagcaagggcaaacagaaggctcaggtgtcctccccggatgtgcgagtgagtttaccgaggcccacttgtcctccaagggaagcagtatgttttcccatggaggccaaagagcaacacaagtcttttaagtcttctactatttttctatcacctatgcttcccagtgtgccactgcagaccccccaacctatcaaatgggcagggcaggttctatcacctcctttccaggtgagaaaagtatgacctggggaggcaatcatttgcatgagttttcagaatgggagcagggcaaggcctagaggctgcccctcccagtgcagggctctttacaccatggagcacagagttcccaatgaggacccatccccatctctcaccctgtaggatctgcccttccttggcagctggtcctccaggaacaatggatttcacatagataccaccatatggcacactggtgttaatgccaccctgaaaaacacaacaaaaaactcaccacccatctttcctcctccaggaagcctccccaacctccccagctaagggaatccccacctgcccaccactctatcccatgaccttacctccgactggcactgtcttctgtattcacctgttcgtttagattgtattctccactgagcaataagattaggtgttcataagcttaacaatagcaactatgtgagagatctgggcatgtccccagcccaagcactggtacaaggcgggtgctcagcaactgctcacgtgggatgcaccactatctctatataggtagtgaccagcgtaggtggatatggctgtgggcctgaaggcttgtgcctggcacgtcttgtgtgctttgatgggccaaaggatatgtgcatttttcattataatacatgttgccagattgcatccctatgtgaatatggatatacttattcacatttctaccagctttgtatgacagtaccatttttctacattccaccagctatatttggccaagctggtagacataaagtttaaaattttattttaatttaatttgtattcctgtggcttttcacgggtttgagtgtttttcatgtgtttaatggccatttggatttgagtgagacatttcaagaattatttttgaaattaaatatctgcaaagaaaatccaagtttttgccagccaaaggaaatcatcaacctcttctcagcaaatatatatttgtgaataacccaaaatttagtcagtttttcagatgaaaaatagctatgtttggtgtctgataaggctgttaccccaagccaagaataaatggaccatatttggtatcagcctgttcactccatgtggattcatgagccttattgcttggtttcttacttggtcccttaaaatcatctactgatgacaaattcattgcaggcttagggtccaagaaaacacatattcttgctctaggtacatagcattatcacaggggaaagcaaagaatgccctccattcacatatctcttgaatttcctctgaaaattttcatcagccatagagtgtccttactttggtgggagatgtcattctatttcccatcaacagttaaatccaacaatgacattcctgaaatccagacccattccagggtctgaaggtaatggatcacttttttttttttttttttgagacagagtctcactctg

SEQ ID NO: 913680 - DNA, 4001 bp, Homo sapiens
tgcttgggtctctgcctgacctggggccacccagacagctcagtagactgtcgagcccctgccagctgtcctggggggagtcccctgcccaggacaagagcccctggccccccttatggaggccctgctcaagacctgccagtgggttgcccaggaaaatgggcctgtccccttgcagggcaaggtgtggagagggctgagtgagacacagcacccagctaagcctctgaccaaccatagccaggatggggcgagagacctgggaccagggggcacccctccaggggagattgaggaggtggaggccaggcatcctgagtcccccaggctccactcacaggctgtggtgggtgacaacccacctggcaggtcaggatcctgggcggggcagggcaggtggaaagctcgggggcagaggaagaggggccacactgcccaggtgcacctcttccacctggctggtgaaggagtgccagtggtccggggttctcagggtgatgggtgggagaccacttgaggacagagcttgggaccctctgtctttggctcctcctgagcctccaggagacagagggtccctggccttttccccacaactggggctgcaggcttaccacacagccggccctgcgtaggatggactcgtactccgtccacactggggtctgcaggcccctctccttgtcgctgggcaccagctccatgactgcagcctagagggaggggtcagctctggggccctgggcactgccagccttcctggtcaggtgaccattcgggactcccctggtgagggtcagggcccctttggggacacatggcttccccccactccaaggcaggtgggccctatgaagcccgcaaaaggggaaactgaggcacggagcagcagggtgcaggggcgactcagccctcaccggactctccacataggtgtccaggggcagcagcttcagcacggcctccaggagctgcgggatgcccaggcctggagggcagaggaggcagcactcagtctccagcccgcccgcccgcctgcctgtctgcacccttcacactgcaagcatggacttggggccacggcaggccacagaggagcctcagagccaggagcaccgctcacccgcccgccctgccctgggggacctggggctcgctcaccgtctgcacggatctccatgggcccacactggcagatggaggaggccgggaagttcaagtccgcaagaactaaacagccgggaggacagcccgtgtcggcacctatccctgccctcggggtcggcgccgcccgtcctcccacccagtcatggcggcagatcgtgggtcacaagaggtctcaggtcagccagttgggcgcccccaccgccgaccggccgcagtcagatccgcagggctggaagccacgcggggaggtggggagggcaaggtccctgcctgggaggcagagaggcgtcaacagctgcccgcgaggctgtcgggtgctgaccaggccagggggccgacccggacccggccgcctccccaggggccagaggacgcgcggctgcccgcgatgcccggaccaggcccccggccacccaacccctgccccgggaccccaggccccaggagaagaaaaagcgccgaaccctcgggggcagcccagacgcgagggctctcgggccgtctggggagggactccgggagaagctcgggccggctccgcccagagccccacgaggtctcagttccctaaagaatgcgggggagggggcttcctgcccggaagccagggaggcccgagcaacgcccacaccccaggacgcggcccttcccggcccgggggtccccgtgcaagcctcgccctcctgcctgtcccggggtgctccccgaggccccggcccgctgcgctcaccgatctcgtccccgtgccccatccgcgccagcgcgtagagcagctcgggggacagcagtgcggggacacccttcagcgccaccatggcccggcagacggggcgggcggggcctaggggcggggcttgggggccggggcggggccttacggggagggcggggcttgggggcagaggcgggggccttacggggagggcggggcttaggggcagaggcggggctttacggggagggcggggctttattggagggcggggctttagggtcccgggcttggggcttggggacgggccgggcctagggttcggcgggctggggtccgcttgcggctcaaggaagggcggggagccccaggaactggggacgtgcgggctgagtcgtggcgtgggggcaacacccagccagcccacgggctcctcgccaggtccgagactcgggtgcccttgcgctgtggccgggggctccccagtgtccctacccgagcctcccaccccgagctccctcaggccgaaggggttcaaccgccgcggcctcccctcatgagggtctctgccctctgaccacttcgtgctgcccttaggcctggcagaatgcccggagcgcaccgggtccctggggtcaccatggtgggtagctggacccaggccttcagcccacgctcctgagggaccgggagcaagggacacgggagccaggacttcggacccccttggggggagtccaggagggcagccaggcccagcttccaggctcagctgcgaagtgccaggacacctaagggtcctccatcatcccccggtgtcagcggcctgcaaccccctgcccaggatggcggcatcctgacctttggctgagctcaggctggccaggccctccctccgcggaaccaccttcttccacatgattcccagctggacaccagctgtggggctagcactgcggccctggccctcagccctgaggtgacacaaatgctctgaggcctggcggctcctaaaaagttctgaaaatcaatctgtatgtgaaaaatgacaaagccgcgtcagaaaaccaggaggaaacagacgtctccatgttgaactgcttggccctaggagcctgtccccatgggaagtggcctgggctgcgtcggaaaagcctggtggggccacccaggctggcacccagcagcacctgaacagctggccctgggccggccactcgggcagagagaagaccggggctgcccagggcctgccaatgaggggtggctttgcaccgaggccaccgggtttcagagctgtacctgggcagtttctactccaacttgtaagtggagagtcaccgtttacccaaatatacaagggcaagaggattttatagagatgggcaagaaagttttcagcttcaaaaccaaatcaggccgggcgcggtggctcacacctgtgatcccagcactttgggaggccgaggcgggcggatcacttgaggtcaggggttggagaccagcctggccaacatggtgaaaccccgtctcttcaaaatatacaaaaattagccaggcatggtgactggtgcctgtaatcccagctacttgggaggctgaggcacgagaattgcttgaacccgggaagcggagggtgcagtgagccgagatcactccactgctctccagcctgggtgacagaaagtgactccgtctcaaaaaaaaaaacaaaaccaacaaagaaaaaacacctaatcaaaccccaaacaataatggggccagaggtcaactagctcaggagtgagtggaagcctcactctgagtctggggttcccctgccccggacagtggcacccctccctccaggctccctggggccagcatgaagacaaagtccattccccagcctaagggttgggtgtctgtccctgccaagctctggaaccagataactagacgcagccctctgagatgcggcttccatgctgggccctttcttggcttccagccaagtgtggctgacacaggtatgaacgtgaggctgcagccagccctacggatctctgaggttccattgcttgaaatcagattatggaggctgaccccagtgcacatgaaaaattaaacggagtggattttc

SEQ ID NO: 913681 - DNA, 4001 bp, Homo sapiens
caggtgtaacccctgactactgcagaaaagcctctctaaaagtgctcttctctactgcccaaccccatttccactctataaaaggtgctcaaatagctgagttgatttttagtgcagtgcaaactcctgaacctggtattaatgatatttatagccttgtccctatttatttgccccattttctctctcccctgtctgcacaggccctgtactctggttcaatctttttgaaccactactggaaacattgttcacataagctgattttcatacgttgccttgaattatattttacatctattcagctttttcagcttgtcttatccccccaactagactgttgacaccttaaatacagaatgagcccatgtgataatttcctcctgcacctgctcagcacctagtgctacttaattgcccacagtaagcaagtaagtaaatgatttgatagctgcaggggaccccagcactcttacctgtcattctcaggaatctcttccacattgccaaagccaggtgtgggcactgggcagtccatgtgtgagggctgggcaatgtggggctcaaagacggggctgtccccgggagaggccgcgtgggctttctcggcatccagccgagccagttcgtagtcacagacgaaacactcgaagccgttgaggtagttaggcagcaaaggatcattcactccccactcccgatgcttcagactatccagaagaaattggttggtgatgcccccaggttgcttgtatgccaggtatttcatatactcctcatcattcttgtccagaaagtcaataaactctgccagcttctgaggagactcaaaatcatcaatcaggatgacggagtgattgttcggcatccagtccctcacagagggagaaccgcggtacacgggcacagcgcccaggtgcatgggacgccacagtttttctgtcatgtagtcgttacagatggcattttccagggccaagtggaacttatagcgggacaagaaagccaagagctctggatcctcggtggtggccgtggctgtgtcctgtagccgcgcggtaggcagctcccgattctgcaggcatttcccgtaggagtctacctagaccgggtacagtaaggctgtcatgagggtgcggccctggaggcctggacacctggagtcctggacacctggagtcctggacacctggagtcctggcctcaacccgccctctccttttccttccctccggcccgccctcactcaccgggatgtggcgcatgagctcgcgcacgtagcggtcccggtccgctggcacgtcgcagtgtgactgcagatagagcagcggcgcgtagccgcggcggcgccactccgcgcgttccatgggcggaggcaccgggcggcgcagataggcggtcccgggcagccactgcagcgacagcgggtaatccgagtggcgactgaaggtggaggtaagattgaagaggcggatgcccgggccgtggctcagcaagaagttgttgaggggcgactcctcgtggaggagcgcccagctctggtgcgccaggcgcggcagcggggcggccgacgcgcggaagtctgtgccgtagaagagcagcgcgcgcgtccgcgagtccctcagcgctcggcggttccgggacgccacgcacgcgccgcgcgcacactcgatgcgctccgagtctcccgggaagtgggggaatagccctgggctccaccacagcagtaccggcaagtcccccgcctcctccctccctggccgcggcgtcccagagctgcgcgtcacccccactgcgcccagcgccgagggcggccggaaaaccgcgccatcccacggttccgcccactccgcctccccgccggcctccctctccgctacggacccatggccgctggctgcacagacactgagcacccctagaaggaccaacaccaccctaatggggccggccgccatgtccactccggcagccggcgccccctcggccagcaccgaccccgcccagcggatagtcgtgaccggacgaggccctacgccacgggggcacgtggcgcatgcgcagctcgctcagccgacggccaggactaaaagcaaagtgagctttcgggagtaaagatgaggctaatggttacatcttaatttattttatttctttacaaattaaagatgcattgaaaaataaaccaatgaagagaaatgagaggtccagagcaggggcatcccaggtggggagcaggcaagcctggccaccatcaagcctagcccttgtcctgcccccaagccagttggggttggaagataactgtcagccactcagtcaataccaaagcccaagcggtgtcccagcaggagagaacggcgctccagctgcctctgcctctctccccaacaaccccgggcctggagaagcagtgtttctcgtgggagctcagagtgggatgtgaactggctctgtgaggtattgcaagttgatgaccaggctccctaggctccctacagaaccatccagtgttggggcctctccagctggaaaggaagctggtacctctaccagatcttaatatattttgcaactcagttctccggtcacctctgacagtgtgcctctctatccacggagtgatcatcaatcattgcaggagagagcgagcgagcagtgaaagcagagaaacttgactgctaacctccaggcccaagaaggactgaccacttttctctccaccacctatgggctataccccagctcttgtgcacctatatgttttatccctaatataggaagttgtggatgacactgagccccctgtagtaaccttaggatccccactctttcctgcctgcccctctcctcttgggagactggtccaaagggacacataatattgccagggtctgggtgcctccaaacccccaataccgaatcatatacagtgaactgagaagctacattcattatgacaggattagcaggaaaaagagggtagaatgagggaacaggggcaccttccatcagcaggacatgacagagtggcaggatacttgagcccagaaagaaggtgtctccttatatctccccctccccccagagagactgaggtcagcttacataagatatgttactgtcccaatttctctgacatcctggggtgctttctggaagctagcctgggccctatgccatttacccacttgctttagctcagtagctgccgaatctccttgtgcatatgacagagaaagtccacataagatgctcccccactcagactcttgtcttccaccaggaagtgcttgaacagcatctccatcttgtcttcctgtttcaccacggtaagctacggccagaattcagggttcataaggcaaggccaaaggaaattaaacatgcccagaaatctcattaggcagtcacttactcattccccacccaacccccacttctaggtgaggacttgacaaggtaagaaatccagggttcagatcagtgttaccttcatgtaccgggatctctgtgcccgtaagctatcaatgaggcctcgaaccttcttggacagtggattatccagaactggcagaacactctagaacacaaaattcatttatccttatggtaaggcactctgagttcagtcaaggtggggcagcatacatgtatgcatcatctgaaacaggcaaacctgggaagaatgacagcaactgcccttgtccccaagtgttccctgatatttgagggtactagcacactaactatattggctcccaattgtttcacaaagtatacttccacacccatattctccttgactccctgccctcaccaaaccactggtgatctgactgaaggaggagacgctgaaaaggctctggacaacaccctgttggacgcttgctcccacccagaggaagaggttgagcccattctccagtaaatatatatccccattgcttagacgctcttcagaggctcgaactgctggtggttcggtagtactctcaacg

SEQ ID NO: 913682 - DNA, 4001 bp, Homo sapiens
gaggcaggggcgggggcaggcagagccccatggtgaaagtaggtgtacaaaccccaaggatacacttgcttgtggggagatcttgggaaagtaactactttctgtcttcccatctagagatggtggtggcctgggggagttgtgtggattgagtaagcacaagctaagagctcaaaactgtgcctgcacagagtaagtgctgtagaaggcgttgttaaaatccatgcgacaaacccaccccctactcctccccatgaggaagatactattattgtctctatttcagagaagaaaaaaaaaaatggagcttagagaggtgtaatcagatgcccagggtcaggtggctgctattctaagtcagggtctggagcctgccttcctaaccccacacaaagggcattgttatcaggccccaggctattgttcccaaaggtctgggcctggggtggccagagtccagcaccctcagtctgaattcccagagagcctccacaaaagcaagggtgtggaggagggagggagtgctgagtcctgggatgagatgactgcagcagccaggacctcccctgccagccctggcaggggaccctactccagcagacccagattctgctctcagagtatagacctcctgtggtatgacatttccccctcaggttggaagtagccaggaccccatttacttgtccttagggaggctgagtctttgagcgcaggccccctcccagccctctgcatattgttagcctagtgtggtcaagttttcaatactgaagccattgtcatcatctgctgtacccagctctggcctcctgatgagatcacagatccagggccagctgtctgggctgggtcccttcttagcaacttaccaactgtgtgactctgcaggttcctcactgctccttcaccagtgtcctgtaaaaggaggatcatcagaatagtagcaacctcataaggttatagcgatggaattacgtgaactactatttgtcaagcctaagaactatgcctagcacacagtaagcactaaaaacctgttacaataaatacatccataggccgggcgcagtggctcacacctataatcccagcactttgggaggctgaggcgggtggatcacctgaggtcaggagttcaagatcagcctggccaacatggcaaaaccccatctatactaaaaatacaaaaattagctgagtgtggtgacaggcgcctgtattcccagctacttgggaagctgaggcaggagaatcacttaaacctggaaggtggaggttgcagtgagccgagatcctggcactgcactccagcctgggcaacagagggagactccatctcaaaataaataaataaatacatccataaataaacacatggtccttctgcagtgggagggaggcactggagggagagactgttaggcactgcttctgaacatcggttcttgggctaggagcagtctccaaagctggcttcccccagccttcactggtctctctaccttcaccaacctggagttcctggaatacgagggtctcaactctaggtcacattttttattttattattattattattactattttttttttttttgagacagggtcttgctctgttacccaggatggagagcagtggcgtgatctcggctcactgcagccttgaactctcttggctcaggtgatctcctcacctgagtatctcaagcagttgggaccagaggtataccccaccagctcatatattctttagccaagggctggcttctgtttcctccaacccccaacccaccatccatatgatagtgggtgcaaagcaggaggccttcaagcggctgctgcagccatatctgtcctcagacccctcaacaggctcctcattactcagaattcttgggcacccacccccttcacccagcagccccaaagtggacgcctgctcacctgcgaggtcaccttggcgagggctcacctgagctggcagcgcagagaacggatctgaggaggctgctgggcacgtgggtcggctctttaaaccctgcagccacgcccagggctccatgacgcaggctggagggaactggtcaggctccctgccacacccagggctgttggggaggggcgggctgggccgaagaccctcttttggcttcttttttttttttttttttttttttttttctttttttgagatggagtctcactctgtcacccgggctggagtgcagtgatgcaatctcagctcactgcaacctctgcctcctgggttcaagcaattcccctgcctcaggctcccgagtagctgggactacaggtgcacgccaccacacctggctaattttttttgtattttagtagagatggggtttcaatgtgttgcccaggctggtctccaactcctgagctcaggcaatccgcccacctcggcctcccaaagtgctaggattacaagcgtgagccaccgcgcccagcctttcttttggcttctttagctcacccagatcctaaaagagggacctggagggtgctgggcagggtgttcctgggctcttgtgccagctttgggggttctgggacctctgtgtgggggtgtcctggggaccacggaggataccaggagccaggcactgaccttgaggctccctgtgctcagcagtgccatgccactgctgtcacttgggctgggtgtctactgaagggaggctggtggccgatgggcacccccgggggtggctcaccctctgacagggccctgacacccacttagcctcccccacaggtgagggatggggccaggaggaggatagacgcccccggctgaggagtgggctgcctccctctgcagacctcaggcctgccttgttgctgggggccaaagtcaccccacacaggcgtgtggaggaccccaggcctccctagtctgctgttacccctccttaattcttttccaaatgagggacacttgtccctgtccagaaggtaaggggggatggctgacaagggatgggggtctctgggctgggagggctggggagggcaatgatggtttagttggtttgtttgtttatttatatatttatttttgagctggaatttcgctctgtcgcccaagctggagtgcagtggctcgatcttggcacaccacaacctccacctcccaggttcaagcaattctgtctcagcctcccgagtagctgggattaccggcacacaccactgtgcccagctaatttttgtatttttagtagagatgggatttcgctatgttgagcaggctggtctcgagctcctgacctcaggcgatccactgcctcggcctcccaaaatgctgggattacaggtgtgagacactatgtctggcccagacatacttttaagtggaaaaaaagtatagggcagtctgaataggatgctgtcacttgtgtaaaaatataaaatattggttgggaaaggcggctcacgcctgtaaccccagcactttgggaggctgaggtgggcctgtgtctgtgtgcatgctgcatggggcttagcacagaggaggcgtcccggtgtttcctcagccagctgtttacttgagttcattgcatatatgactgcacctagccctcacagaagtctttggaggttcatactctcattagcctgtcaatctacaatagtcaaacaggttagattttagtttaaaggagtttatttaagtgtaaaggttaaggatggcctgctcaggaagtaaggatggtaaagaatggaagtcatggctgggggcggtggctcacggttgtgatcccagcactttgggaggctgaggagggcagaacatgagatcaggagttcaagaccagcctggccaacaaggtgaaaccccgtctctactaaaaatacaaaaattagccgggcgtggtggcgcgctcctgtagtcccagctacttgggaaactgaggcaggagaatcgcttgaacctgggaggcggaggttgcagtaagctgagatcgtgccac

SEQ ID NO: 913683 - DNA, 4001 bp, Homo sapiens
gagggagcccccgccgccgcccggccccccgccgccgccgggtcccccgccgccgccgccccccggcccgccgccaccccccgcggccgtggcgcccgcgcccccgcccaccgcggcgcccttgctggcccagcagcagcgggtgcacagggagcgccaggactccagcgtcttgccggaccagacccacacgcccgaggtgatgcccaccactaggcacatgaagtacttgagcatgaagacggcgtagtcgggcctgcgtgcctggtcgggctgcaggtcccgcaggcacgggcagttgtgcgtggcctcccagcgcgggcggttgtgctgctcgtagaagaggcaggcgaccaccaccgcggcgggcacggtgtagagcacggtgaacaggcccaggcggatcatcagcttctccagcttgtgcgtcttggtggggccgtcctgttgcttgatgaccgagcggatgcggaagagggacacgaagccggccagcaggaacatggtgccgatgaagaggtagatgaccagcggcgccagcacgaagccgcgcaggttgtccaggctctggttgcccacgtagcagatgcccgccaccgggtcgccgtccaccgagctgagcgccagcaccgcgatggacttgacgctgggcacaagccacgcggccaggtggaagtactgcgagtagccggcgatggcttcgttgccccacttcataccggccgccaggaaccatgtgagcgacaagatcacccaccagatggagctggccatgccgaagaagtagaccagcaagaagaccacggtgcacagcgcggggccggtggtctcgtagcgcacgtgctgctccaccgcgcccagctcctcgtactcgccgcgcccgcccgggccgcccgcgcccgcgcccgccgcgcccgcgcccgccgccgcgccgcccgcgcccccagcgccccccgcgcccggcgcgccaccgctgcacgccaccttctcgtggcccgccaccaggcgcactaggtagcccaccgacacgaagaggtagcaggccgagaggaagataatgggccgctccgggtacttgaagcgctccatgtcgataaggaaggtggagacggtggcgaaggtggacacgaagcagagcaccgaccacaggccgatccagaagacggtgaaggcgcgctcgtcctggctgaaaaaggggttgtggcagggcagcgcgcagttagcgatctggcctgtcttgacgcggttgtagagcgggtggcgctcgctggacacgctcaccataggcgcgcggcactggcacccgggctcgcagggagccgcgccgccgccagggggccgcgccttcccgccaccgccgccgccgcgagctgggggcgccgccgcgtccccgccgccaccgcccctgccgccgccgcggtgcgggggcctggcccccggcgggcggccgtggccgctgcccgaaggcggctgctcgccgggcggcggcggcggcaggcggcgcggcgggctgggcgcggcggtggttaggtcggtgcggttgtagtccatgcacagcgtgtcagggttgccttgctcgggcagccggtcgcagcgcatgcggtcgggccaggcgaagccgtactggcgcatgagcggcgcgcagccggccttggcgcgctcgcacaccgagcggcagggcggcagcggcttcttgtagtcctctaggcagatgggcgtgtacatgctgcacaggaagaacttgagatcgggcgagcactggatctccaccagcggccagaactggtgcacctccaggcccgcctcgtcttgcgtgtcgtggttgaactgattgggcatgtaggtgtagttgtagccgatgcccttacacagcggcacggtgatctcttggcatgccagctccttggccgaggcggccgcagcgccgctagagcgctgcagcagcgccaaggcggccagcagcgaggtcacttccaacaggtaaccccactccatgctgtgcgcctcggcccggtgccctcgccctccaggcggcgcgcagaggggtgccggggggggggcccacgagagagccgcagacgggtacagcgggtgatctggggtctcccttatgcttcgcccgggaggggggtctgccgataatctaaccccttctaggggcgcgtccgcagcggcgcggcccgcagcctgggcagggcccttccgcactcctttccgccgctccgggggtttgaaggcggctgcaggcgcgcgccacagtccgtaggtccgctctgctggccccgggtcgcgctcagccctcgcggcgcagagcggccgggcctcggctcatcgtcccgcgctcgctcgcctcctctccgcgcgcccgaccacttctccccgccgcgccgggcggcggtgactccgccggacagagagggcggaggcgccgcaagtttcctctggggccgcggtgcgcagtcaagatggctgggccgggccgcttgccgcgccgggtcagccctggcggccaccactcggcccccgggggctcatgcccgcccccaaggccaagccgccgccgccgccgccggagttggggacccgcctcggcccaggccgccgccctctttctccggcgtccgtccttcgtccgtccgccgccgggacagacggacccccgccgcctggaaaagtcagcgccgcgctccggccgcagtcgggcgaggtgcacacagtctccttcctgctggacacccaggagcaaatccagaccggaaggcggagcggacacctgagtggcgcggcccgcgcccagccgccgcctcctcctcggcgggagcagcgcccttagcccaacttcccggctccagccccgctcgcgccgcgctgccggctcatgaatatttatacagcgcggactcggtctccgcccccagccccgcgagccaatcgccgggcggtagggcggagtccacgcgctcccagggctcagccttccttaaggcagtccccgagtgtccgcactgctgtgcgcgctctctgcggatggagagttttggtaaccttgggattgaccgcagagacagagtgttggccatggctgtccccatggcgctgagtgcgtcggaggtcttggtccccttaccccgagtctgcccttggggacagggacggggtttggtgcagcgcgcgcctccccggcgcgtttcaaaccagccaagcccctgctgccaccctccgcaaatgtgggtgatctgcaggcggctggggtctcgtgctcctcggggcggcaggaaggtctcgcagcaggcgagcgccggggaggcctgccggggctcggcgctgcagaagacccgggaaagggtgtcctccttggggttctcagaacgatggtttctgagacttggagatgtggggggtgtggagtcattctaaactggggctggacccgggacggcccgggtgagatgccccggagcccagccttgggcgcgcgaggggcgcgggggacaaatgcccgccagagactctcctcccgcctccgctgcgtgacctgggggagcctcagtttccccacctagagagttgggtgatcatagcacagatctccaagggggctttgataattaggtgagataaaatataggaagccccgagccgccgtgctttcttaggaaaaatcattcaatttctttctaaaattcaaaacaaacctcgaaacttataaataggacaggctggaaactctggggctggattccctgtcttcccttcgttctttcaggacgtctattcatccatcccaagttcacaggcttttgccagagcctccttttctctggtgggaggcggcgctgcgctctggcgtggactccgcgacacgtatctgctctctgcacgaggccggagccggacccgggctgcttttagcagccgcttgggccaccgccagcgaacgctgcccccgccggctccgccgccaccttaagacgggccgggaggggggctgcgggcggccc

SEQ ID NO: 913684 - DNA, 4001 bp, Homo sapiens
agggaagccagccgtcatcgattcagtgagcgcacgagcgcctggatcgtcggccacccgccatcccaagggccgcgctgggggaagagcgccacggcctcagagccctcttggagctccgaggccaggttcgggggcttggacccagcgggcaggtcccgcatttctcgcttttatctgaagattctggcaggtcccgcctccgctgccacctcgacgcccctgtccggctctcagcgccggacccgcaccggccgcggtgggcggggcagagagaggggcaggggcgccccggggctccccgctgagtctttacctgttgcatggagaaacgcgtagttgacatccactttggagcagctgcagggcttctggtcgcaggcgcaggcggccttccgggcggcggcccgcgggggttggctcccgccgctctccgccggcttctcggcgtctccgtagagcagggctgggtaaggacaccgaacgcgggcctcgtcaatcctccgccgggcccggctccctcgctcccgcctacccgcagccaggaaaccccgactccgctgactgggatgcggaggtgagaagactgcttggaccccgcgggccgaccttggccgccccggtccctgggcactcaccgcacagtttgtttccgatgccgcccgtgaacttctgagccacttggcaccaggctcgcgctgcaaggaagaataggcaggcagacagcgaggcagaaagagaacaacagacggacgtgtgaaatttcgttctatgtgaaaatcaatcagtccggggtcctaggaggggccgccttcctcctgggggccgctcaggactcggtgaggccggcaggtgcagaaggcaagcgggaggctggcggcccgggccagccctcatttcctttatctgtttcccgaggagaagcccacaccgctgcccttccaggtgccaatcggctcaggcaaattcctctccctgcctaccttggacgagttttcctaaacactgaagctatccattttttcgcagactgtctttctagataaagaaatctctcacctttcccattttttttttctatcttcacggtcactccgtcccaccccagggtccagacacccggatcttagcagcgccccaggaccacggaattccatgtccccgagacaccgcggtctttggggggctcttccaaccttctgtggaacgggcctgagactatttgggcgtcttcccagggtacaagaggctgtagaggtcttgagctcttgggccgtcaaggacttagcccaaaagcagggagaagcgcccgaagaagtttcctgttgcaggtggaaaaacctccttcgtcttctccgtagttccgcaaaccccagaccaccgcaaaactcgcccgccgcaggcccccgttctccttcctacctgtgccgggattctcggaatccccagagccatcttccgacccgaaagaccaaaagccagagcccggagatgccatcggctttggagactggagcaggtcgcctgcgagtgcgagctgcgggcgagctgcctcgggcttggccctgcgcgcgcgtgcgtgcccgtgtggcgggaggagggcaccgcgcggggaccggcggggccgagcggcgagggcgggtgtcacgcaggaacagaaaacgtgcgtgtctgtgcgtgtgtgtatgcgagctggagacagggtttagggacgtggcaaccctttggaagccggggagctttaaaagagaccgggactacctaagggtcctcggagcccggactcaggaaagcgcggagagccccagagcatttgagggaaagggagcccagtggggatgaatgagggggcggcggaggaaaaaaacacgagagagggagggagctgagtcgtgaggatgcgaggcagaccatgcacgccagctggagtcagagtgagggggtgggaggcgtgccagcgcgtcctcgggcgagccagaggcgggaagtgcgggcggccgctgtcccgggtgctgccacagccgctgcgcgccagcgtcagcgaggggcagactggggagacctcggcgaggcgggaagcgtggcccagaggagttttctgtgtgcatcgattggggttttgtttgaggtctggctccagctgaggggaaggaagcggggttcccgcgccgttttcctccaagcaggtgctgaggtcactgcgacctcgagagctcgcgccccgggcgggcatcaggcgccgttcacgagcctggggaggggacggcgggggaagggctcctacccgctgatgggctcatttcagcgccttggtagaacctgacgcctgcctgctgaaccgcgccgtacccgggggcgcaccgttcctgcgtagccaagggctagatcgcgggacccaccgtccaggctctgagtgacggctggggagaatgactgctgattgaggcaattaaaatccacgctggagtctactgaggacctcgggctggggaaaaaaaaataaaacgaatggaaacttcttggaagagaatgaggcagagcggccagagtcggcaggattgatggcgggtgggggatggaatcagggcatttggtgaccttggcccgcggaggcgtggaagcgcccgctgcttgcgtgtaagggggatctgtgtgcgcctgggaggggagaacagggtttccaactaagcaatctcggctttacaaatccgagtaggaaagaaggcatcgcctgcagggccctcgttttaaggggcttcaaaccaatgccccccctcgcccccagagaatcttcgcggtagcgggtgacccggaagcgcgagattggttctctctgaggcgtattaggaggcggtttctctttttctaataaagaaaggaggagaaagtcagaatcgttctgatgatttcctttctacaaaaagctattgcagacagggaggacgccctaaggattgggagccctttgacagtttgcgctgcgttctcctggcagtggagatgaacttcaagtgcacctcggagctccggggctctgggggagacggagggagggagagagaggaaagggctgaggtcggcttcccgaggcggctgccttccccgcgcctggccagagcgcctgtcatttccattgtgttcacaagtcgttttatttctctgacctcctgaaccagccaccaaagctgctaacaaagcagagacccggggatcccgtctgggcgagcacccctcgaccctcgcttagaagggacatcctggggcccatgctggacgcatacaggcccaagtcctgtgtgctcgagcataactgtccctggtcaattctctccacaaagcgctgtcttcttctcgcgtgcctgagtccaggggttccctgaggagtcatgggatccacactatggcaactgggcccaggcgccaggatgagagcaggaaaccagtcgggcgttgatagcgtcctgccgaaggctggcactgagcgtgctaggtgaagtctgttccaggctgtgggagcccgggtggtcgaaaactcagggctcagtttggctcctctttcttgctctcctggctctgacactctaggtcaccacaataacaactccggaaacctaaagacttgtggttcagccatctgcacttcaggcatggcagctccgcagctctctccagcctcgcagaggctggttctttgttgaaatccatatcaaatcctgcaaaggttttccttcaagccagcagtctagggttgcagaacttttctactatggatgagtggttgaaaacataaaggttcttaaaagcaagcgtttaaatcacacaaaacccccaaagaagaaacggattaaaacacctgaatttaactgatttttttttctttttggtaaagcaatggcttcaagtgctaccgtttaaactccattaaatcccacagctctggagtactttggatctaatggtgatatttacattttttatttaaacacaccctacttcagatg

SEQ ID NO: 913685 - DNA, 4001 bp, Homo sapiens
tcttaggtgggaggctaatggagggcagtacccagagacagagtaaggcaagagttgcaggcaaggaggcgacttgaaagcaaagacgcaagaaaattctgtgcagccgggaatctgggaaatctcagatccctcaaacttaagacaggggtcttcccccccaaaccccttcagcatcagaattccattcctgaagccaggaggtaagagacctgtctaaaaaccaaaggcactagctctgggaaaaggtcaaggagaagggtgtgaataaataggtctctggggcctttctgaaaatgtgcgaattgagggacgctggcagagggccccctccaccccgcccacccgcctagaaagagctagcgggtaacagggaacgccaggttttttggaagagccgggttccagccgtgcttgtccggcgccggctaccgggcccagagagcccggacccgcggaggcagagccagggcaccccgcgcttggggacatcccgagaccccccaccccaaaacctgcagccgcgcagagacggagggctgcggcctggcgcccgccaggtgagcgccaggccccagggccaccagccgggagaggcgcctgctgcgactctttcaaaacacactctcgcgacgagccagaggccttcctcgcccatttccgggccccaatttttttgtaaatgaaccaggaacggcagatgggggctttcgcttgacctctccccgccctcaggtccctcccgacctccccgagccgggacggctgaagcggccggcgggagccccggcaccccgggcgcactcaccgtggtgggtcggagggtacctctgcaccgtggccctgaccgagtttccgtagtagggcgggacgtggttgccttgaccgtcgatgttaaaaagcacatccacctcctccggcagcgggtactgcgccgcgtccatgtaggagtggctgaggcccgggtggtgcgtgtccgggtgctgcccgttgagcacggcggggtggtggtggctcacccagcgcggctggtccgccgtcacctccatggcctcggctgtgctcgcgccctctcgccgggcccggaacccgcgcgcggggagggagggcggtccgcctgggaggtcggggggctcctgccgtcggagggtcgggggtcgttgaatgatttgctttcggtggggggatgggaaggctgggaagcaaaggtgagcaaaggagaaggttttttaaaaattatcttggaggggtcgtttagcaaagagaagaaggggaagacaaaaatccaaaaactgggtacggcagaataaaacgggaccaggttgtaaaaaggggcgacgactctgcaattctgcgagccaggctcctctgcaccggggtcctcagccgctcggaggcggagtccctcctcgggtcacctgcaagggagagaatgggagacctggatgagcccctgagttgctggagtggcacaacctcccctcgcgccgcccgcccgcccagcgcacccgagacccgcacgggagcgcggggacacggccgcggagcccgcagggctctcggggacgtccctgcagcccggctcgcgggagccggggctggctgagcaacttggagggcaagtcccagggctgactgttacgacttggagggcaagtccctccctcggggacaccggtcccgggaccgtcctctcagcccctagaaaacctccaaaagaggagagttgagtttttaaaattgatttaggtcctcccaagtggttgggggcaaaaaatcaaacttaaaaaaaaaaaaagtcaccagtaccaacctgggtagcgaagagcagagaggaggaggaggcggcggcgtacgacctgctcggtcagattgcgttgctcgctctgtctcgctctccctccgtctctctctcttcttctctctctctctccctctctcagtattttttttttttttttacagggaatgcattctttctgaaagtatcaagacggcgccaggcagctcagtgttcgcagacagctgtggcgcgacgcaacttaaggaggttctagtgtcatccgcgccgggggggaggagcctggcgctggcgagtaggggacaggatccccggcacaaggaaactgcaacccaaacccgctccaggacttctccccccgccccgcgcacccccgcccctcctcccgcccctccactgaccggaaaggggcgccgcagagggcggccgccggcggaggggcggcgggcagggtgggcgaggcccgcggggcttgggggcggacgggagggaacgcgcgctctggccctttaaatgtggccgcggctcctgccaattcattcgggtcgggtggacgattccgtcccggtgcagccagcctgccccattcatgaagttcatttcgatgggcagaattttctttttcagacttttaaaaaataggcacgcatggatcattattaggatctaatgcagggtgtttgggagagcgcatcgatgtggggaaacgtgcgcgttaaattgatcagaaaaacaaaatgtttcatgtcaaggtattttgagatttgcctctcgggccgacttcctaagagggtgagtcatcggataaaggggagatgcctttgactggagcgtccgcgtcaattttgttgtcattgtcacctctttcccgagccttctgcgctctcaagcccccagagtgaacacgcttcagctgttgcagctgccctttccagacctaatatttgtaatcaatgtgtgcttttgacttgagtggcaacagtgagggatgagaaggggggaggggaggaagagactggctctaactcattccccgagtacgctcagtgtagacggacagaaagaactcggtcttcactctagggacccaacttttcctttcgccccgcccggagccctacttactccggctcccggcgtttctcccacagtcaaggaaaccagccctcggtctgcaccgaccccaaccccggcctctggtcgggactccacggcgaccttccccggctcgcgggtctccaggccacgctctgcgcaatgggcaccccggggcggagggcacgcggctccgaggcgccccagcgagaggggcggggcgagcgggggcggggcctggagggaccaatcagcgggcgaggctgtggccgagccgcgattggtccgccccgcgggttccaacctgcaccgcccgctcggtcctttgagccactgcatcccctagcggcgcccgggtggctgcagccgctggcccgaaaatgctgctcgggcgagcaggggtcaggcgggaaaagaagactccaaatccactctctgctcgcccccagggcaatgctgccaggagagggagtgggttcccccgcaggctatcccaccgatggggctgagagcttaatttggggttttatttgaattggagacattgttccctcttcgctcctctaccccataaaattccctacaaatgcaaaaattcgagatagaagaagccgtccctgaaagtaagttctgaaggattcctttcatgcggtgaaggaacaacaacaatattcaacttcaccttggtgtgtgagggtcgtcgtgttttaaaacactatccctgtagaaagattagtgaaatgtattggaagaagtagtggaaacgtgaatcttcctggtctcgcgtttggatcttctttggagtcctcaccttcttaaatctgatgtttgtttgaaatcagggctgaatttccatatataggacagaaagaaagaaccccaattttttaaagaaagctccccccccccccgccacgtttctcctgagcccacttggtctcccgttattaggcggcccagttaagaggcatcgattttcctttcattctctgaccactcgtctctcctgggccagccaggctgcccgcatcttctcctgctcacagcgctctctaaaccttttaattatttagttgctgtctaacattcaccggaaacctctcca

SEQ ID NO: 913686 - DNA, 4001 bp, Homo sapiens
aagtgagcaaggcaggatcatcaaacctgggtacctcctgaggtatgtcatttcatttgctgcgttcaactactttcttgggggcggggagaggggaggaattctacaacttagatcagcaagttaaaatgcaaatagtttcctgtaccatttccatctaaatcaacacaggtgaagcataaataatgccatcccccttctcccaacacacacaaaaatttcaatttcataaggacgaaggtaggaagggaaaagggaaattatgaaatttcaatttcataaggacaaaggtaggaaaaattgagttagtcattccaagatcctaaatagttttctcttctgacactatgaggttttgatcctccttgttactacctcatcatgcaaaagtgcaaagtgttcctgactgccagggccaaaagcaggccacaagtcctgatcacatactgaaactaatcccagatagagataacgtttattgagtgcccactacataccaaaaggtattaggttgatcctgctcttaacctactacatgctctagctaggccactgcacatacatgctactacttttaagaagtgcattaactgagcagtcccaaagcagacctttccatttgtatcctccacagggcctagagtgccttttatacctgaattaatgcacaagtttccacattgtgcattaaaaaacaccatctacactattccttatttctaaaagcattcgttacccttggtggacttttatagctttacaacacagcagtttatcaaaggtcatcacagtgccataaactactctctagggttatgttccatcattcactctggggctctgaccctacaattggctgaaaatctctcatgactctttttgcccactaaacataataggccgacaataccaaactttgccagtattcaaatatctctctctgctgtcagtcaaatatgtcataatagagtggtttccttatgattaagcctcatctccttagtgaagatctgagagaaaaatgtcaacaaaaacatacactacaaaagaatgcctgtgaaagattgtataaaggaacaaacaggcccagaagataagtatagtgtttacatacagacccagactggcagctgagctgtcctgtaagagggaagccttctcatagcccagttccctgcgctgctataacctcaagccttccacacgtccctctgctgacaacctgattctagggtgcactagttcatcattattaatgaagcagttcctttgtattagtgaggcaatcacaaagaagtagacgctgtacagaatctagagagactttcacatctaaagtctgaaaacccataaaagtagacacaatgctccttaggtttgctttcagcttttgagtactgggctcttcaggatgcagaaagcgctggaaaggagaagctaaatactaggtcaagcctgggaaaacagaagatttgggcacctgcaaaggatcagtaatgagagcagaaatcgcccctcctgcggcagaggcatgacctttgcccctgcatacctccctgttccctcccacaacaacccttccctcgtcttattcctgtccgctgcgtccttagcccaccttggctcgcccaatttaagggcccttcccactaattccctattgcgatgtcagggcggccttcacgacaccggaactctaggaagagacttcgctgacctgtcagcggatccaaaatggcggggcctagtcccaggaccggcagccgctgctcatgtccagcccgcaccccggaggcgtctccgagcagctctcccggctctggtagcagatgggagaagagaaggagcctgtttcctggaaattgaggccgaagtcagggtgggactgcacagtccgccaggatgagtcgtccgggacgggcagtagagccgggtaccttccctgtcagctcactgacgtggtaactagcctcagtctagcccgctgcctggtaactgcgcgagccctgccgcgcgcagccaatcatagctttgcaccgtgaaaagtagcattccgactatccaatcgaataaaggaaattggcttcaggaggcgggtagtgcctaaagaagcgcgattacaagggaaagaaagggtatgttaggggacaaccaacggatacgagtactctctgagtgacagtttaaaaaaccaataaaaaatgaggaactgggctgggcggctagagaggtggagttaggtagagttcggttgcagtgcgcggtttggcagtggctgctgggcattatggggaaaaaggctacaattggctggaaaggggcggggtccgctttgagaacttgagcgggcatccctactcccctgtccacgtattatcaaagttacctgggccaagaccatgccccttgaggaatcactccttttcgaggcagctctgggctcccttcattctaaaaacaagtccagcgatctattccacaccctgctctcctcgccctcttgtccaccttccctgtcgtggcttctcacagttatgtctgtcacgtcccaactctgtttcagcgtcctctgccccactcccatcatccagaaatagagaaaatgggacgtagcagaagccctggatatctaatttaagtctcttcattttacattataggaaacagccccagggtggaaggctgggcccatgttcacataattagtaaatagcagagcagagagacgaacccctgggtctcctcacccccaggccaactcttttcatcgccttttgtcacctcttatgccttagtatatcgggctttgactcccggtctgcctttcataccaagcctttgacgggccttatccaccaggctaaatacgcagcttagcccacctcatcagtgataggaaacagaagtctttcttgtttgccttagaaacgctaaggggcctgagggttggatgcccacctgttttcactgtcttgcccccagctgcctcctccccttgcaagagatgatagaggttactaagctatttagaattacctgtattacctggaagtgagaatgcgtgagaagaggacaagaggatgggttttctcctaggagactgaatcatgaaattcccagcctatttgggacactagagccccagtgtccctgcagacctggagaagctgctgggaggcagtgaaaaaaaaatacctaattctttccatacatcctcccaattatggacgacccaagtccagggaagctctataactaaccacataggaaagtagtctcaaaaccagacatccaaagaccatccgtgtgctacgatgcgctatttttttgttttgttttgtttttttgtcttttgtttgtttgtttgttttgagagagtcttgctttgtcatccaggatggagtgcagtgctgtgatcttggctcactgcaacctccacctcctgggttcaagtgattctcctgcctcagcctcccaagtagctgggattacaggcatctgccaccacaccaggctaatttttgtatttttagtagagatggggtttcaccatgttggacaggctggtctcgaactcctgacctcaggtgatccacccgcctcagcctcccaaagtgttgagattacaggtgtgagccaccacacctggccacgatgctctagtgtaaagcacccatcagatatcagacgtgaagaacccctcagtaacttcctacacctgcacattgggcttctggtcggtgggtccagctgaggatctagcctctatcacccaaagagagtcagggaaagaggatataccatcatagcacctctttccacattacctcaaagccattttcctcttcatttgaaaactgagagttggtgtcctgggcctgtctcagattgagaggtcctggaaagccgattggaaaatcctctaagtgggccaaaaatttctgctcgccaatatctacttctacatacctccagaaattcatcattctaaaagcatgtga

SEQ ID NO: 913687 - DNA, 4001 bp, Homo sapiens
tacactcaagtccacctagctttagtgatttacccaaggtcatgttcatgccagatgattcttaaatggtttaatttaataacgttcctcaagaaatggaccccacatggtgcaagaaagttatgagtgaggatggagttagatccaattggcctggagcccagggccactgacctggtgagtctgctaagtggaggaggagggcatggggcctctttgtggcaggtgctccccaatccatggttatgagaggccacagatgttaccttgagtcacacagccagtgacagatctgaccccaggctgtctagctccacagctaggcttgtttccctctccctcaggaggggagcctgtagactgcagatttttctcctgttgaatggcctcatcttctgcagagctgcaggagacccccacccacattttctggaacattattctgcaaccaggagtaatcaccatgacaaccagggtcttctcaccacccctgtggccctggctgcacctcctctctacccagggcctgcaaaggtgggcaggctgctgaggcaggagcctggaagtgctctcagaacagggcagcatgggcctttgcaagtgccctctgcccagctccatccaaggggctgaggaagtggaaaggtgggacagaggccggagataggcagagtgttcccactgcctaagcccctgggcctttccttaaacccctgtggtctgaacgcttcatgccagtccgtggaagtcctcaatcccgggcagccaaggcccttctcagtccactctgcttccctggacacaggaaccatagctgacgccagctaggggctcctgcttcctgacagggcccagtgcctggagcttctgcagggctgcctatgttcactggctgtgcccttctcatttgtaaaatgcccacataattgaccctatgacagggatactcccctggcctatgtcccctcttccactctctgtgcttacagccttgtgtatggggtagtctgtgtatgtccagcaatgtgggagcaccccaggggcaggacctctgtgccacctgctgccactcttggtgccccactggaggttcagggcctggcatggagagatcagtgaatcattagtgaaagaatgaatgaaccactcacccgttggctagaagaggaaaagtagaggtgcacgggtggggagacagaaaagtgaggaaggtggagaatgaggagaaggggtcctggggcaccctctacttacccagcctggccctgaagctgcggaccgtgttgccccctcccggccgcgcgccctgccggctgtacttctcatagagcctgtgcatgtggacagcgaccatgtcctgggcgctggggcccaacgtggcggccgcgtccccagggtgccgctggagatccctgtccccctgcaggccgtcggcggccgcgggcagtgcggaccaggcgggggccctgtggctgccggccacatcccggagcaacagcagaaacaacggcagcagcagcagcagcagctggggcccgggtcccgggctggtccgagcggggacatgagccatggcgtggtgagggcggcaaagggccgaagtccaggaggaggaaggcgagcgctggcgcaccggaggctgcggactgacctcgcggcagtagggcgcgcggggagagcccgggcagcagggcgctggataccgaggtccgcgcggggcgaggggcttagcggagcaggcacccgggcgcgcggtccgtgggtaccggcggcccgagcccccggccagcggtcacagccgtccggagcagcgcagagccgagccgagcccgagtcggcgcgctgccttggcggactcgcgccgcgaaagtttgtagcccactgcgcgcccggcccggctgcttcgaggggcggggcggggcggccggctgcgccctcgaggggacccggctgcgcgccccggacctctggggctgcagctgacagggtcgtccctggcccggctgccgtgtgcgtgcgcccgtgtgtggcagcgtgcgcgcgccggggtgtgcgcccgcgagtgtggggggcgtgggcgagcgcgctccccgctccccagccgagagcccgagacccagccccgcagccggctcctgtgtgtcggcgccgcagcctgccctggctgcgaggggggctgggcggcagttggaggggggcctgcctgctgggttgcccctgcaatggcatgcgatggctatgtgattgcaagatgacagctcccctgtgaggaccagagaggggatatgtgtgcgcccagttgcctcggagtcagcgtatgtccaaaatgtgagagtgtggggaacagagatcctctctgggctgactccgtaaagaaaagccctcaccccaaagctcatgccacccaagggaactggaacaagatcgtgattaaaactcagaattagctcattaaccagccctttatttgacgagagtaatttcagttgttgaagaaacacatcaaaggtccttattaatctttggacatgtggccttcaggattgcaggaataagacatgctttcaatttgcctttaaaaacatttccaaagcatcagagcaggaagagagaaagcagtggctttcctaagaaggattcccagtgaagtgagggtgtagtgagtccctggcccactgcccctcagcttaaccctggggcagaaggtcctgatctttgtcttgcctctagcaggatttcttctccattgatagaattcaagggctcttatgaacttgatggggaaaaaaatacatctttattttcattaactctaactgaaacttagcattaactaatgttataaatgcaagcaaccaaccacagtggtattagtgactttgtcaccaataggcaccatccacagatattttcatatcacatgagagtggttgcggattcatcaaagtatcatgtttgctcattaccacttcagttaggcctactgctagttagttagcaaaaaggaacatagttactatgttacaaaattgtttttaaatatttgtgataactctattctaacgtaattgtcttcctttgtaactctgcatattttattttatgcatttaaaaacattcttttaagaaggggtccactggcttccctagacttagaagggggcccaagacccacctaaaaagtttaaggacccttgagagggaaggaaaggaccacgtcaagcccatgttcttccagaaagctcccagatacagtctatgctacatttcaaaggactatttgcaaacttgtgaacaggctgttccctttacttggtaactttgggctctgtgagccaaaatagttacttttcttggagggctcacaatgcaataattgaaaaattgctggaaaaggcttctgttggtgtgtaaaacatgacccatttgtaattttttaaaatcttgcagtgtcaaattagaggccatcctattaagagcttctgaacctcagacttgtagcttttggaaaaccagagaaaagcattttatttgttttgaaaattagatcacagtgtgttcaacttcccattaggatagctcccatttgttctgaaccagttttcaaaaatggtttgcctggaagtgagatgatcgggtctcagcctgggacttagtgaatctctccttataaatgatccagaccatctttcagtggtcccttcccccactcccacccccatttccctccttctccatgtgcccctcacttcccctctgtccccctctccccttcccccccagaatgcctctgacctgcaccggctgggggtaacctctgctcatgggtagttttgtgtctgttggggccatacacaatcgaggcctgttgaaaaggagggtgagtccgcaggaggcccgcacaagctgggctatttggaatccgtgtccattaaagccttctggctctccttaactcattcccgctccattcaagccagcctgagggtcaggctttagcc

SEQ ID NO: 913688 - DNA, 4001 bp, Homo sapiens
ggattcaaggcagttaattgccaaaatgcatacagctagttaagtattctgggacttactagcacacagctattgagtacataaagaaaacagaaaaactcactgtcagatcctgagtgaagatcctgagtgtatgaatttaaaggagagatcctgggtggggacagtgaaaccccaatattaagacaatatcaaaaatctcagcctctaaacagtgtataaatcgtttgaaattgtaatttccaaacaaagcaaaagtggataattggttttagtgtttcaggaacaaaatctattagcttcaattgctttgtcatgtcaagcaaaaatggggcttggcttttagccacatagttatctcgatatcccatttatcctgggctgacactttgtcattagcacgctcctgctatacaatggctggttcacagacagggaaaagaggttgcattttttcagcacttgctatatacccacatgtgtggagaccctgtgctatagggaaacctagctggcaggttttgaagtgccagtcctgcctctgcagaccagttaggtctggcctgggcgtggtatggagccaggccccttagccatttgcaagtctcagacccaggaagggagaggctctgtgctcctggacattcagagggagacagcagcagcaggaaaagccagctctgcaggcagacaggtttaacacttcctaggtgtgcaggcttaacacttcctaggtgacatgggtgggtacccttggtggctgcaagctttgactgaacagttttgctcttcagaaacttatttcccctgcatcatgtgagcttgtctgagttaggacataggtcctaggtccgtgtttgttatcttctagtccttctaaatcagatatatttctatttaaaaacaattaggttctctgccaacacttctctgtccaagaattttatctgatttttaaaaccgtttcataagaaaggaatagatgtgctttgaaaatttaaaaatatcccagttagttggaggtgaaataggttgcctgttctgttctgaagtaggaaggggacaggaagggaagggggaaaggaagagaagtgaatcagaggggagtgatgcaaagaagaggagagtaaagagaaggggtggaaaaaagagagctggcatccctgtgcacctgctgtgtgaaatgtggcacacagcttggggaaggtgaatccttcacaacagaagtgctgagtagaactctcagtaaccatggaaatgttcttcagtctgcactgcctgatagggaagccattagccacgcatttgaaaggaagctggtgaggctaaagaaataagttttaattttatttcattgtaactaatttaaatggaagcttgaagagcctcctatggccagtggcctccaccctggggaaagcagctgtggacctgtgagtcccaccccagcgcgcatggtgcaagcggagaccctaccttccatgctgaagctccgcacaatgttggacgctggcgtagtcgacttatcggacgtgtacctgttgtacaggtcaatcatgtactgcggcggctccaccctggttttgtcctgcgaagggaccccactcaggttaaggctgcgcaggaaatccaccttcacgttctccagaaacatcttcaggttgaaggtgtgctcaggcagcccacctccaggcacccccagtgggctgtgggcgtttcccccagcagaccctcgtccccagctctgcagtggcttcccctgtagggagccagccagcagggacagcaggggcagggccacccacagtgccccaggacacatcttaggcccgcgcaatcacccagagaggagactgcaggcggccgtgctgtgttagcgggcacggggaggagctgggaaggagcgggccggcatctccctgctgtttgctctgaaggaaccgtcctggccagcacccactctcacccgctgccgggctggattgtcctccacttgtgcttatctggtcctcgatgccgcgctccgacgtcttatctgagggagccttccgttaatgaaggctctataaacatctgacaaacacacagggcatgcgggaaggacacggcctactgtaaagaatctgtgcttctccagggggttattgccccctaattaggatactttctcatttccttgccagggctcttcagaagaatctccaggcagggtgacatatgctccatctcctgggccacaggagtgaagaatccaggaaacaagaccaagtagtcctccaaatatagaaaggacagcacaagatcacagtgaaccgtgggggctggggagatggggagagtgtggggaccacatcagggctcagaagaggcctgctccttgcagaatcggaacctgccagcaagcctccctgctctgttggtgggatgcactgctgagcattagagatcacgagtgaatatggctcccgtgcaatttagtgcggtgatgagtcaaactagacacaggctgggatctcaactccctcaccgattccctgcaaatgtcacctggaacaagtcactgcagctcttggagcctcccattcagaagatagttataggggttaagaggatgctgtgccccaggctggcttggtggctgcattctggatgccccctctccagcccaggcctgattgagctggagctgggggaggaagccctgggttcccccagcctgctctgtcggagctccacaacacactgcagcctgtggggagctccccacatccctgcatcccagctgtgtcactggtctgttgtggggtggtcttagctcacaccaacctggcagccacctggcccacactcatcagcagggagaaccacgcaatctggtagacaggggagtaggtgggttgttctgagagtggtacatgccaagaagatgatcccctggcctttggaggctgataagctgtggcccaggaaagggccccagggactgcgttaagagcagtatgtccacacttagactctgtccatttccatcacgtgtggctttgagcaaagcaaagaaggatcatggttagaaacactctggggtatgctgtgcctggtggtttactctggggaaggtattctatgctggtgaggctgtccgggagaggctgcagagagctgagcaggtttaggggggtgcaggaggggccacagcatgctgcggtcagagattgcagagggggatgggtgaaatcaggagcccctgaatggctgggcctgaatagaacttgctatctctgtcctttgatgacatgggccaggggaagacgggaagcgtgctgcttcagaaatgctgcttgggaagaggactggaagtgtgctgggctttgatccagctcagtgcaagaattccatggggcagagaaaagatgaataaatgggtgccatgcccaagaaatggagctgcaaatgcggagtgaggtgtggtccgggaggagtgaggacagggcagatgcctgcaacatggtctggccaggagcttttcacacacgagaggctgagcagagggatagcctagtggcctggatgtgctcagggaggagcaaggggctgctacctgacgttattttttaaatgtgacatttttttcccctgttataacagtagtctatagtatagaaaacttgggaaatggaaaacattaaagagaaaataaataacctacaatttaatcatccagtgatgcccatggttagcattttgagacacatccaactccacaatcctatatctgaaaccattgtggccaggattgtgttgagactccgacagtttcagatttgggggattttgtattgtgtatatgcaataacattcccaaaggggtcagagacaacaccttataatgacacacatgaatatttctgcagtgaaacaaataaagacacaaatgtccattcaggtcaagttttcccagaaaaggaattaaaagaaactctaggttctcagatggttcttta

SEQ ID NO: 913689 - DNA, 4001 bp, Homo sapiens
gtggaactaaccggctcttaaaacacgctggcagcaacactacccattccaacaggcaaaatccaccacaaactactaagctcagcttggaatcccaattaggcacttaaaaaaaaaaaaaaaaaagcacaaaacctgcagtgggtagggcctattcatttaggcatccaacagtcttccagcttttcaaagacagacacaggattattcctggattggtcaaacataacgaagtattcagaatgaatattctctaataattgcatataactataaacagaaaaatgacagaccagaaaaacacgattctaattcttcacaaacctttcctaaaaaattagccaaataaaagttcgaaggttttctcttgcctagagacatctaaaagtgttattttgggatgttacctgtaaaaaaaaaaaaaaaaattggtttgaccctgagagattataataaatttcaaaaaatttgaagtggaagtctacattaaatgactcaggaatttgaagtcagagtacataggatacacaagatttacatcagtattcatcttaattatgatcaagcagcccaaagttagaatttcaaatttccccaaaaattgatagttaaaatggttttctccaaagtgaattcttttgcaagatgaacatttaaaaaaaaaaaaaaaagaacagaaaaagtacaaactacagaacctgcctgcgttatctacagattacctaaagttcccttagaaacagataaccaggaaaatcaatataccatgatattaggtacaccttgcattcatatattacaatgcattcttcatgttattatcttccaactccctgaagaaagcttcggagtacagagaacttggcttttagcaatccatcaccaacccaattcttaggggaaaacagtccagaagagacaaaggaggcagagaacccaccaaacaaaaggaaaaggcggcgaaggtcaggtgcgaaagcatttgacggacaagttttgaaaaaactcaattccaattctacagatgctcagtaagtgagaagggagggtggctaaaaggattcaataatacttctcattagcaggggggagaaaggattaaaagactaatttccacgttttcgccaaaaatataagttaatcaagccctagcagttccgaagcagtgattatccaagacttgtcaggaaaccccgtactcggctttggcagccagactgacccggggcagcggccgaggcggaataggaaatgcaaccgcgaggcctgcaccgtcccctccgcctcgggtgctggtttccaaccgggcgaggtcaccggcccaaaccggggagcgggacccttggcccgggcggccttctcccctcccctccgcttccgctgggggcaagcgcagaggccgggctcggccgtcaccccgccccgagcctcacggcccgcatctccatttccccgcctgcccctcacactgggagccgcccgctcgccccgggacgcggggcgcccctgaacccgcccgcgcccctagccacgactcccgtcccgaaaactacggctgacggcagaacgagacccccgaggagctgcgacccgcgggccgtgcaggagccgggggtgcgcccgccccggctgctcagccccggcccctcagccctggcgcccaccgtcaggccggtgcccagcacgatcacgtcgtactcctcattcatggcggggcaggcgcggacgcaggacccgagcaaggaaaaggcgcaggggctccgtgaccaccctacgaggctgggaggcgctcttgggcgcgaaggaaaggggaagagaaagagaggaaaatggagctggcgacaaggcgagaccgaccgccacctcagacgggaagagaagaactgggcggggagaggaggggagggagcgaggaggggagggctgtgactgagcctccgcagccggggcggggcctgcaggcgccgggagggccgccaatcaggcgctcccggcactctaattggttacgtccccgtcgctcgcacaactttttttccttccccgcctctcgcgagaggaaaagggcggggcgtcgccattttggcttccggttccccttgcggcctctgccacggtggttcgggaggcggcgcgcgggccggggtggaggtgcacggagccgcgggcggggactgctggccaccaccgttctgactcccgccgtcggggcgggagctcgctcggtccaaggtcccagagccggatcgccgcccttggactttgagcgggcgcgtgcggcggccacgtgggcgaggagcgcgggccgggctgcctctcgggggtggcggccttggttcctcccgcggggctgggcttgccggggcccggagcccgccgggaagagttcggaaatcacacgtgtcctttttcccgctctgtgccctccttgtttagtgcgttgccggtgggcgctttaggaaattggtaggaggaaaagcggcttcttttgaaaaggtaacccttaacagagatgaaagtgaaagccaggtttcattgggaagccgatctgcacctaccgagggctgtaacttaaagccgctgtaaacgtggtagctgatccttgtatgcaaaggtttaggccctaagcttagaaactgttccttgcttgccttctaccccgctcctctttttctagaattctcttaggaatctctggcttcattgaggacacaggtgtaagcagaagctgtgttctcagctccaagaggccgaccccacgaaagcctaagcaggtgaatttcgtaaagacgttgacagttggaaaacctgtgctttcagcacgtgataaatctgcagagtcagcagacaatgaagatttggcattcaagaactcctcaaatacttctcgatagtagctattcagagcctgccttgatagaccgaacttgctcatatttaaatcattaagatagaggaaagaatgtaacaactttttaaaatgtttcttaccccataaatacttgaagaagatatgttatattggaccatggatctttctgggggggaggggagaagaaagcaaaagtaaagtttaaatttacattcaaccttaatttgattgtatatatttgtgaccaaatgaattagtgcacagttgaccatacaactgattatgcaacagtgagtgtaactgacttttcttttggctaagctaatgatgactaaagaaggtccttctgttgctctgtcttcaagtcatcagggggtcatactacctatatttttgaaccaatatgaaataaccctttttctttatttttctgagacaatctcaccctgtcgtccaggctggagtgcagcggtgtaatcatgcctcactgcagccttgatctcctgggctcaagccatcctcccacctcagtctccccagtagcagggacaagaggtacaggccaccacacctgactattggcccttttttttttattagcaataacaataaagagcttttttcacaattgccatcagcctctggctcttgaagagaaatttaagcatgtcaactgaattatgttaaccatgttttaggtgaagactattttatcgatactcaagagttgtgagaaacttgaagacactgagataagggaattgaatttaaggctaataaggatcccttccttacttaacactgaagttcattttagttcacagtacaggccctatggcccaacagaaggacaataacaatcaaacctggactaagccttaacggactgagtgcatctaaaatgttgtacctgagccaggcacagtgcttcacacctgtaatcctaacactttgggaggctgagatgggaggatcacttggggccaggagtgggagatgggagaatcacttgggaccagcctgtgctgtagagcctaggtaacagagacactgtccctataaaaaaaattagctggaggccgggcacggtgattgatgcctgtaatcccagcactttgggaggctgagg

SEQ ID NO: 913690 - DNA, 4001 bp, Homo sapiens
cctggaattccagctcctctctcctcctcccgggcccgcaaggaagagtggcgcaggctcagcccgcgggcttcaagggtttgctccagagcctgcgctgcccaccgcgcacgtcggccctccgccccggggcatcctggcctgagcaacgacccgggctcccgggccacccccggctccagccacccgctccgcccggctgaaactcaggcgctttccgaggagaagtgcggcggcggactgggcaccgggcgcgcgctgggcgcggggcaggccagccatggtcagcggtccgccgggcggagagtgcccagaagctactcgggaaaaacttttctcttccaagtttgctctcccggccccaatgctccccaactccacctgcccgccgcggctccgcgagctcccagagactctctgggggtgcagggccctgggctggagggcttcttagtcccccgccaagttgggtcattaaaaaccacaggaaatcaaaaccaagcccgaaaagcttcaggcagcgccgcgccgccaccgcctccctaacccggggattcgcgatcccattccccaaaaagacacttcttccttccacatccaccacacccgcgccccaattttggtgcggagggcggggtgggctgctgcaagcgaccctaggaaagactcagagggtaagaaagcccgcggcgggcctcgacttacccaagagcggcagcgcgaagtacagggtcgccaggaacatggtgccggcgcggggctggtccccgcccccccaaaaaaatcccgagccgccgctgggtcttgccgagggagctcagcgtgcagcgatccccggacagctgtgctgctctggccgcccaaagttcagctccatccagtgaaagaggaaactccgggtctggcagcagccaccgccgccggcgactcagctccgggatggcgagggcgggaggcggttccgcttttaggggttcaggtccgacccaacctggaagggagggcgcgctttgagatgagagcggagagcgccggagactccccccacagaaccctctcccctcccccgttcccgcctttggggaatttccaacaccggggtgaggacccacccccacccaggtcggggtgcatgtgcgtgttttccaggggccgctgacacggggatggaggtgagggctggagaggtctgaagagggttcctaaagtccaagggggtgtctgttgggttcaacccgagacgctgaacgcaagcaaataaataaataaacggtactttccgagcgtcgcgagcggagcctgcagctgcctggagtccgagccctcggtggcggcggcggcagctccctagccagccctggcgccgaaagagccccttctcccgggaagttggcctccccctcctcgcgtcagccagcgagctcgctcagccgccggccctccccactccgatcgccaatccctagccccagtcgccgccctccttctccccgggactcgtctccctccagaggccgccaagccagggggaaccgatgtcccgactggggctgaaacccggttcctgcgcccctaccccctacccgccgcgcgtcctcggctccctcctgggcgtccgctcctctcacactctcgcccggtgcccaggactcgggcgcttccgcaccccagcccagggcgagcgcgccggcccgcagtcccggcgtgccccggcaggtgcagcccggcgccacgagcgccccccgggccctaaagttgggagacgccagcaaaaagaaaggggtggccggaggaggggggaagaaggagtggggaagagggacgggaagcggcaatgggttcccaaacagaacgaaaaaaactccaaatgccaccaacctggactcaaccgaccgcgtccagctgcggcgaggagccagtttgtttatttacttatttattctttcagggcaatggtgtccccgccccctccttccctttccgggctcactttatctgcgctaggaaaagaaaaaaaagaaaaaaaaatagatgcggtaatcttcgagagctcgaagggccgagttgggccaggacgatttccgagcagagccctcggctcggatgctcgttagggatgttagtggttattggaagcggcgcggagaatggcgtgttccgaggccagatttcttctggccagaggaccctcggcctgctcctgttcccgccgctccgcagctccagctccctcctaagctcgcccgccaggcagccgcagctgcacacgcccgcttgcggtgggacccgcggccggacccgtactcgcgcacaggacacgcagtgttctgcagccggccgcgggtgctgccagacacacacactctctctctctctctctctctctgtctctctctctctctctctctctcacacacacacacagacacacacacacacatacacgggcacaagggctctttcttcttagggcaatcgagccagacccttcttcggaacacaaagttttcccccacgtcactagtggctgtgattcaagacttggtgctttcaagacacactcagacccaggacgctggagcggcgatcctgggatgcgcccatccgttcgtccacgccagcgcgtgcacactcacactcacacgcacacatgcacacgcagtctctacctctctcctggagctccgacaaggagacaaaagcggagcccccagcccactgcatttaaacccggccagacctggctttagaaaatttataagctgacctccattttggctgtttcgagagtaaattaacaacaacaaaaaaagcctaacatgtacacagcccttcgccccaacccctgggaccgctggttcccagtcgtgctgctcaccccccgccccccacgcctgacacacgctccccttcccgcacgccggggggcgcccggggcaccgaagtctacactgggtcgggagaccggtctaggagccagccggcagtgctcgggatctttgctgatgtccaagttcatctctcggggagaccgagtttgaatcaaatctgcgtgcgcccagctgtcaaatctgcaaacctatcacgccagacaatgggccgccgcggaggacagacaagaatggctcattttgatcgaggggggtaaattgaaaagggcacgggctttggttgaagtttgaggcccgggtgtcagggcggggagaagaagaggaggaaggaggagggttgggccgctctccattcaaccacacatcagccaggcgcgcccctcggctgcagcggctgcttgcaggcgggctgcatattgtgtggagtcgccaaagagggtctgcgcctcggggcgcgccccaaacccgggggacatcctacggatccgcacttctcttgtgctgtacgcgtgttcctccagggtaagtatgaggagacggacgccctcatcagacacccctcctccaacacacacacacccatagccacatcattcagggatactctagttcagtgtatcagtttacacttggttgttgagtaaacaaagcaaacatatgtcacattttcgcgacagatggttcaaaccaagggctacttaagttctctctctctaacagtctaagttacaggctgaactaagcagaaatgtaattaagtcatctgatcagtttcttcgacttaaaatgttttcccatattttcacaaacaagccagataaatcctggggatgtggtttcaaggaaaggagggctgaatatgaactaagactttgtgtgaagactccgtttctccccggtcaccccaaacagaaaatcctctttcattgttccatttcgtaagtggaggagaatgtcttcttttggaaaatcagtaattggaatttcaattttcaatagagggactagtgcttaccggtgctgattacttgggatagttggattacaatgaggtttaagacatcatccacatcttttgtaaatgttctttgtttagaaatgacttcatgt

SEQ ID NO: 913691 - DNA, 4001 bp, Homo sapiens
acttttctcttccaagtttgctctcccggccccaatgctccccaactccacctgcccgccgcggctccgcgagctcccagagactctctgggggtgcagggccctgggctggagggcttcttagtcccccgccaagttgggtcattaaaaaccacaggaaatcaaaaccaagcccgaaaagcttcaggcagcgccgcgccgccaccgcctccctaacccggggattcgcgatcccattccccaaaaagacacttcttccttccacatccaccacacccgcgccccaattttggtgcggagggcggggtgggctgctgcaagcgaccctaggaaagactcagagggtaagaaagcccgcggcgggcctcgacttacccaagagcggcagcgcgaagtacagggtcgccaggaacatggtgccggcgcggggctggtccccgcccccccaaaaaaatcccgagccgccgctgggtcttgccgagggagctcagcgtgcagcgatccccggacagctgtgctgctctggccgcccaaagttcagctccatccagtgaaagaggaaactccgggtctggcagcagccaccgccgccggcgactcagctccgggatggcgagggcgggaggcggttccgcttttaggggttcaggtccgacccaacctggaagggagggcgcgctttgagatgagagcggagagcgccggagactccccccacagaaccctctcccctcccccgttcccgcctttggggaatttccaacaccggggtgaggacccacccccacccaggtcggggtgcatgtgcgtgttttccaggggccgctgacacggggatggaggtgagggctggagaggtctgaagagggttcctaaagtccaagggggtgtctgttgggttcaacccgagacgctgaacgcaagcaaataaataaataaacggtactttccgagcgtcgcgagcggagcctgcagctgcctggagtccgagccctcggtggcggcggcggcagctccctagccagccctggcgccgaaagagccccttctcccgggaagttggcctccccctcctcgcgtcagccagcgagctcgctcagccgccggccctccccactccgatcgccaatccctagccccagtcgccgccctccttctccccgggactcgtctccctccagaggccgccaagccagggggaaccgatgtcccgactggggctgaaacccggttcctgcgcccctaccccctacccgccgcgcgtcctcggctccctcctgggcgtccgctcctctcacactctcgcccggtgcccaggactcgggcgcttccgcaccccagcccagggcgagcgcgccggcccgcagtcccggcgtgccccggcaggtgcagcccggcgccacgagcgccccccgggccctaaagttgggagacgccagcaaaaagaaaggggtggccggaggaggggggaagaaggagtggggaagagggacgggaagcggcaatgggttcccaaacagaacgaaaaaaactccaaatgccaccaacctggactcaaccgaccgcgtccagctgcggcgaggagccagtttgtttatttacttatttattctttcagggcaatggtgtccccgccccctccttccctttccgggctcactttatctgcgctaggaaaagaaaaaaaagaaaaaaaaatagatgcggtaatcttcgagagctcgaagggccgagttgggccaggacgatttccgagcagagccctcggctcggatgctcgttagggatgttagtggttattggaagcggcgcggagaatggcgtgttccgaggccagatttcttctggccagaggaccctcggcctgctcctgttcccgccgctccgcagctccagctccctcctaagctcgcccgccaggcagccgcagctgcacacgcccgcttgcggtgggacccgcggccggacccgtactcgcgcacaggacacgcagtgttctgcagccggccgcgggtgctgccagacacacacactctctctctctctctctctctctgtctctctctctctctctctctctcacacacacacacagacacacacacacacatacacgggcacaagggctctttcttcttagggcaatcgagccagacccttcttcggaacacaaagttttcccccacgtcactagtggctgtgattcaagacttggtgctttcaagacacactcagacccaggacgctggagcggcgatcctgggatgcgcccatccgttcgtccacgccagcgcgtgcacactcacactcacacgcacacatgcacacgcagtctctacctctctcctggagctccgacaaggagacaaaagcggagcccccagcccactgcatttaaacccggccagacctggctttagaaaatttataagctgacctccattttggctgtttcgagagtaaattaacaacaacaaaaaaagcctaacatgtacacagcccttcgccccaacccctgggaccgctggttcccagtcgtgctgctcaccccccgccccccacgcctgacacacgctccccttcccgcacgccggggggcgcccggggcaccgaagtctacactgggtcgggagaccggtctaggagccagccggcagtgctcgggatctttgctgatgtccaagttcatctctcggggagaccgagtttgaatcaaatctgcgtgcgcccagctgtcaaatctgcaaacctatcacgccagacaatgggccgccgcggaggacagacaagaatggctcattttgatcgaggggggtaaattgaaaagggcacgggctttggttgaagtttgaggcccgggtgtcagggcggggagaagaagaggaggaaggaggagggttgggccgctctccattcaaccacacatcagccaggcgcgcccctcggctgcagcggctgcttgcaggcgggctgcatattgtgtggagtcgccaaagagggtctgcgcctcggggcgcgccccaaacccgggggacatcctacggatccgcacttctcttgtgctgtacgcgtgttcctccagggtaagtatgaggagacggacgccctcatcagacacccctcctccaacacacacacacccatagccacatcattcagggatactctagttcagtgtatcagtttacacttggttgttgagtaaacaaagcaaacatatgtcacattttcgcgacagatggttcaaaccaagggctacttaagttctctctctctaacagtctaagttacaggctgaactaagcagaaatgtaattaagtcatctgatcagtttcttcgacttaaaatgttttcccatattttcacaaacaagccagataaatcctggggatgtggtttcaaggaaaggagggctgaatatgaactaagactttgtgtgaagactccgtttctccccggtcaccccaaacagaaaatcctctttcattgttccatttcgtaagtggaggagaatgtcttcttttggaaaatcagtaattggaatttcaattttcaatagagggactagtgcttaccggtgctgattacttgggatagttggattacaatgaggtttaagacatcatccacatcttttgtaaatgttctttgtttagaaatgacttcatgttaccctatatattccacggaattcttttgaatcaaattttaacagggtgggggaagggtgaactaaaagctctcccagtgtagaatatgggacttctttttaaaatacagatgatctccaacttatgatgcttctacttatatttttagactttaccatggtgcaaaagccatatacattcagtagaaactgtattttgactatggaccatacaatcattctatttttcactgtcaggttagtattgaataagtttcatgagatagtcaacactttactataaaatagctttgtgttagataattttccccaactgccggctaatgtaag

SEQ ID NO: 913692 - DNA, 4001 bp, Homo sapiens
cacacatctgcctttgatcacgttaggtggggagggtgaagatacactggattctcctggaccttttacaatacttcatcttacatcagagcaggttaaagggaacaagacagggggagtccagaccagatgcagggcaagccttcctattattattgagaggccagcgaaagccccaggctggctctccttggaaagaagttgtgggttccttggggccctttagtgggatcctcctcccatgctccgaccaggtttcagagaggtcagcggggtcccgggggtggccctccccccagcccccgtcctcctcatgggttttccaacaacaggcccaacaatgctggtcagcccagcaaacaccagctgccgttgtccctgggggccaaggaaaggtcctcactctgcagctggggagaagtgagtggaggatgagatcagctggcccagggacgaaaggcccgcctgccttcggggagggacacggggtggggtggggaggttccacgcgtaccctgcaggctctggtacatgctccagtaaatgcgcaggcagttcttctccttcttcataccccgcttgcagcggcagttgtagagcgacttctgcttcagggcctccatggcgctgcggcactcatccttggcctccaggccggatgccaggctgaagttggtctccttgcccgccacgcactgccttagcgtgcggtacttggtgctgcagctctgctccttcaggcactgatcactggctttcacgcaatccaggcggtctccgccgctcacttcggccgacaggagcaagtctgcggggcagaggggagggagcctgagtgcggcgggcggggaccccggccgcccctgctccgggcgagggcgcgcgcccgggtcagggatgcttgaccagccttcgggggcgccctgctctgggagcgggtccacctctcgaccatccgggagtccattttcccgccccctggaattccagctcctctctcctcctcccgggcccgcaaggaagagtggcgcaggctcagcccgcgggcttcaagggtttgctccagagcctgcgctgcccaccgcgcacgtcggccctccgccccggggcatcctggcctgagcaacgacccgggctcccgggccacccccggctccagccacccgctccgcccggctgaaactcaggcgctttccgaggagaagtgcggcggcggactgggcaccgggcgcgcgctgggcgcggggcaggccagccatggtcagcggtccgccgggcggagagtgcccagaagctactcgggaaaaacttttctcttccaagtttgctctcccggccccaatgctccccaactccacctgcccgccgcggctccgcgagctcccagagactctctgggggtgcagggccctgggctggagggcttcttagtcccccgccaagttgggtcattaaaaaccacaggaaatcaaaaccaagcccgaaaagcttcaggcagcgccgcgccgccaccgcctccctaacccggggattcgcgatcccattccccaaaaagacacttcttccttccacatccaccacacccgcgccccaattttggtgcggagggcggggtgggctgctgcaagcgaccctaggaaagactcagagggtaagaaagcccgcggcgggcctcgacttacccaagagcggcagcgcgaagtacagggtcgccaggaacatggtgccggcgcggggctggtccccgcccccccaaaaaaatcccgagccgccgctgggtcttgccgagggagctcagcgtgcagcgatccccggacagctgtgctgctctggccgcccaaagttcagctccatccagtgaaagaggaaactccgggtctggcagcagccaccgccgccggcgactcagctccgggatggcgagggcgggaggcggttccgcttttaggggttcaggtccgacccaacctggaagggagggcgcgctttgagatgagagcggagagcgccggagactccccccacagaaccctctcccctcccccgttcccgcctttggggaatttccaacaccggggtgaggacccacccccacccaggtcggggtgcatgtgcgtgttttccaggggccgctgacacggggatggaggtgagggctggagaggtctgaagagggttcctaaagtccaagggggtgtctgttgggttcaacccgagacgctgaacgcaagcaaataaataaataaacggtactttccgagcgtcgcgagcggagcctgcagctgcctggagtccgagccctcggtggcggcggcggcagctccctagccagccctggcgccgaaagagccccttctcccgggaagttggcctccccctcctcgcgtcagccagcgagctcgctcagccgccggccctccccactccgatcgccaatccctagccccagtcgccgccctccttctccccgggactcgtctccctccagaggccgccaagccagggggaaccgatgtcccgactggggctgaaacccggttcctgcgcccctaccccctacccgccgcgcgtcctcggctccctcctgggcgtccgctcctctcacactctcgcccggtgcccaggactcgggcgcttccgcaccccagcccagggcgagcgcgccggcccgcagtcccggcgtgccccggcaggtgcagcccggcgccacgagcgccccccgggccctaaagttgggagacgccagcaaaaagaaaggggtggccggaggaggggggaagaaggagtggggaagagggacgggaagcggcaatgggttcccaaacagaacgaaaaaaactccaaatgccaccaacctggactcaaccgaccgcgtccagctgcggcgaggagccagtttgtttatttacttatttattctttcagggcaatggtgtccccgccccctccttccctttccgggctcactttatctgcgctaggaaaagaaaaaaaagaaaaaaaaatagatgcggtaatcttcgagagctcgaagggccgagttgggccaggacgatttccgagcagagccctcggctcggatgctcgttagggatgttagtggttattggaagcggcgcggagaatggcgtgttccgaggccagatttcttctggccagaggaccctcggcctgctcctgttcccgccgctccgcagctccagctccctcctaagctcgcccgccaggcagccgcagctgcacacgcccgcttgcggtgggacccgcggccggacccgtactcgcgcacaggacacgcagtgttctgcagccggccgcgggtgctgccagacacacacactctctctctctctctctctctctgtctctctctctctctctctctctcacacacacacacagacacacacacacacatacacgggcacaagggctctttcttcttagggcaatcgagccagacccttcttcggaacacaaagttttcccccacgtcactagtggctgtgattcaagacttggtgctttcaagacacactcagacccaggacgctggagcggcgatcctgggatgcgcccatccgttcgtccacgccagcgcgtgcacactcacactcacacgcacacatgcacacgcagtctctacctctctcctggagctccgacaaggagacaaaagcggagcccccagcccactgcatttaaacccggccagacctggctttagaaaatttataagctgacctccattttggctgtttcgagagtaaattaacaacaacaaaaaaagcctaacatgtacacagcccttcgccccaacccctgggaccgctggttcccagtcgtgctgctcaccccccgccccccacgcctgacacacgctccccttcccgcacgccggggggcgcccggggcaccgaagtctacactgggtcgggagaccggtctaggagccagccggcagtgctcgggatctttgctgatgtccaagttcatctctc

SEQ ID NO: 913693 - DNA, 4001 bp, Homo sapiens
aaacataagtaaaacaacctactaaccaattaagagaaggacatatgagagtcagagtcaaggaacaaactattttttagtagaacaggaaataaagcgacctttttaattttcagcgatgaattctttgcccaaccatccactgtaatgcaagaaacccatcccagagaacacagctgaagatggaggaacaaactaggtttaagtcccagtttgaccaatcaaaatagatgactgcaaaaattatgtgtaacacagaacggctgttaataactggacgtgattacagagtctgtgatggtttttacaaatgtagttttggcttaagatttataccagcatccagtgggaaaatttaaaagaatctacataacttttgggcaaaggaatagtgtcatccaaagaagacatgaatagctcttcaaggttatactgcattacaaagctaaaaggtattaaaagaagccaactatatgaatttcagctaatcataccaaatattactttccttcaacatgagatataaaaatattctaagttaacctattctatatgtcctactataatgcgtaaaggacatttagtctttcaaagtaaacaagtaaactcagttaccaaccaggtttcccttacattagactccctcgatggtgtcttcaaaagaaaagcatgctaaaaactggattatcttagctccagggcacattatactagatgggtggtcaaccagaagtcagcagacagtgtttctgtaatgctaaggtgaggtgactacaataggtcagaatgaaatgacgagtgtaaaccaactggggctaccagcccatctctgccaatgatttgtagtgaattctaggcaagtgatatacttctgggcccatttccccatctgtaacataaggattccgtgttcagactacagcgttgacccttagactacctgcttgaaagtgccccggatgcatcttaaaatgtaggctcctgggtctttctttgctcctaatgattctacccctaggaataagaccaagaacgtgtgttttaacgaacactccaaaagctaagaactattgctttaagatacccgagcgtcctccgagctctgcaactgaactattaagggtcttaaaattcggcacccggcctttgggaaaacacccagcgcttttggaactttcgtgccattacatcatctcaacctatggctgtcctgtatcttcctcagtactcagtccactggttggggccgaagaggtccagctcagagtgacctccatgtggcgtaacagcccagagtgggaatcccgcttctgacaggttagaagtgaccttgtgaggagtgtggatctctaagactcagatgtcgttgctataaaatggggaaaatactaccgaccctaatccaagggcttatgcctccgtgagcattgatgagtttgggtgcctggtccccgagaaagttcacccagcccgctagattcagatgagaacccggcagcaaacttccctgtcaacccacaacacctctgcccctgccccaggtgccgctaccagcgcagcggctgtacggcctcgccgcaaggatgactcagcaccttgttgcccgaggacagaagcacagctacactgagcccttgcccgcctgaccagggccttgtgccgccgccctctccaccaggtcacccacaggactgcgaccccaacgcgcaggccggccctgacgcagccagcagcaccgctgcttccagcccttccccccgcacccagcggtcccgtgagggcggctgtcaggaccaccggggatcccgggcgcccgccggccagccggagcagtacctcggtccccggtcaccttcgcctcgcagtttcccttccgggcccctagcgtcggcctcaaagagcacagttcctccggcgcactgcatgacgcaacatcgaaaggacgtaaatagtacgagcagccaatcacgggcaggcctctgtcggaaaagcggccacactgggggaggcggggttccgggttgaggaggcggggttccaaattggtggggcggggccagttgaggattgttgcagggaacgtcatagtcagcgtccattttgcgtgtgggcatgggagtcgtctcggccatctttgttttgggcagtggagctctgttttgcttttgttttagtcgtttcactcgccgcagctataagaattatgtaaaaattgaaagaaagtaatgttagagttaaaaattattccgtttattccgttcctttttgaaggcctttttgtcccttaatttatcgtgagataaatatcttttcaaatgtgtctgcttctgagccgagtcatccggtttctggggtctcatgccaaatgttagatggtgacatccagaaaagattttttctagatggttttttcattgctttgtgactttcccgcccacattttcaagtttcaccctaaacctgtgtaataggcctgataacagccgcctctgccttgcacccaggattgctctgaggactaagatgtttccattgcgcgtaatttgataggtgaagagctagttgtggaatacgcgagagagttactttctttttcactctccctctatttcaacagatatttactgaatgctcaacttcgtaccaagctctgttctagaaatatatacaaatgaatcagccgggcgtggtggctcaagcctgtaatcccagtactttgggaggccgcggcgggtggatcacttgaggttaggagttcgagaccagcctggccaacgtggggaaaccctgtctctactaaaaatacaaaaatttgccaggcgtgattggtgcctgtaatctaagctacttgggaagctaaggcaggagaatcacttgaacccaggaggcggaggttccagtgagcccagatcccgcaactgcactccagcctgggcgatagagggagactcagtctcaaaaaaaaaagaaaccaaaaaaacaaaaacaaaaaaacagcaaatgaattaaacccgtgtgtgctaccactattttaacaaaataaagtccttgctctgtggctttactttctggtagagacagaacatagaaaaaatataatgtgataacttaataccatgaagaaagagcagattaaaaccctgaaagggtgataaggtgattaacaacatgcaaaattcatgaacctttatctcctaagcagtagttaattgtgatttatgattcctaatcatgtaaaccttgacaaatataaagacttgccttctatgtggataataaaagagtctggcagcaacacaattcttatctctttacgctgaaaatggcaggaaaacactagagaaatctcacgaaactgaacagatcaagcatgatcagtttaatttttattttgatctatgcccaattttattagctagcaaataggttttctgtttggctccttcagtgatagtctttttttctagagcttctgttatcagcaaagagaaaggatttacaacacagtaccagaataaagatcttgaagtcaatgactcaagctttcttcaagattcctattaaagcttattctctccatattggaagaaaaatgtctgatttcatattttcctttctcaagtaaagggcttgtattgttgtttccacaggggtcaaatattttgaagcaggggaggaatctggtcatatcattgggaaatatatgctcttgtggcagtgtaggaagggagaggttccatggaccaggagaccaattaggaatttattgtagttgttcaaccaaaaggcaataaaggctggaattaagccagtagaaagacacagaggggtttatgacagagatatattgctgaagtggagtttgcaggattgaatggtcggtcaaatatagctgataagaatgaggaaggctccctgagtaatccttctgaactgggtggataattttatcattaatttagcaataggatacagggagagatacaagtgaggggaagtag

SEQ ID NO: 913694 - DNA, 4001 bp, Homo sapiens
tcgtgctatattgcccaggctggtcttgaactcctggcctcaagtgctcctgccgccttggcctcttgagtagctgggattacaggcatgagccaccacacctgtcagcttgtctttactcacagcatcaggtagttcatttgacaaatatttactgagcactgaacatccttgtttgtaagatgcttcaagatgagtagatttttaaaaagcattatattaaaagtgttttaatctgtctgctaattcagacttttggtaatgtctcctggactgataggtccagaaagaaagtttggctgagcaaattaatgatttaaataagatttaaattttcttcttaggagaataagccttttaaaagaggttggtgtatttctgtaactgccaattcgagctgctgatttcagtaaatcttacttatgacaacagtccagggatctctatttaatcacagggcttgtatttaatgttagtctacggcccttgaaattgaatttctttatgaacattccatttttcagattttttaatcattcagaattcctcttccccttttccagttattaggaatgaatggggcttgtctttcttcaatgtatcgtgaaggaatgacaccaagctagaaaaccaaaataactgtcaagccctattttcatggcaccggccaactgtttcgaaacatgtttaaaactcagccaaaataacttgtgaatattgtgttttgtgatgagagaaacatcgcctgacatcataaaaacaaaacaaaaataaatatgtaaagacagtcaaacaaagaataatatcattatgtgatgagtcattgagttgaacttttaacatcaagttggttttgtctaaatctacaaaataatgagccagaaaagtatcaactgcatctccggcatatattcatccttttctgacccccatacctctctgaaaatgtgagtcgtctgcattaaacaaaaatctattattttctttgttaaaaaaaataactaaacttgggatttggtttaaagtgcacaagagaaatggctactccttaaaaattaagcttccaggccaggcgtggtaactcacgcctgtaatcccagcactttgggaagccaaggcgggtggctcacgaggtcaggagatcgagaccatcctggctaacacggtgaaaccccgtctctactaaaaacacagaaaattagctgggcgtggtggcaggcgcctgtagtcccagctactcgggaggctgaggcaggagaatcacttgaacccgggaggcagaggttgcagtgagctgagattgcatcactgcactccagcctgggcaacagagtgagactctgtctccaaaaacaaaaaaaaaaaaccaagcttccagaataaaacctaaaggtatcaccttctgattaacatttgttgttctgttccttttcctggtaacgtagccacaccagggttgcacacaaacacccctccacctgctttggtctttggagtcagcaccccagtgtcagcacaggatgatctgtgagagaacaatgtcaaacgcaagactcccttacatgacggaggaaccgcggaaccattcaaagaaactagaagcctcagctctcttccctccagaaaggcacagccctttcttttgggagtgggtggactttcagcttggtgcttgcacactgaaaatgagtaaatacctggaccctttaaggactcaattccaccatggcagtggaaataaaaacagcgcaggagtttggagatggtcccaatactcacccaccatggtcacgttgcagtttaatgtgatgatgagaaaccctagcaagtccacgccttccatgcttccagaatgtcccaggctccaggctgcaggagacactggagggctgtgttctccaaggaggcggataaatgtcctttaactacataagacttaaaggtgtgagctggagataagaaagcaaaggtctgagccaggagtaggaggtgggtttttctgtctccaagttgagacggccctaagccgtttgcctctgaggcgaaacattcctgacaactgcagtgaccagcagagcaagcagcagtcatctcttattgtgggctattcttactcgcctgggatattcccggcctgtggcagcgctcatatgtccccaccaggacagccagatgcttcaggatataatagcagcaactacttttaacccaagaaagaaaacttctgctaactagccaagtaaatttctctattaaaaaggcatttcctccttgaaaacatttccacaaccacttcacttgtgcaagaagcccttaaagtgttcacgttttgtcttctcaatcaagcatgaatcgccatgccaccatcacacgaacccacaaggatctcgcccttattctgaattcctgtgtcattggtgcaggcagaaatctgaaactcagttgggtgtcccaactttagaccgtgacttggttattctcctgctgcttcctgtgcagtgagtgacaactcttcgcttggagacaaaagcctgggtgcaaagcccggggcagccccctactcactggggaagtcattggatccttccagatagcctcatcttgcaataaggagaatcatgccattccacttgccatttgtgggaggcttatgtgaaatgatggtgtagaataagagcaactggtgtgaagtgggtgtacgacaacccatatccgtgggatttcaatccctaattggcctctacgaccttcacagattacatcttccctttgtatctcccagccccatctagcctggagctgttcccattgaatctacttaataaatgtctgttaaatctgtcatgaaatatcacggtctggacctgctgacatcaatcacagttgcgtcaaaatcctatcgctgcagccaccttcatatctgggaagaacccatcctgcagggttggggatctatgatcagggtggaaattgtaaactttaaaaggaatgatttcaattttccatgaaagctattctttatatccccatcttttcttcatttctgatctattcttgactttagtaatatccctagaaagattcccagaagagtgcaacaaagctactttcatctttgctcacatgacatgctcccatccacggaaaacgttttgacccccttgaaaggaacagtggttttgctatattttagtcaaatgcttcgacatgagcaaggaaatttgagaaattgtagttaagtaaaaatattgaaatagtcacagggtgtaagtataaaataaaggagaatttgtctcctaatagactgctcatggtattggctttaaaaaaaaaatgaaatatcaggaaagcaattactgactcttgctgtgtgatagaaatagcccatcccaaatgtggaataaattagccctgcgcgaccatgagcaaatcactgcagcttttcatgcttcggttttctcatcagtgaagcagaaaaaaagaatgtgttcttcacccactcacagtgactgtgatatgcaaatgtgaccagagatgtgaaaatgattttgaaatgtaaagaatgacccagtgtcagtgacaggcgcttctcagggttggctcctctggtcccacccttcagggcatcttctgagcagcccatgcccacccatctcccttctcatcctggtcacctttgctcttcctccttgaagtctaccccatccccattccttgtcttttttctctttctctttttttcctctctcctgctaggtgacattttgctttacttggaaatctaactctggtcaggcgcggtggctcacgcctgtaaatcccagcactttgggaggctgaggtgggtggatcacctgaggtcaggagttcaagactagcctggccaacatggcgaaaccccatctctactaaaaatacaataattagccgggcatggtggtgggcacctgtagtcccagctacttgggaggctgagtcaggagaatcacttgaactcagga

SEQ ID NO: 913695 - DNA, 4001 bp, Homo sapiens
tcaatttagatcaacagggcaggtcacgggggctcaagcctgtaatcccgatactttacaaggccgaggcaggcgaatcacttgagctcaggagttccagagaccagcctgggcaacatgaggaaaccctgcctctacgaaaaatacacaaattagcccagcgtggtggaccgcacgtgtagtcccagatactcaggaggctgaggtgggaggatcgcttgaacccaggaggtagaggctgcagtgagccgagatcacgccactgcactcagcctgggcaacagagcaacagcctgtctcgaaaacaaacaaaacaaaatttagatcaataagcatttctggccggacgtggtagctcacacctgtaatcccaaccctttgggaggctgaggagggcagatcgctcgagtccagaaggtcgagacgaggctgggcaacatggcgagacctcgtctctataaaaaaaaataaaaattagacgggcgtggtggtgagcacctgtggtcccagctactcgggaggatgaggtgggtcgatcacttgagcctgggaggcggaggctgcagggagccgtgatcgctccactacactgcagcctgggtgacagagccagaccctgtctcaaaaacaaaacaaaacaaagctttttgcctgtgaattccatgaaccattctacttcctactgaaatactaagtgccaacatctactgagtgcttcctgcatactaggcattgtattatttgtattttacatacgtcatctcatttaaccctcacaacaaccctgaggtactaacaggtgctaatctatgtcaccgtcgggaaactgaggcttgggcatgaaacgtgcccaggggttacatggctactgagtggctgcggtgggactggatcccaggcaatccgacataagagttcccataacaaccgctaataatacaactaagagaacaactcagtccttggagtagtctacaatgtgaggtggtattatcacggagagtccacgtgcagacctttccctgcaggcacgcacgctagtaagcatttactcgtaagcatgcttgcagttcagagcttctagtccacccagaaaacgctttctatgcattcctctggatctccttttgtagtcttcccagggattgaagacctggacaccggcgccaaatctgaacagactctcactacaccagttcatggaacaggaaatctctgtctccggcaacaggttaagtctgaagactgaggctacctgctgtccaacaaactttaaaggctgacttcaaaaggcagccaggcctagctaatgcaacggggccttccctcgccgctcttcctgcgacaggggcgttcctgaagggaggctgaagagcaatgggccgacgccgagcctgccgctccctcccggcgggcacaggaaaggtggagcccgcagccgtgggtcccgctccgtggcgcggagggccggggtctcggcgccgccccgtcccccgccccgccactgcggcacggctgagtcaccaccgcctccgtcccgcggcggggccgcccaggccagaggccgggaaggtcgcgtcccccgggcttggacagccgtcggggtcggagccagggctggggccggggcttccaggcgagcctcgcgccctgctcgctgttccggggcggggaacctgcggctcgggccactcacgcggaggctcgggggagtctacgggtggcgccgggcccggtcccccgaggccgaagggagccgggcaccaagaagccaggctgggccacccgccgccccacaccggcccggtctcgcggccgctcccgctccggctcctcactcctaccgctcgccgccccgcttacttggctttgaggcgcagcagctcctcaaactgcccggctgagccgacctcctccacggccgctacagctgcctcagccgcccccgccgccatgctgccgccgccagacagaagcaatccagtgccggcggccggatgtgggcggggccacggggagctgagcggctgcgcgagggaaagccccgcccctgcctgcgctgaggctgccgagcctgagaaatcccaaaaggggcctcggcggcgggctctggatcccgctggggggctctgaccctgccaagtctgggcactccgctgcgggcctcctggctcccggggttcatggctgttatggttcctggctgtcggggctcctggctttcggggctccctggctgaaggggctcctggctgtaggggctcctggctatggaggttcccggttataagggcttctggatgtagtggattctggccgtcgaggtccctggctgtcggggctcctggccgtaatggcccctggctgtcgggacccctgggtgtcggggttcctggctgtcgggacccctgggtgtcggggttcctgactgtaggggctcctgggtgttagggttcctggctatagcaggggctcctgggtgtcggggttccttgctgtcagggctcctggtggtagaggcttcttgctgttggcttcctggctgtcggggtgactgggtgtcagggctcctggtgttagggttcctggcttcctggctgtagtaggggctcctgggtgtcggggttccttgctgtcagggctcctggtggtagaggcttctggctgttggggttcctgggtgccagggctcctgggtgtcagggttcctggctgtcaggacacctgactcctgaggctcctggcttttggggctccagaccttccttgcacttcctgtgtctcctgggtctgtaatagaaggggccggtggaggggtgggggtgagacatgtgagtgaaagtgaagtcagatgtgtacatttaggaagctgaaattatcaaaaatgaaattgcataaaggtgaggaagaactgggaggtctgggaacagaagtggtagatcttgaacttcaacacagacagggtgcttccaattcagtcctgggacctgaacccggagcccacagcatgtccctcctcccctggccctccgcgcgtgccgccactcattgcagccccacagagccatcacccattgtaacctcagaacagaaggggctgggtgggtccacagatccctgcactcctcccgtcttgcctccttggatgatccctggcttgtctttctcccttgggaatccccctgatgttggctctccatgtggtgtactctgtaccccacaccccatgcttcccacacaccttctggcctgagtaatctccatgcccccagtgacatcaacctccagggaaacctcaatagcaagcccagaaccctcccctgcatcccagagcctagcatccactaactttgaggaggggccatcttttattggatatccccaaaccacactgggccttccctccaaagtgcctctcctcttggttcccatctcagggaacaccatcgctcccacccagacacttggggctccttctgactggtccccctgctgtccctgggctttgaggccaagcccccacagagccttccctactagccaggtgttcccaggcctcctttgcttgcttctaccgtggcctgtctcatgttgtagaactgtgcttgtcctccattggcctgtgttcttaaagggcaggagctgatctgtgtctcagtgcctggatcagagtcagacacataggaggtactcagtccatgctaacagctgccagaggactgggctcactggattgcaaagacttcgtacgagaaaagtagcatatcattcatactttttatattgattacatgttgaaatgaggatatttggatatattcggttttctgaaatatattatttaaattggtctcttttacctttggctcctgagaaatgtctaatttcataggcaactttcattcgtggcccttgaattttcttgggcagcactactgtggtgtttaaaagccttttggagcctgtcacatgtatacctcacctggagaaatacatggtat

SEQ ID NO: 913696 - DNA, 4001 bp, Homo sapiens
aggcaaccagagctaggggataattaagctccaaagttaagtcctagaagtgggcggggtcaatgcaaatttagtaaatctttaaaaacaacctttgtcccccctgctgggaacaccagcaccgctcaagttttttccggtacagagaggatttctaaaaatcctcataagtcagcgggcataactgaaagaccacagaaccaggtttactgagacatgggtctagcccaacatcctctgtgcttctcagccaatccacctccaacaagactcctcgcctccctgggctctttattccatataatttttcttttttacagtagacaaaagtggtttgtcctttccattttatgttactaaagaggtatgatgcaatgtattggggggaaaaaagctcttatttgctcgaagaaagcaatctgactacagaggccaaatctacagacattaaatgatttaaaccacaggataacccagtgactaccaaacattatctgacccctttcttcacgtactatatttttcctgaagctcaaattcagggctagccaggaccagtacacacccccagagctatttcattccattggctggctggccatccgcagcctacaacctgtaaatttactgtcaggacgccaggtgtttatttgtcagagatattacattgcttgtgatttttttgtgtttttccttttttttggtataaaacagaacttgtcagaatgggaaaattacttaattgaaacgattaacgcgtgattagtaaattcctttggttaataaaactgtctagatttcaaacttagaagccaagtcattttctatgttcggatatcatctgtcactattggaacaggagtgaacaaataccagaaaataatttgacagcttgcatttaggggagactcacaaaagcccaagaacactgacgaggcattatcacacgggcaggtcattccctttcctagaagtgcatttcggcaggacccgccgtgtgtgacacagacaccgggaccaaaaggagaccggtgcagcgtctactctgcatgcaagatcagcatatacagaggcccggggtgacggcgcgggggagggggcaggccaatcgcatgatgattttaaggcggaaaaatcaccatccacagagccggccacatccgaggcggggtgacccgggcggggacccggcccgctccagctgggctgggctgggctgagcagcggccccgcaccggcaggaggccggaggggagggccgcaggggaggcagggagggcgggacggggcccggccgacgctcacctcccttgcagggcgtgcggtgctggctgtgctgggcccggtagccttcgatgacctcccaggagccgtcgtcgcgccggatggggaaggagagactcagcacatggttgcagggcttgatgatccgcaggatgccgcgcacccggttccgcttctgctcctcgctctcccgggtcctcaggtcctccaccagcttgtcctccacgatgctggcgccgcgatcgaagaagccctccaccatcttgaagaagttggggtcgtcctcgcggtcggccaccgcctcgctgtagtggcgccgggcggccaatgccagccccggctgcggggcggcggcgggctgtccccgggcccagcccagcaacgcggccgagtcggcggacgccgagcccagggcagcgggcccggcccgggacagcaacagcgcttcgcccaggtagcggtacatggccacaagcggaggggaggtgcgtgatggtcgcgaaacaggcgcgctttctcagactccccgcgactagggaggaagggtcccgcgcgggttgcccttttaagccgcagcttcctgcttgcccggctgtcccctcccctcgggcgctcgccacctaacggggaggacggacttcggggacagggcgccgcccagggcgccgggcctccgcctccgccgcggcctccccgggcctcgctggcggcagcgcgcgccggcggggcgtcgggggcgcgcaggcgcgggcgggctcggcgcgcacgctcgcgcgccagtggggaagggaggggaggggagaggaagggcggggaggagagtggaggggaacggacgggaggggcagggaggggaaggtcggggcgggtcggggcgggtcggggcgggcccacgggcggccggatttgcccggaggccgcacccgcctccggcggggctctcaggtatgtgcgccgcgggggtccctcaggggggttgggggtagcccagggaggtcggggtcgggggctggcctctgtagggcgctcagaggccgagtccccccgagcgccgcgtgggtgaggcttggcggtctggtcggggaccgggtcatgtgagtcacgggcgcccctcctttccgcccgcgcgccctcggaacgggcggcccaccctggcctgtcctctggcggcctcaggccggggccgggcgtgcaggggctgacacgtgggcaggaaagcgaggcagagccgccgccgcgtaaggccgggctgagggctcggcgtcaccagccagggctgcagagagcggcgtggcacccggagttggattatgcgtggctggcgtgagctggaagggagtcactcgcccacaagctctcaccacgcgagcttttattgtcccgttcaactgctccgcagtgtggagatcgcatagttacgcacgtcgtggttgtgtcgccccacagtactgactgcttcacctttgcagacagaggctccggcccggcgcggtggctcacgcctttagtcctagcactttgggaggtcgaggctggaggatggcttgagcccaggagttcgaggctgcagtgagctacgatagctccactgcaccccagcctgggcaacagagggagaccctatctccctctgaaatagtctaaaataaggaaactagaaatgcgataatgcccccaggaaattctttctcaggaatatatgtatttgttaaatggttcagtatatgatttattttttattttatttatttatttgagatggaatcttgctctgtcgcccaggcgggagtgtagtggcaccatctcggctcactgcagcttccacctccctgggttcgttctagcgattctcctgcctcagcctcggggtagctgggattacaggcccgcgccaccacgcccggctaatttttgcatttttagtagagacggggtttcgctgtgctggccaggctggtctccaacgcctgacctcaagtgatccgcccgcctaggcctcccagaatgctgggattacagacgtgagccaccgcgcctggcctcagtatatgatttataagctttatgctgtatgagggttcagttatgtatttatacatacttgataggaaatgctaaagttcacattcctatggatagcttttggtgcttttcaaactaacgaggctggcacggtggctcacgcctgtaatcccagcactttgggggccaaagcaggctgatcgcttgaggccaggagttcaagaccagcctgggctcgtctctataaaaagaaaataaaaaataaagctctaatgacagtcattaaaactagctgccaaacaccacattactagcgttagcggtctcagtgtacttgggtggttttaaaatgacacccattggacctgcaaaacgatggtgcttcccgatatgttcatgttattcatcttttagaatatggaagagaaagttcttagttctcgaaatattgtgtaaaatataaggtgacaacctggatctgttaaatgacattcatctaagtgtactctcaaagtcaaaattatcttttcatacaggtggaacttatattttaccttacttgctaaataagtcattgtcattaattgtatttgcactgtgtttttcagtgaaaaatgtactctgacctgaatcctgaattttccttgatggtcaaaagattaaggtatcaaatttccttttttctggatgtatta

SEQ ID NO: 913697 - DNA, 4001 bp, Homo sapiens
gacacaataggctaattggatgcaggaaaaaaaagcactggccaaagaggcagaagactcaagttcttatcccatccctgccaccttttagccatattttcctgaataagtctcagcacttcagttccatcatctgtaaaatgggataatgatgccttctttggctccttcacagggaccaggcaagtttctgaaccttagttgtctcatctgttaattgggcataataacaccatccttacccacttcatagggctgctctgaggcttgaaagagatcacttatgcgatagtgctttgtacacaggaaagcgcaatattttcagaggcgttatgagcagagcccctcccaggggagagtcacacatgtctcatagcagcctcctggaaacgctgtcttgacatagagatagaagcctgctggttggaatctgtgggccatggcagacatcctgggacagatgggcctgttggaatctgtcagatcacatcgcagaggcagctgccttctctgcccacgctgctggcccagccatgcccatgtagctgaagttccccttttctgtccaacacagcagcctctgctgcagtctggcagccctatctggaaggtaaccaactccttggtttctccctttgttcttcctgctgtcctccatgtctttggtgctttgtgagtactctgcattcctctactctagaaaccaagctcccagggtctgcccagggcttgccctcacaccaagtcctgaggggcaactctccgcctagctaaccttgtgccttgtcagaatgccaagcaatgccaagcaacagcaccttgttctgtggtggaaacttgagtggaataacaacagccacacttggtattaatgtcacactgctcaccaggatgcccagaagcactgcattgaatcattcacaggcctctgctctcccccagtgtatgccagctggattggaaatggggagacaccacaaaggaagtcaacatcagaactggggagaccctgatgtcctgagtttcgctccaaaaattcaaaggcaaaaactttccgctctgctgctgacatgctgtgtggagtagcaaattagtcctttcgttttccacacatcacctttatcatgtataaagtgggaacataaagagcccaatctccctcctgaaatgaggggggaaagggcaatccctaggggtagaggggggaatcctcgacctcaagcattataccaagattctgcccttagctaacaggccccgtggttcagccttcaagtgcttgaaggtgacacacctatcagtgcaccttgaagaaggcagaaactcccatcagatggaggggaaatctggacaccctgggacaaaaaaaaaaaaaaaactcgaatggggtaaaaaagcaagaagggtgatatgcaaaagtggagaccaaccatttgggttctcagcctgaggatgtctttgtcccctccctcccgcaaaggaaatgcggatgtagaggtaagtctgtcatcccttagccaagcttttgggttcagaagctgactgcatagcaacagcggacagccgccttccctcccctcacacacgcacacacacgcgtctccaaccctctaggaaagcggtttcaggacttgtgaagtccagggaaggggaaaccccagcctggggccctgaagcaaccctggcgctaatgccaacaagtgtcgcggacagcttgggggctcaggtggggcgaggggaagattgacacgcaagggggagatgagccctcactaagcccctacctcctccctccagacctgacctggggaatcaccccatcccacccccaactcccgcctcccactcctgcccagcccacccctagggcatttggtcccgcggcaatcgggcactgcctgcgggtggggcgctcgcccctacctcggtggccatgatccgggggcgctcggaggctgtcgcggggccgggcgaggggggtctccgcggtgctgaccccgggagcaggtgggcggcggcggtggcggcgagctggggcccggggcgctgtccgcagtgctgatgcgggcgccgcgggcccgggctcaggtgggccgggggcgggcgggcggctgggtccaggcaaggggcgcggcgctgtccgctgtgctgaggcaggcgccgggcccgggaggcgaggccgcgcccgaggctcctcacggcccgatcgcccgctgccgcggctcctgcaggcaacggccgggtttagctttggcggcggcggcggcggggatgggggcggccgggggaggaggggccaggagccgccgctggccgggagggggaagccgcggcccccagactccggcgccgccggagaggagccccgcccgggccacaggctcggctaccgccccgcgcgaggccccgcctccccttcctgccctccccctcgtgagagccccggagctctgcgctcgcttccgtggcccccgggacatccagcctgaaggacagtggggcaggaatttttccggggcaagacgcttcagcctgcaaggctgaccgctcccgagccgctcgcaggcccgcaggtgaggcctctctacctttccagccacccccagtgccccggctctacccctccctcgccccgcccccagcttcctctttagaataatttcttttctttctctcccttttcctctctgtgtgccccccccccatatacacacagtcaggcttgcacggacggcccctcttttcccctctcctttgcacttcctggaaccccactagctagacaaagatcctgccgaccgcagagaatcatttcctttctttaaatacgtgcccacatttcgttctcagccatagcctggggtcccttctttcaggcagctccagaattgaagccagtctctccttgctgctcttcctggacctggtccccaccctttactcttccctctctcctctgcaacccgagtttacatacacgcaccaccactaccaccaccactcaaaaaccacaagcagatggtgccaaaccggtatgctcactctccaaggatggcaggtctggctctggtgccaccttcgcacttttgacatcataaattccaactaaatgatctatttgtttaataaaaaggagaccaggtgcagtggctcacacctgtaatcccaacactttgggaggctgaggtgggaggattgcttgagcccaggagttcaagaccagcctgggcaagaccctgtctgcacaaaaaatgaaaacattagccgggcgttgtgatgtgtgcctgtggtcccagctactcagaaggctaaggcaggagaatcacttgaatccaagagttcaaggctgcagctagccatgattgtgccactgtactccagcctgggcaatagagcaagagcctgtctcttaaaaaaataaaaataaggccggaagcagtggctcatacctgtaatcccagcactttgggaggccgagacgggtggatcacctgagggcagaagttcaagaccagcctggccaacatgctgaaaccccatctccaccaaaaatacaaaaaaaaattagccaggcatggtggcacccgcctgtagtcccaggtactcaggaggctgaagcaggagaattgcttgaacccgggaggcaaaggttacagtgaactgagatcacaccattgcactccagcctgggcgacaagagcgaaactctgtctcaaaaaataaataaataaataaataaataaaatagacataaaaaaaaggaaacaccaacacaagtgcctttttacatacccataataccccttggtctctttgaggggtggtggggtgtgctcctctgcagctcactgctgcctgagagtctgaagcccacacacagggagaacctggcggccaagagacctggcccaggcttttccagctgtataacctcgagcaactgtcttgttttctgagcttatggttctctttctgtaaaatgtgagtgttggatttcacta

SEQ ID NO: 913698 - DNA, 4001 bp, Homo sapiens
atggtgtccattcaaattcaatttgaggcaatctttcaacatttctcccactcagttgcctgctaaaaacatcattttccctcaatgggccaaactatgtagtactgacttatcttaaaagctttatgatgaaaaatttcaaacctatacaaaagctgagagaataatataacgtatgcccatgtacccatcatccagcttcaacaaattacccgcttcaacaaaccatcacttttcaatggatttttccttacccctccccatactccttagtgaagacttttttttttttttgagaaagagtctcgctctgtcgcccagcctggagtgcaatggcacgatctcggctcactgcaacctccgtctcccgggtttaagcaattcttctgcctcagcctcccgagtacctgggactataggcggccaacaccacgcccggatacttttttgtatttttagtagagatggggtttcaccgtgttagccacgatggtctcatctcctgacctcgtgatccgcccgtctcagcctcccaaagtgctgggattacaggcctgagccaccgcgcccggccgactttttttttttttttttaacaaatgctatgcacagacaaaacgttatctatgagaaacctgattctgagcgtccttcatgtcacactctgctacaaaatgattccaccttctctttccacaatttctagtccttttattctaagtctattacctagcataagactttatcctacccattttcatctctctggctggtctttgcacgtggcaaaatccaaatggagaaaataagtgtctgtggggcttcaaacatccaaatgatagtgagaagaataacaaattcatcagagagggttaggggtaaaaaatttgagaggcactccaatataaatcttcttggcagatggggaaactgaggcccatgctctgagctgtccaaggtacagaagagaatcacttgaatcaagaaatgaagataggatgtgtggaaagtaagcttctaccatccatacttctctccactcctttccaccatctctacccattcctaccacatctgtgacggccagaaccatctccccagaccccccgggggcagcattaacctgtctcaaagcattgtgtaacaccagcagatttttaaatccttaagggcaaaatcaagcctcagtctccccctacaaagcttaataaggtggctgattgatactcggtggtcactcaaatatttaccgactcagaacagagctttctagcgttaaaagttctcctttacccatttcctagcaaccagaaccctaagcctatcaggcttcctatttttctacctctctctacaagctccggcagcctcatttcttaggaggatgcagtataaagaaggcagaatggggaatcggaaagactgagtttgtgtcttggctgctacacctggtttgtgcggcctcggacacatcgcccctttccagggactccacacctgcatctgtaaaatgggcaggttttaggaagccttcgtggatccagcctcctctccggcgccgccctcttcaggcagcgccacactgggcctcggcttctcccacagtctccacgacctgggttgggtccgctccactccccgagctgctcacactccagagcactacatccttacctcccactcccaggttgaccttgcgggggtccggatcctccctgaagtcggcagtgagcttgaagaccaggacaggctgggcctgcggaacctcggcaaagactgacggaggtgccatatcgagagactaggaatcaagagatttcaccccacgcccggagctggcaggtcaggtctggccgttgcgactggaggagacactcaccttcacctagccggcgggggcgggcccgcggcctccaatggtcgagccgcgtccaaagcttggcaacgcgattaaccaatcgccagcttctgacgacgaaggcacaggggagaaggaacgctattagccaatccaagaaaacaatttatcggctgccgagaatgatgcaaccaatgcaatttcctccggctgaggcgtgggcgaagactacggttgattggtagagcgtgctcctatcgcagaggctgttattccttgggtctcccggctgaggggaggagccgagcgagcggcgggtgtccctgagaggccacctttcgaccttcgagggccaggaggatacggggaggtggccggagggagttcccgaacacaggtcttcctgttcccgccgagcaggtgttggcggtgccaggcccggcctggcgggcccgggctggcagccaaatacccagcgtctgtgctcgggacgggagtgttcgtccaggacgtgcagctccggagcctgcgcgggcgaccttgaccacctttgtcggctgtttccccctgagggaagtatacctgtcctgccagccttggtctctggcagggaaggtccttccaacagagaggggtgcgcacgaattcctttttgccgctcttctattaatagtttgagattttcctccccgattccttgcagagagggcctggtcctcaaggacctcgggatctgggcgcgacgtcccttcccagcttcctcccgcgcgcaccggaccagatcttgctgtcgtcagctggctggtacccaaagttcctcttcgtcaggctgttccttccccgttagagtccttcctccccaggagccctctccatctgctgaccttcaagacccagagcgaatgccacttcatccatgaagccttcccttaacccttatctggccaaaatgtctctttcctgtgcttctgtactttcacaattttagaaaatgcctttgtggttaaaaacctatctccgggaccggactatctaggtttagattctggctgccgcttacgaatttgggcaggtttagtcaagttattttaacctctctgtggaagttcctgctctgtggaaataatagtattttcctcagagttggtgtggggagtttgtgagttaatacatttacgaagtggttagttgcatgtaagaaggactctctaaatgtcagctattattaacattgcatatctgccacacccttcatagatggtaaactgcttttttttttttttttacttttattttaggttcgggatacatgcacaggtttgttttatagataaattgcttgtcatgtgggtttgttgtacaaattattttgtcacccagatagtaagcatagtacttgacaggtattttttctgatcctctccctcctcccaccctctagcctcaagtaggtcccagtgtctgttgttctcttctttgtgtccatgtgttctcaatgtttagctcccacttacaagtcagaacatgcagtatttggttttctcttccgcattagttcacttaggataaaggcctccagctccatccatgttgctacaaaggacatgatctctttcttttttatggctgcatagtagtccatggtgtatatgtaccgtattttcttcagtctactggtgatgggcatttaggttgatgccatgtctttacgattgtgaatagtgctgcagtgaacatacatgtacatatatctttatggtagaatgatttatattcttttgggtatagacccaatactgggattgttgggtcgaatggtaattctgttttaagttctttgagaaatcgccacactgctttccgcggttactgaactaatttacattcccaccagcattgtataagcattcccttttctccacaacctcaccagaaaccagcatctgttatttcttgacttttattaatagccattctgactggtgtgagatgatatctcattgtagttttgatttgggtttctctagtgattagtgatgttgagtattttatatgcttgttggccatgtagcttcttttggctagggacctgtgagtctccctaggtttcttgcacttactaagccttcaacaaatggtagaa

SEQ ID NO: 913699 - DNA, 4001 bp, Homo sapiens
tccatgtcacaaagtgtaattcccaaatcatgtgctataaaaaataggtaccatttaaattaacaaggaatcgagagagtaaatactagaactcaaaattctgatttctacattactttgctccacaatgggatatcacatgaactgacagacttctaccatgttgagtcacaaggtaaaaactgactttgatgtgtttatatgaacacagttaggcttccctgactagaaaaaaaaaaaatcagcatttgtattctaagacttcctgaatatataaggatacaacattgtatcctttgtatccacacaaaatagctatgaatagtatccaaacaaaacatagtatgcaaacaaaatagtatccaaacaaaatagctatgaattgtatccaaacaaaatagctatgaatagtcatttgcaaatgaaaataagagcttattcttatttcatttttgttaattgaatagttcctggcagaaggaaggcatgtttatttaattaaggcaattagggcaccccttaagttcccgtacttaaattaagatcttaattttcttgtgatgtcctaaaagaacattttcacttttaatacaaaggtaatacaaagctacaaagctctgaaagaaaagcacactattttgaaatatctgatgtataagttttcatccttttcgataagcttttttctaccctaaggaaaaagattcactaagagtaaactcctagaatagatattaatccaaaatataaaaactttcaaacataatctctagcctcacattatttttgcttttggctgtttctcacctggcctaaaattattcctttaaaatcctgaaaggtcatgtctagattaacagtgttcctttggaaggcatattccaatttctttacaatccccacatgggttggctacagtcactgttattctcggcataaccacctatgtccttaaaaatttaacataagtacaatctaacataacaggctaggggagagaataaaccaatgcacctgggatgaaagttcttctgtttcataacataaaacttcaggactcagctatcagtttcgggtgcagaatgtccatacaacaggggagccgctgctgcctgagaaaatgaagtgaagagaggatgaggagaggacaaagaggctcgtttgtgccaacaggaggtccacgttttgcacttcctccctccgcacagttcgctctaggtcaaggagtaataaagaagcaatatcccagaggcaccagccagcagcatgcgctgagagaagctgactagaggatctgaaaaggacagaggctggaagaccagctgtgaggtttaaatcttccactgcttaccatctgtgtgattttttattaccataagttggttaacttctatgccttagttttcccatctggaaaatgggcagaatgatagctcttaacctcctggattgttgagaggacggaataatataaacaaagggtctaccacagtgtgtaacacacagtgagcgctcagtccaatcaatggtaacgctgtcattaattatctccagcataccggctgctctcagagtaccccttactgcctcaatgttccctagggacccaggcgggctggctggcggcgcctccgcgcgtgcagatacttaggggactgagtccataaggactccttccaacccaggggaacccatgccccagcgcagtctccccaggagagatgaatcctgatccccacccctgcacgagcccgaccgatttctcagggagaagaccggagctcgggtgtcagggaataggggacacgactgccccagcaacttgcaggagtcgcaccacctccatgcacttgtcccggcgctcccggcccgagtagcctcccgcagcccacacctgccctggcagttcgcaccctagcagctccagcttcggctgctgcagaagcccgcacttccagtcccggccaatgccagctgcagtggcgcaccctgatgacgcaaccggcgcgtggcattgacgcggggccgccggctagccagcgccgggggcggggcccggcctgcgagcctcagggagcgtgagcggatccgagggtgtaatgtgtgtactcgagtgtgcgtgcctgtgtgtggctaaagatagtgtgtgagcgcctggacagatggttaccctgcctaggccatgcgtgtgtgagtgtgtgtgggtacctcattctgctttgtgtaaattcagcttatccgggagcttgtccctcttccaggctctgttgggaatgtgcgcgtgggctatcaggttatgtgtgtggtctgactttttatgagatctgtaagactatgtaggatttactacgaatgggagaggcagggattgcaaatggccatgttgtgtaatttctaccaaagtggctgagtgccttttcctttaaggaggaaaatgagatatgaaaagaagcaaataaggcttgtagtataaaaagcctcagttaggagaaataagggcttttttcccccttcggactatatgttacacagcatggtgaatatagtaaataataatgtattatacagttcaaaatcgctaagagtacatttcaaaagttctcaccatgaaaactgagaagtatttgaggtggatatgtcaattagcttgattcagttattccacattgtattcataagtcataacatcgatttgtaccccctaaatatatgcaactatttagatagtttaaaatttatagcaatccagtctagccagctaagatggagcaacaggactgaatttactctcctgcctaaaacaactaaaaacaaaaacaaacaggcatttataagacaatggcttttaaacgttgtgctggacagtggtccttgaggagggaaaacaaatgaggtgagccctatgattgccttgatttactaactagagggagcagccaaaaagagctaggcagactccctgagttgaagagatagaactgggagagcagggaggccaaagcagctggaactgtgagttgtatatcagaaaggagaaagctacacagagaaagaaggagctgtggagatctacaacagatctcactccagtcttccgctgattagagcatgtgtgtgaggaagctacctaagggcaggaaataatcatgtatgaagaaaagagagagcaattactaaagtttgcacagggtaggaaattaattctgctcccacaaggcagagtagaaagatacccagtgattatacaggaccagaaatagtgcctgatcctggcaccccgactggaaaacctcataattcacaactcaaatggttttgcttcagtagtggggcaaaattagctctaatgtaaaagctactctgattctatcttagaaatcttaaaagccagccaccaaaggattaaaccgtttttgagaacaaagtgtcccagagcaaagcacaagaatatttacaggaaattaaaaataaccaacacctaacaaggtaaaatttgcaacatctggaatccaaacagaattatcaggcatgcgaaaagaagcaggaaatgagaaaaaaaaatcaaccaattgaaatcatcccagaaatgacagagatgataaaataagagaacaaggacattaagaaagtaattatgactgtattcaatgttttcaacaagtagaaaaaataaactgagcatgggaagtagagatgtgaaaaatctttaaaaaaaaaaaagacacaaaccaaacatctaggagataataaaaccacatctaagatttttaacaccctaacacacacacacagacacacacacacacacacacacacacacacacacacacacacacaggattaataggttagacattactaaaaaagaaacagtaaaaaacctgacgggaggctgaggcaggagaatggcgtgaacccaggaggcagagcttgcagtgagccaagattgtgccactgcactccagcttgggtgacagagcgagactctgtctcaaaaacaa

SEQ ID NO: 913700 - DNA, 4001 bp, Homo sapiens
ggctgcgctgggtgtggtacctgcggggcaacagcgatggttcctgaggctggtgggagcctgggggcaggcaggagccctggggctggcctgctgccccctgaggtgctgctggtgctggagacgcaaccttgtcaggtgtctgaaaggtaagtgcggagacctcagccagcctcagaggtgaagcagccactggaagacgatactgaatgttggcaaaggcatctctcttgcttggacatttcgaacggaacaagaagaaaatgagcaagtgactcagaccgatggctccttatgcagcgaacactgggtctgctccgaagcacgccagccggcgtctgtggcggccgcacattctagaggccattggcattctctgcacgtgccctgggtcctcaccgcctgtcagctgtcccttaccagcacacacaatgcattgttcactcagctgtcagcccttccggaacccagacattcagcaactgcagcaaaagcttgctggtgcctcagggagggacccacgatgggctcggctagccgatccagccagctgccagccacgagccccttcccgctgaaacacccttcccgtgcctgccgtgtgcgcggccgccttctctccgccacagcctccactgctgaagcccacctacgtctgtccgcactgcctttcatcaactttctaatgggaaggggccggcagggtggcgtggaggaggccggtgaccagggtggaggggcttggggtggcagggaccccagcccaggcacagaccaggttttcacagggcacggatgccagctttgcgggagggacgtcgcctccattgattaaatgattccacattgccatatgcctgcaactcattagtatgatcagcacccagcacgcggggagcagaggtgcccagacacgcggcctgtccccggcccccactccacagagcctcccaccccggcactgagcccggaagcccggtcaccagctcgccattccacaacttttccagcctgggagtccccatacgggtggccgcccccccgcagcggcctagcccccagctgcaggacccccgggacccccgtactcaccatgagcgctgcaaagttgcggaagcgtgagcgccgctggaggaggcgtccagggggaggcgatcaggtggcgccctgctccccgccagcctccatggcctctggaaggtcaaagtcccagacggcggccaggaggtcgcgctcccgggcccctggcctcagggtgaccgcggcggggcgggcgcagtccgggagctgctcccatctgtgaagacagcggcggtcagcggggcgggcggagggtccccgcggagggcagctcgcagccccgaccccgccagggagcagccgcggcccctgtcgctccctcccctccgcgggcggcctgggggctgcgcctggggctggcggaggcggtgccggtggggaccggtggggggctcggaccgaacgcgccagcggcagatgcgtctccttctccatatttaaaaatcaatctgcgccccactcccggctccggagccaaactcaaccatctcgggctgcacaaagccagaggcgcgccggggggtttgcaccgggaaccggcaccgagtgacccgcccgccccagcccggccgcggcgcctgctctgcctggatgtggctcgagctccgggccgggcgcgcggggcgggggccctggattatccgtggcgcctcccgccccagcggagccgaaagttactcggagctgctttcctcgcggccagtgtcacctcggggcgcgagcttttctgccgagccgcggccccgcgcgtccctcccgccgcccagacccgcgcgtccttcccacctgctgtggccgaagcggctgccggggcggccgggccgcgctcccggagacagacgcgctgcgctccccccgccggggacccgctctccattcgcgagggcagcggccgagctgggaccgagttatcaacagattgcggggctgcggcgccggccggtgagtcacagccccgcgcacgagcggcccagcccggccagcagcgccgccgcctctgcgcgcacctcccgcggcgacagcggggacccggggccggaggcaggcgcgtaaccatggggaccggggcgggcgatggcggcgggcgggctcctgccgcagggtggggatggctcttccagccgggcggccgccgtcacactgcagagcgtatttaaagagacacctcgctccgcgctcgctccccagcaccagaccctcgcccgaaaacgccgccgggcggactgcacgaccctgtgttattcccaaagacaatctccatccgtggagaagctgcaggaacagaaatatacacaagaaaatggatttggaaggaattttccatcctttatttaacattctcaagtccagatatgccagaaccgaggtgcacctgtcgtgaacccgtctgagtgtgagtcagcagggcagccgcagccggtgtagacagacagggcctgtggctgtgcagaaagcgtccctgtccccctaccccaaccctcctgcatcctgggccacagagctgggcatccagagccaaggcgagtgtggaggccagggtgccaggggcggcgcagcccagcctcccacccgcagcgaggtttgggctctgcacacatcccacaggtccctatcctgccccaaggggcctcctacccgacaaggtgggtccaagtccactccagttttcgtcacaaactccgttttctggggcacgtgctggcctggtggcagcctcagcaagagtctcaggaactgccctgggggactccacacccctccacctgttccccctttggccctgggtgaccccacacccctccacctgttccccctttggccctgggtgaccccacacccctccacctgttccctccttggcctccacccttgcatggctacttctgccccaggttctgtgacactggcgcctgttcagggggtccccaggccctgctgccatggattttgaggggcctgaaggatgtactattgggaggttgtcatgaagactcacagaggcagaattagatgcaggggtgacagcgttccgcttccccggcctctcattatggggcttttgagcgggatgtgctcagggccccactgccccatctagctggtgttcccagagcccctctgtggggacactgtgctggtccctgaactccagctgagggacacagggtccaggcaggcgacggtctagttcccagctggagacgctctaggcaccccaggacctggccgccctgactccctggacaccgttcccttggagcctcggagccccccctggtgtcccctgggtgatggtcctggacaagagggctgggaagaagcgggcagcaaggggaggattctgccccagacgtccccaggccgggggtccccatgggctctgccctgacgtcttactcctgcacccagcggctcccaccacagagactgctccaggtgagggtaccacactgagcacaggtcagcctgtgtctcccgggaggctcctggcacatcacagttggggcccagaggaggccccggccggtggggggagtggccctggcttgtctctttccctgcacacggactggagccctgccctgagtcccacggggactttgcgggggaacttctcgaaggtgctgtgggggcagagggaggtggtggagccagccaggctctgggaggccccagagaagctcccactgcccacctcagtcctagctggttttgggccctgggctgggcccccacaggctccaaagggaaaggttgtccaagggaaagccctggaggccgctggtatccgggtaggacacacagaaggctaccaggtgctgtgggggccctggggtccggcacttgaggcagacaggtccactggcttgcgaatgtcctgctgcccccgcacgtggtggtcaggacccgggagggctgcc

SEQ ID NO: 913701 - DNA, 4001 bp, Homo sapiens
gcaccacccagccctggttgctaagtggcaacgtgtctgcgtggatctgaaaatcaaacagtgtcagaaaatgctccgggtgcaaatgagtgctgtttgctggaacaatacaggacgtggctgtatctgccttgaaatgaattcttcagaccgttttggacgggacagtgccggacagcccttccgaggaagcaggtgtccgtgcgccagcaccgggtcacgtctcccatgcaaccggatgaatgtcctccaagaccccctgggaccgctggccacagagcagcctctggcgggggtgcctcacacagggtgctactctgggcaggcattcagggagccccagggaaccccagaggatgggccaggtaggcacccaaggcctcgaggccacgctccgagcctggctttcgccaactgtgtctgggattcagtctcagttcagaaaaggaaacaccaaaggcgctggagctccctggcgagctccggcctggtcacggccgcggccagacccccgtctaaagcagctgtcccagctccctgacccggctttttcctgctggtgcagaggagctcctgccacctcccagacgtggacgtctgggttcccctggctctggactgagggagagagggagggaggtctgtgccatcatgggctgtgtccgcccccctaggcaggcccatggttcccacaaaggccacggtgcattcccagcctgaggatggatggggaccaacagctggtgcaggccgccggggcggcgggggagggcgagtgtcccatcccagcaaccgggcctcacacagcagagacactgggggaccacacctgcctcctggcctgaagggcccaggccagggccaccttgaaatgagtgcctgagtgtgtgaggttttccacccgctgacagtcagctgcctgatgttacggagaccatgaagccgaagccaaaaccaccagagcccgtttccccagtgtggctgccctgcggggcatagagggtctcacgccagcaactcggtagcacaggaggcttgtccagcccccaacacacgccagccccagaccagccccagagcagccgggctccagctgcagatgtggagggcagggcaccgcctgcctcagactccacccgggaccctccaccctcagggccccctctgccccacccccagtgaccggcgcccctcccctccggcgcccctcccctccagcacaccaccctaccctcagatccgtcgcccgctctccaccctccctgggaacactgaccctcccccatggaccggatcatcctcaggcccctggtggcctggtgagaaggtttgccaagacccagaaggtgcatgcagcgtccagggcccaggtggcggggcctcgcgcccatgtgcactcagtacctgagcaggggctgcctggggtacggtggctggtctgtgtccaggcacagaggggccttcttggtcacctgcttgtagatgttcctggcggtcactcctatccacagcatggtggacagtgtagaatagtgcagcacgatgcccacctgtgggggagcagcggtcagccaggcccttggcgggcacccaccccccagagcccagcagcctcggcccgggcttgcaacttcaagaatgagaacggcaggcggccagcagcgtctgtatcccagggcaggcagcggccgccccacagccgcccagaactcacagggagacgctgagctgcagagacccttgagcggctcagctttcctccccttctgcacagagacgggagcagggagtctgtggggacccatgggcctgtgcactcacgcccctctgcatgcacaacccgctgtggtccctgtggcccaggcacggacactgtgagctgcagaccaacgtcccctgagctcagacctggataggtgtccaccaagggagaggaggtgaagtcctcagtggggtcacgccaggatgctcttactgtgggtaggatgagccccccacggggacggcattcgtgtggccctgcaggtcgccgttcctcattcaccaggatgctcttactgtgggtgggatgagccccccacggggccggcattcgtgtggccctgcaggtcgccgttcctcattgctatggaaacttcctgcgtttgcttattacgagggccacactgctacctttggagtaataacctgacattttgaaatgacaggtaaaatactgctataattggaaaggacataaatgtttaaggaatacagagattcgccgcataaagctaacgtcgcaccattatgatgatttatcagatccagagctcaattttcactgatgaggaggctctgcagtaattgatgagaatattgtggggtgggctggaaagatcggagggctgcgtttgcagtttcaggtgagatccctgtgcgccgctgggggcaggagacacagcagcccccggggggctccaccctttcccccggcctggccactgagtgtggggtcgtgtcccatcccagtgcctaggcctcatgcagcctggtggagacagggaggcctggaaaccatggggcaccgtgtcgaggagtagggcagaggcagcccccacagcccggcctcgggttctttcttttcaggaagcagccgtggggctgtcagtgtcactgcccggggcgctgaggagggtggcagagctgagcctcacccgtgccatgtgcatttgggggtcacaagaaggtgtacgtggcagagctctgagtcctggacaccgacttcaggctggacagatggagaggctgcagggaagccaccagcgtcccacggtgctgcacggctgccccaccccgccggacccagggccagcgcctgtctctgttgaatgtgtcacttagcatgcgaatggggctcacggccatctctttgttgccatagcaacagtccgtcctctccagccatccagagcctgggaccaggtttcactcagtgctgagctgtggccccggtgggcggggcaggcgggcaggaaggtgggtgtgacaagggcggggcaggcgggaaggcggatcagccaccactggcccatatgcaggcaggttgggctccaagtctagtttttactagaccctcaggtctccttcctccagccggtagtggctgaattctcctccttacccggaggcgggaatgcggaactggcctggcctcagcgttagatcaatgagagggcttctgttcgcctcgcagagcacggggagcagacagttcatcggggagctcggagaacgtcgccttgtgggctccccgagtggctctggagctgcagccactgcggcccctgcctccgcttcccgagcctggcgtcacgcgtccggcaggcacctcccaccacctgccgtgggaaaatgctcccacggttcattttccacacttgcgtcctgttctggaacgcggcttcacagtgagaccatgtgggtttgtctctggcagtgccctagtgcccacagcatggcctggcaccttgcaggccctcagcacatttgctgagtgagcgagtgagtggatcgtgctccctgggagatcaggacagcatctggagataggccacaatcttttctgctcatttcctcctgatggctgttgccttaacaagatctcctccaagattgcaaccctctggaaccttccagacctgcctgctgcagccccaacaccccagcatccgccccgagctgtcaccgcaggcctgggccccaggagctccgtccaggcaagcagtggcaggtgttcccgaaggcgcgggcggggtttgctgaaggccctcggggggcctcacccgcggatccagcaggcttcatcccagtgtggggcgtacttggtggcaaagtgcagacgtgatggtgacggcctctcgcaggcacttacaggcgggacgtcaatggcgtttcccgggcacttgctgtggttgtttccagcttaccagaggaatgattaaggaggcaggaggtacgtc

SEQ ID NO: 913702 - DNA, 4001 bp, Homo sapiens
tctcagttcatcttgggccctctcctaagccctctttggtgtaactactctttcagttccttcctcacatctactcttaaaggttgcttctagaaattccccgcctcaaaggtcaggcacttcccaggcagaagttaaaacctgttaatttgcaaattctctgcttccctcaaatgctatagtttgagacaggaagtacagactcccttaagtttcctccagcctccttgagtgaattcagtcacaactgatgcctccctcccgaatataactaggtccttttataaatcatgtgagtgtgtgaagggctggagaacccttaagtatgcctaagacagggaagaggaggaaaaggccaccgaggaaggaaagatcaattgcggggagaggggagaccggtagaaggagcaccctgaccaagctgcaaagtctggatcccagagacagctagctgctgggactgactcactgctgaggggccggaactgcgaggagatggcacagttttaattataagctctgactaacaacagaccggtgcccccaactgcacacgtaggaagcaggcagaggctaccccaaagtggcagaaacaaggaactctctgttcctcctgctcccttttcgcctctcatctgaggcttgccactccgcggacacacccggcgctcgccaagttgtcgcatcgccccccggtggggaacgcccctccctgctctccggacaattggagggaagcacagagcagcgggggtgtctccgtcctgccaagggctgcctgtccctcgcccagtgcggggaaactggtccgagagaatgaatggctttcgccgagcgccggaagctgacgggcgtggggcgcttcttgcccccaagcacccgcgcccgcgtggggtgtccctcagcccgggtctctactctgagggtgagaagcgttcgcgtcacagccaagggttccttcctcacacgtgcacccacccacaagaccggaaggaaagcttcgcttttgccttcccccctgccccccggccctccctacctgaattccgggaccaggttaggctgcaacccgtagatggcagaggaaagagtaaccagccacccgggcttgtaactcccgttctcgcactccagataaggcggagaccacttgaagtggctcttgtccccgccgagcccgtccttgcgccgccagctgtggcccaggccccggggcccctgattggggccgcggcggtgtaagtggggcctccacttgcgccggaggccgtggaaccactcggtctccagagtggcgttggccaggtggggtgcggaggaggacaggtcttggagcaggatgcggctctcctcgcgcgtggcctggaggaagacctgtggggccggtgcggacagcgaatcggtgctgaaggtgatggccgcccgggagatgctgggctcgccctccagaaggctccacaccagcgcctggtaccaatccaggtcgtcctgcaagttctgctcccgcgacttattgctctgcagcatcacgttgaggaagttggtggcgtgtgtcagtgtgtccagcgcccggtgcaaggaggggtgcgcgctggccagggctggccacttccccggcaggcccgccaactcgtagcggccggagcagttggctcgcttcagctggtgggagtccccggtgtagaggtaagaggccacgtccatgggcacctcctcggcgagtttctgcgccaagatggtgccatcggtggagcggctccagggagccgaggagtccgaggcagaggctcgacccggctgctgggcgtgcggcttccccttcggggtcctctctcgaggggaatccggccgtccttgggggtcgcggctggcgccaacagctcccaatcccagctgagcaagcaggaggcagaggagtaaggggtaagccatggctcccatctgcctcccagagagaagaggagggaacgggaggggggggaatcactttttaaatttggatcgtcagtttctcaacagtcagactttttcgaggagtcttcccccttctccagatggcacccagtccaaaggacttgaaaataagaatgtttcgagattggccccgggtggctaagctaccgtcgcagaaatcaagtcacctgtggcagcgctggccgtgcccgctgcgcgaggggccggctggggattacgcacctcgcagcctggagccgagcgggttacatggcctcgcgctcccagcggctggagtcagcccgagtccgtctctcggcccggctgccgccaccgccgctctcattgaggcgcgttcagaagctgctgctgctgctgccgccgcggccgccgaagacgctgctccatagtctcacccgccgcaggtcgttcccgcctcccggcactggctcctcctcgaccgcttcgcccggaggcgcggggcgcgcgcccagacccgcaccgcgagcgcagccgcgactcccgaggagcgaagacgtcctttaagacgttcgtctgtccggagtagcgaaggccgggcggctggttaattgcagcctttaggtttggccgcaaaccacactccaccctctctccctgctccctcctcgggggaggaaagccagtttaaagaggcagcttggccgcaaccaaacccttgtagggcggctgcaagtcgtcttgttccctgtttggtcggctcctctgtcaatcagccgactgccatttgtggggccggggagggagctgtccagtgctgaacccgaggcggcccgcgggcggcgggggcgcgggaggcagcctgccgagtcctcgcacccactcgcgttccggatgactcggaaacctgcgtgggtggcgtagggtgggcggcagaggggggagaagcagagattcggtggctcagagcgaaggaaacttggacgtactgagggggagggtgttggcgtcttgcatgcttagttaaatcagccttttgcctggaaaagagggagaagggagtagttttcatttctaggtgaaattagacagaagggacataggatggagacgtgtcctcctgagcatctgctcattttaggcaaattatcaaatcatctttcttgttgtcagttaaagaaatgattaaaacatacttgtctaggctcatcttagctgagggagtaatggagaaatctaccagctgtgctttaaggagagaaaaaaaagtcatatttaaggaatctctgcttgggggccagaatggaggggaacgtgtaaaaatgtatgcaagtaaagatgtgtaagggagagagcaagggggaggactcatgagctctgggagaatgagaaggagcctgtgttgagtgagaagggaaatcatcctgactgggagttcctggaattgagagataagaactaagacttctatttagctaaaggttgggatatcccagcagaagaaagaagaactgagcaagtatgccaagtcccccaaattattggtaaatttcttaacacaatctaattgatgttttgacgcttattagagaatttaagtgtcttctgacactccaaaagtagactggtaccagaaaagtagtgttttgcacagctagctccactttccatatgcacctctattttcaaattccccaagaaagacacaaatagaaaatatccaacttactttaattcccaactaacaaaaatgtccctcatggcattctaagcaggcactgcttagattcactgtactatttcatgtcatccttcctattgagaaaatacttaaggactggaatgtaagctccaaaagagcaaaaatctttgtctgcattggtcactgaggtaccttgagcacccagaacactacctggcacatagtaggctctggctaaatagttgctaaattagtgaatgaatgggaagatcatgatgatgaagctaacttaaaaatcaatctcctcacccaagaagagaagtctgcctgacacaccagtgatgagggtttttggaagaagacacag

SEQ ID NO: 913703 - DNA, 4001 bp, Homo sapiens
taatcaggaatggctgtgctcagggggacaatgaacacgtgcacacttgcccttcaatgtgtcggcattgtgaaggtcaaggactgcttgttactgctctcgtgcaggaaatactcagaatgctcagcctgacacctccagcctgtccccttcaaccctggtgtggaacatatccaccagaggatagagcttcctctgccccgaggctcccctgggttcccagggttctcccacacggaaggccctcgctggccctgtcagagctctctgcctgcctcacctgcgacaccatctggaccccagcacccccttatctagggtcccaggacacagagcagggagcctgccttcccctgggacaacaggatgtaaaatagcagagtccagacgctgccagctgtttccctcctcgatttcctattctcctggggaaagctgaggtgagctcaggacagcgcagctaagagttccctccttctctccctgacaggctcctgcgatggcaggggttcccagagggtacccatgcttgcccagctccatctgccctcctgagaacagcagccagcgtgacgacggaggtgggggcagattcagccccaggagccttggggcacactccttctgcaggagcctctaggcaccaagtcaggcagacattggacagtgctctctggggagggcaggaagagccccccaccccacccctcagggcccaccacagagaaggacgcagcccgagtccatcagaattcacacacacacacacacacacacacacacacacacacacagtcgtgagacagaggcagcgccacacacccgagaagggaaagactcagagaagcgacacacttgggtctgaaaagctcttaaggagctccctaagcatcgaggccgccctctcggccagaatcaaacactttgaaggtctttaatagggaacaaagaccacggacttcccatgtgccatttaaagtgaaagctacaaacacagaaaatgtgcatgaagaagcccaacagagttctgactgtctgtgatttctaccctgatgcttcaaaaaccgatgtatagatgggctcacccgcattttttgtggccctggtttgctgataccctaagcacctccttaagccccacagctgggccgctttccccaccctcgagttctcagaagaaacagaggctcggtggaaaagagcccctggggctagggacctcccactcccgccgagatcccgcgcggctgttcccagagccttagctgcgctcggctcacctggggtgcaggtccaccagcagcaccagcgtctgcatggtgatcacgtcgatgcgcttgcaatggaagcgggccaccttgagcaccttgaggtacgtgcagcagagcacgacgaaggagagcaggaagctgagagcgtggaaggcgccagtgaagacggcgaagcgcaggcgctcgtctggccgccggctgcacagcgtgcacgaggcgtacagctggtggaagccgagccaggacagggcgagcgcggcggctgggaaggtgagcgcgtgcagccacgtgtaggccaccatgagcgccgcgtcgcggaggcgcatcttggcccggtagctcagcgggaagaccacggccacccagcggtcgatgctgagcgcggccatgctgagcatggagttggcagccaggaaggtgtcgaggaaggcagccaggcggcacaggcggtcgcccgccggctgccgctgcgccacgacgccggccagcgtgagcggcatgttgaccacggtgcacagcaggttcccgcacgtgaggttcagggtgaagagcgccggcgcctggcggcggatgtccgcgctgtgcagcaggcagagcagcaccagcgcgttggacagcagcgagacgcccatcgtgcccaccagtagccccgccaggcccgcgtcccacgagttcatggtgcgcgccccgcgccggcgctcagggtccgcaacccggcgccgccatggcgctgcccgcggccggctcagcccctcggcgccgccgccgcccggcgaccaccggccccagccgccatggctcccaggagggcgcgcggccaccccggagcctcaggcggcctcccgggcaggcgtctgggcgcgcagccacccgggagccccgcgccgcctcacgggcaggcacctggcgcgcggcagtgaaccctggcccccagcagcacctctggagccagcgactgagcgtgcggtagaacccgaagcctttagcgccccgggatcctgggttgcaggcacctgcgcccctgctccgcctctgcctctgcttcctcccgctctcaccccatgcccgcgagctctgtctccgctccgctccgcgcaccctcccgctctcttgctttctctcttcctccctctctgctctctggctcgctctctctctctctgctctcccctccacctctctccctctccccgccccccgcgctgttctctccgtctgtctctcccacccccaattttctcccctctcttgttcttccccctcctcttctctctgtctctggaatctggctgcttctatcacagaaatccccactggtgcacacacagacacactcgcgcacacacactcacacttacaggctcggagggaaccagccccgaaggctccggtgcagggtgattggctcactgtggctcccttcccccaacatcctccatccccccgtgtgtgtcaaagacaggctgagtcaaggaaatctctctgagaaaaggaagggatgcctggacaccttcacgccccagtgccacctgtccccgcctgcatgctatcctggcagaccttgacgtgagtgtcccagcctgtctgtcccaagaacagctgctgcatgactgaggttactcgattctcagtgccttctttccctcgccctacagccagagcttcggctgaatcctaagcctgctgcagggaccccgaggctctctgtaacatcccctgggcatctctccagctgggagatgcctttgctgaccctgactgctcccacctgggcaagccaggctgtccacaaccagcctagacagctaaccctagtatggtggatactctgttgtcctgctccaagttccagcagctgcctcctgtagccctgaagccacacacccctctgccctgagactggtgaggcagcacattctagtttatgagggacctgcctgatataaggtgccagaactcttcagaaaatggggagggtgtcagctggcaggcatggtccaagcaacagagaccctggacacaggggacccctgcctcccctcagcaaagtgtgcagggactgtggcccttcggttctcaaccaagactctgtggggaaggggtggggatggacaggcaggggcagctctcagaacccctgcagcccccttcaactctgtgagatgctgccctgcagtgaccccctgcaccatgtcagcaacctcagatccctgtcctggacatagaaagccctgttctggagcctcctggtgtggccagtggtgactggacattcctgggcctcaagccactagataaagtaagccaagcaaggacgtggtggactctacgccctgaaggtagagacctcattatacttaattatctccttcacatagtaccaagcacattgtagatgctgtattgtgccatttttctttgctgtaaaggaatacctgagattgggtaattgatgaagaaaagaggttgaattggctcatgattctgcaaggtatgcaatcatggctccaacatctgctcagcttctgatgagggcctcaggaagcttctaatcatggcaaaaggcaaagtgggagcaggcatgtcacatggcaagagtgaaagccagaaagagaagggggaggtcccaggcttttaaacaccatatctctcatggactgagaagtcattcaggatggtgccaacccattcatgagggctctgcccccattatccaatcgccttcgcctc

SEQ ID NO: 913704 - DNA, 4001 bp, Homo sapiens
aacagaaataaatccccaccctgcagggttgttgtgaagaccaaatgtgacagcatgtgcactgtctgcaatagtgtttgttaacaataatcttctctttcccctcccatcaagagcagcttaagttcatggtataacaagtattagtactgggggccagagaggcccttttcagaagccatcaagacaccccaaaggttagcctcctctagcttcccatcctcgctaccttcatcccatcctaggaccaggtcaccatcagtgtccccagtctccctatcaccaaactaggtttcccagagcctattttaaatgttaacctaggaggctacgcatgcatacaagtctagagtctgcactttaaatgcccagaatggcacacccaccctgcctttataacaacacagaaggttctggttttgccctaaagggaccctcggaagatcttttaggacaagataaagaacaggcatacagaagtatccaagacctctagtattctttgaacgataccttaatgttctctctcctgccccatttgatgccgaagttgctatggttgtggccgatgtcccgtggccaatgccaggctgtcctgctgcctcaggttccacctgtcagcaactggaagatcaaccacctatgtagcaatcaaccaatgtcattttgagtaaaagcccccagttctcagacacttccagactagcccaaacatagagacctttgagtcaacgtacagagtccagctcccgccatgctgccacagcagaggagcccaggcctttgggatatgcccaggggactaccaagaccaccacaagtgggctccatctcagacaacactgtggcatccatctaagtcccctcttggttttgttcgttcgtttgtttgtgagacagagtctcgctctgtctcccaggctcgagtacaatggctcagtctcggctcactgcaacctctgcctcctgggttcacgtgattctcttgtcttagtctcccggcagctgggattacaggcgtgcacctcggcgcccagctaatttttgtatttttagtagagatggggttttcgccatgttggccaggctggtctcgaactcctgaccttaggtgatccacctgcctcggcctcccaaagtgctgggattacaggcatgagccacagcgcctggcccaagtcccctctagttaagtggcaagcatttggatgatgacttatgtgtccggcaaaaccaaaacaggaaaagcaaacctatatgatcaggcaggaaaactggttctatgttaaaatatggaccttacctctcaaggaccaggcaggaatgcacacagcacaaacccccattgcacagtggggatacagcaccctccaggaggtggtttaatccaccccagagtgaacggggcctgataggaacactcagggccaactctgggcaaagcagcaggcagcattcctaaagggagggtttggaggagacaaaacctgcccttcacaatgaacgtgccttaagggctacatgccccgggtcacaagctgtgccaggaaagggttctggggtaactgtggggtcagtggccccatggatgaggctctgctcaccaggaagaggcctaggcgcccaacagcccctgagcttcctcccctggggaggatttgcccacaatccctggggggcacctaggtggagagggtgccccggcctagaagcagcctaggcggccggtgtgtccctatctgcacgctcacaagcactcatgccccagcctgggacacacaggcccgtatgcagtaacagcgtctacccagctgcactctgcacgccaagcacaggccgcccctgctgcggggccaaaggcctgaaagcaccgcaccacgcagcctcgcccagaatagctcccctcccgcccctcctgcacaaagcccacccggacttagggagaagggggctcaatacgggcccgaaacgaggctacagaccttctcaggagcaaaggcagcgactgcaggcaaatggggctgtgggccggggtaatgatgcgggacaggagaagccaaagggcagcaaggctgggggcggggtaggcggcgcagtaggctgagggaggggaaaaggaagaaggggagagggaggagcgatggcagcaggggtggaggccgaaggagacagggtcccggacagacttgtgaaaatgggaggatgggcagaggagacgtagaagaggggacaggacaggacaatgagaggcggagcgcggggagtgcgatgcggccaccgggggctctgggcgctgggcaggggccaggatgccgggggtctgagcgcaggcagcgggaaggagtgggttctgaggctcagcaagggggaggtgccgcccaccacgccccccgccccaacgggagcgcgcggagccagcctctcaccctctcgcccgccggggccgcgcaggcgggggaagcgctgctcctgcggccgccacaggtgccaggtgccgcggcccaagatggagccagagccgacctggcctgggcgcgagacgccgcccgccgccgtcggcccggcccgcggagcaagcgccgggtacagggaggggccagcggggcagctggcaccggggcggcgggaggggcggcgggcggagacctcgctcacctgggcccgtgccactctggagcctgccaccgccccgccgcggcccgggatctgcgtccgcgcgcccccacccctccttcccgacccctcctcaggccgggtccccactgtcctcggtcttttcggccccgcccgcaccacgaccgcctgttctccaggctgcccagcgaacccccaagactcccacttccccgacgcaaccccaccgtcccgggtgtataggcgcagctccccacgattctccggccccagacccagcccctcaagtccacctcctcgtagccccaccccctcgctccagtgcccctcgctccagttccccctccgcaccacgccccgcattgaggtctccgcgccggcggctacccctttcctctcgccttctccatcctagctccgcctctcacaattctctggctccagatcccgcccacgagaccccgtttcctatagggccctttcgtctgggataccaggcctggtctccactagcctcggactttccagccccaggtcccaaatcctggacccaccgtcccatcctctgagctccactctcatggaccccaaacctcactccagtcctttgaactccatgatcctggcctggcctggcccccggagccctccattgcccctcaagagcccagcctggtagactccttccctagggttgcatctccagccccgcccctgaagactggtaatctaccacccctttccctgcccacgtgcccctacccagcccgacttgaggccttcagtctcccagccgcggaccccaacagcgggcgagggcagtgaccgtgcggggatgagccacctccactggagcccgccttcttctccgcaattccccgcagcaccacagcgccttcccggtcccgtgacgccgggggccagcccaggccctgggatcgccaggttccacactatgaggctgaggacctgggcctacggttccctcaatatcccccagtttccacaaccgctggccagcttcagggcgcaggacaggcagccccggcctcccgccactcgcaatagattcctgctgtccacccagggccacgtggtatgaggcacctgtactatctctgggccccagtatcacataattgggtcccaatgttggcacttctccgttgtcccctgtgccgggacccccaacttgttggcccagccctgtgctgagaggcctgcgttcctcccttccagtgcccaggagccaacagtatctctaattctccccgtttgggtagcaaaggacctcagtctgcccagagagactcagactgccccaggtagccctctccagcgaggtctgagagcagctctcagattct

SEQ ID NO: 913705 - DNA, 4001 bp, Homo sapiens
aggaagttccccgggagggtggtgtcccccacccaaatcccaggacagaatgatgggtccttctccatgcacgtcccctgctgagtggagctgagcgaagcaggtctacagttggctttcctgcgcagaggggtcttccttaggcaggggcttcggatggcctgcagcttggatgactgtgacgctgcccggcctggcgccctgagctcagcctcctactctccatccttccccactcccatttcctgtacgtctgtcgaggggagtgggggaaggggacttgtgtcctaggcgcctccacgttcagatctagcggagctgggggtcccagaaggagctgctcttgaagggctttctagaaccgcggacagctcctccagggcgccctccggctggcgctttgtgcgcctagcacagcttccacggaccctgcgcttccagccgagatcagtgcgaccagcccgagcctagtcctgcaacctggacagctctggagtcagccacccacatcccgcctcaccaagcctcgagggtccctgaggtcccggagctaggcccagtgatccctcgagctgggggctgggtaggaggagggaggcccggattcctcactacacccggagccggcgccgcaatgctgaccgcgagacccgcacccctccagggcgggaagcaggtttggtcacgggcccctgaggaggaatcgtagctctccgagcccaggcctagtcctcaccaccccactccaccacccaccctcccgccttgtcccgtcctcctcgccttcaacacctcccaacccccagtttccctgtgctcgctggtctttcccaacttccggaaagacgactgcggagggactcccccaaagcgaccgctgtcagccccccaactcggcccaacttcccgagattcctcccgtgttgctcccaactcccacccactccccctcggcgcgcccactccccctcggcgcgccccctcctcctctgcgctttcatcttctctcccggttctctctctctatccatctcttcccgctcagcatccccctaccccccgctgcccacgcttcttccctcggctcccaccacccagaccgtctgggcccccaagacttggaccacgcaaaactctaggactgtccaggatggggatgcagtcgccacaaccagatacacacgcactcacacatacaccaagggctacacagacacacaccggagaagcaggcagacactgtgtccactctaacaggctgacagacagtcgtgcacgcaccaacacacgctcagatggccccacacaccccaacaccctctcacagtaacaccgacaccgtgccaggcgcacacagcgacacacgctgacaacacgcacccacacacattcacacacggttccggtccggcctctttgatcttgccctgccaacttggcgagccccccgctgtacctccccctgccccccgctgctctgagctgcgcagaagggccctcccgacccgccgacggccccgctaagggcgcgggtctcgacgcgcgtccatcccggtgttccccgaagcgtcggccctaagtgtcggtagaggccgcggggccccgcgcggagatcggagccccggggagcggcaagcagccagcgggagcgcggcgcggccggtgcacagctcctccgccgggcggcgcggcgcggcccttcgggggagcaccgcccgccgagcccctcggcccagggaaacgccaagtttggacgccgcgcaccccctgccccgttggggcccccgcccagcctcggcccggcctccagccgcgcttaccgatgtggatgatggagtcggcccgcaccgacacgcactggcatatccaggggagaagccacagcgtcagcgcttccatgtcccccgggcgcgcggctcatccacccgggcccggggcgaggccgagggcagcgcgaagcggggaggcgctggtcccggtgcagtcccgggccgctccccgggagagccgagcccgcccgtgcgtcttcccccgcgcgcccgcccctgcgccctgcgcccgccccagcccagcccagcccagcccagcgcggtcgggctcccgctccggctccggtggcggctgcggcggtgctggcagcttgagcccaggccggcgcggcgggggcggcccgcggctgtggcagcggcgcttcccgcggctagagcggcttcgggggaggctgaggcggtggcggcggcggccgggccggcgtggcggctctgggctggctgtgtgtctgagccccggcgaggagcgaactgcggaggacgccccctcccctccccctccccctcagctccgctccccctcccctccctgcccgcctccctcccctccgcccgcctctctaccacgtgactgcggagcctcagcctcgccgcgcggctctcgcccgctcgcggctcggagggggcgccgggtgctccacgctcccggctcgggggacgctcggagaccggcacagcggcggggaccggcctgggctgcggcgcgccgagctctgacggttcgggcctccttctccggttcgccaggggcgggagaatggaggagggccggccgctaactgccctcgaggggctcccgaagcgccctggcgacctcagcagccgcgcgtctcgggtcatgtccccggccgaaacagaccgttcctcgtggagtgggacctggggagcaagaagagagaccggggcggggcgccgggccaggccccaggacagctggggagccagagggggccggccgccgcaagcatctcagagtagagcccgggccgtgggctcgaaccctggctggccgcgcggacctcggcgggcgcccatcccccgctccatgggcagcgcgctcagccgggagtcgggcaagaggctcggactctgaagcccaattcatggccggaaaccagcgcagccgtgaccgcggcgcctggacgtgaggagccttccaagcggccggcgggctcagactccgaccctgcacggagctttcatgtgcgagcccgggcgaagagcccgctcctcgcggccacagcggaacagggctccctccgcctccggtgcctgcctcgggccggccaccaccaaagagagcgttaagctgttgtgggctcgtgcctgaaagggactgggctccatgtggcacccccaagatttcgaggagacagctgagcttcctggggtctgggacctggcagagcctcgttcaaaagctgctcctccagcaagcctgggaacgtccccgggccctgttgtccgcggaggggccccaggactcccgccacgcaccagggggagaggctcccaccacagcccttgcccagagctcccagcgcagtgggcgaggcagacacccaaccaagtcatcttttaaatgttggggggggctatgaatgagctgtgtatgctcagatgcctgggctctgaaccagcctgggaagaagagcagggatgacttcctggaggagatgacagttgtaaagactgagtggaggttcccaagggagaaaataaggcttccaggcattgaatagtggtgagccaaggcaaaaagaaagaagtgtgtgtctgtatgtctgtctgtctctcatgtggccagagccaaagagtaagcattggtagatttcactttggaaagaaagattggagaggatgggctgtgcagagggggccagtggaggcccatagcactgtgagggaaccctgggtgggccagctcagctgggcagggacagcctgttggagcggagaagctggattgcagaagtatcaaggaatcccatgagccagcaaggtgacttctaggttaaggaggccagggggcaagaagagaggagtggtcatatgtcatacttgcccatgggagtggctgaatgtggtcctacacacacacacacacacacacacacacacacacacacttcttccaaaaacctgtcttagggtccttgagtagtgaaacct

SEQ ID NO: 913706 - DNA, 4001 bp, Homo sapiens
gatacacaaccgtgtcccaccactaggtggccagctgcaaaggctgaaagaggggcgggggaggtggagggctgttttctctgcttcctccctttcaggaccattccccaacccagaggagagcctaccagcacccacctagatcctgtccactaaaaatgtcaggttaggaaaaaaaaaaaaaaaaaaaaaaaaaaaccacacacacacacacagctcaggccttagaacctgaagtcaccaagtaacaagcctctcctaaaaatttattcccaccaaagctaagcaatgggagggagactaacctgaatattttaaactctgctggggttttcaaagcactgcctcccttcggggcttctgaaataaaccttcttgcccactggctgctttagagtgacaagtgacgacgaaagtaagacacgaatgccgggttgagttgctgaaacgctgcccacggaaggctatgcatcacctacccccacagtgtgtagggagccacaaggtgatggaacgggctgaataaacacgaatcgttttattgctggccagaaattcttcccttcattcatcaaagtaggtgaatgaaaatattaagcaggtaagacattttcatgggctgctcaccgagtatccttctaaactcaagcccttactcagtctgccttctaccttgtatcaaataaagcgttctcccgtgaaagggaaaaacctcttccccttttatgaaaaaggtcgcacactagagctcaaatcttgaccagaaaaaaaaaaggaaaatatgcgacataaattccaggtattcctaaatacatatgtttacatggacacaacacaatcatttcaggaagcacccaagtttctgcctccccccccttttttctgtttttcatcaaaaggaagagtcaaaatatgcgttcttagggtttgactcaggatcttacacactccatttagacaatatttcctgccagctaaatgcaggaaatctaatgatttgcatagaaaacgtatctaaagcaccagcacacttacctttcttttcttaactgagccaaaatctaacaatttcagttatcacactcccagaaaagaaaaacctgaaatactgaattattttctaggtggtctgtacagccatcctttgataattctatgaaaaggctaattcctcaacatctgactttgcctttaaaaggcttccttccacacgacgggatttccctaagaaacatcccagcggatggtttccagcaatagtctatatcaactcagcctgcgcaggcaaagacttggcttctgctcattccacccccgcccctcgaacacacacaccagttcacacagaaccatcccgggccgacttgaaacgctattttatgtgcatgtttgctcgtcgctccccgaatgaatgcttttccaactgacctttcaacagctgccgagatggcacgctctgcagggcgagcgctggaaactaggagatatgttagcatccaaatccctgcaaccttctcagcccaagtccagattctctgagccccaaggcaggaaccctgaagggtctgcagagccgctctccgaagtgtcctgctcgcgacccactcgccggcagcgggcatcctgcacgggcgcagccccagcccgcacgccacccgacacccgcaccctggcccgcggcggacgcgccgggcacgtaccggccctgcctcttaccttccctggctttcagcaagaccgtgttggccacgatgttttccagctccattgacagtcggcggtcagcaacggagccggccggcggggctgtcagcgcctggggtgctgccgctgctgctgccgctgctcgggctgccgccgctgctgccggagccgggggagccagcagcccgccttgcctaccgcattattcctgctctcagcccaagagtttccccctctgcaaagaggagccgccgccgccgccgccgccgccgccgcttcttcctccctctgtgtcccccctcccccctccctcaacacgctcccccccaccccccaccctccgcgtgtctctgtcactccattctcctcccctccggctccctcggatgctttaatgcctcggatgcttctgcctcccctcagtccctcccgggggtgtggtactagcaggctcgggcggccgcactgcgcaagcgccggcccaggcgcgcctcctgcctcggtgctcgcggcgcggggcctgctgggagctggagtcctcccggccgcgcggcgccggggctgagctgggctggcgcgcggctgtcggagcgaggacccgccccgggacggcaccgaaagcgaaggcgggcaccgcccggccgacaggcgactcaaaggcggcccagccaagccgaagtccccagcacccccccgcaggctcccgcttgcccccttcccgccccgtcgccagcccggaaagcggagtgcacgggccccggtgacggcgcgtgaagcgccgcggcccggcaggagccagtgcgggtcccgagccgtgctcggagtgggagggctgccagctcggccgcgcgccacagcccgcttcctccggtccgcgccaggcccgcgagggtctgagtcccgggtcagtgacgcgcgcccagggtccccgcacgcggcggcggccggcccggcctggcccctgcccagcgtctcccacgcggcgcctcgggccgcggacaaagatgcactttgtttcctcggagggcgcgaagggctctgcgggtcggctgcgacccggcgctggctgcccgcgctgctctcggtgcgacccgagcgccccccgccggccgcggtgcgcggcgcggggtctacgcggacggcgcctggggctcagggtccagcgtgggaagctgcttattctgtgaataaactgccttccagcacacccggccagcaaatccacgagcctccctgcagccaaacccagccagattaagtaataaaaacgcagacggagtcgccggagtctccgccgtggggagcgttaatgagtaacagccaggccagcgccaagccggcgtgggattaacgtttttaaattccggtcttatttattttggggctcttagctccttccagtgttatgctcagaacatcagactccaggtctgtgctcagccccgtttccttgctccctccgctccgaaggccccactcctggaaatgggctgtcttcggtcacccgggatctgccacgagtgtcctacagctgggggcggggcaggcaggccccaaagaacaatgaggcctttgcctcctctgcatcctgcgggccggatatccgttcagaagccgactctgggccttctctgtccagaaggaggaaaccctctgtccccagggctgccaggaagtcgcagggaggtgccgagagaaacagagaacagttattatgcattggagaatataaagaaatcaataaaccttccaggccttggaaactggtctggtcactgattgtaacaacccaagattacctgctttcctgggggagtatacccaccaccaccacttcctggtgtctagacttgggtcagtgagtctcccagggcctcatttatcttgtctgcaaaatgggggcaacaacagtttacctgtcagaaggcggagggctcagcgggtaacttttcaggcacttaccactccaggaattactgttctaagcaatccaggcttggtctttgctacatattcacgtgcctagagccctaacctttaatgaaaggatctctctcagacagcgagacccctaaagctggcagctcctagagccctccaccaaccacgctggtcacttgctggcagcatagggcctgatgaagcccgaagtttgtttattcggctaacataaaaaaaaaaagaaagaaaatttttgaatgcctttagatggcttatgcaccttaacaattttcttgggccgggcgcggtggcttacgcctgtaatcccagcactttgggaggccgaggcgggagga

SEQ ID NO: 913707 - DNA, 4001 bp, Homo sapiens
cacagcaagttggaagatgcatcttttagagaaaaccatgctttgttaagtcatatcatgtggttaaaatctagtactttcccagtaaaagcctcctcgggctcaagcttaaaactggtctattaatgtagtagacctttgttgtttgcactgtctggaagctgttaaccactctcttcctcccctctaccccacactattaggggaagatagtttcaatgttcctttggaaaactgccccagtaaataaggtagggttgttttcaaactaaaggtccagggtgaagcacataacccaggactttgtgcctctgaatccagctgtgtcatgctcctggacttttcaaataaatgagtaccaaaaaatgtcttttttcaattttggttacattagatttctcttagtacaataaaagagttctatcacagcaaatatgacagtgtttttgagaaacattatgaaatagtaagtactctatgtgttcagaatcataatctcatccaaatgagatgcatttcttagtgaagtaatgacaaatccccttcaaatgtattttttaaatgcattttacctttcttttagggaaaataattgcctacccctaaagattatccccttagaagactaaaattagttcacaaacactaagcacacagacagaaaattccttaagaatagggggtttgttttaaacttccacagaaccttccacaccaaaggtatctaataaatgtctaatcaacagacatccaaaggtcatgggaagggaagtggttccaatggatacttggtgtcagagaaaagtcaagtgactgttgcacatatcctgtggatagcccgtaagtcaaaaactatgctagtttcaaaacaggctctgcagaaggatgagctagacagacacttccctctatttgactcaaccaacagcccaatccacaggaatatgtgcagtaaactcagcactaccctaggagggtcagggtctaaactctgctgtactggggtaaattactattctaggagggaacaatacattcagaataacaactaacagttaagctggaataagaacgggaaatcacaatagggcgaaagcgaaaggactctggaccaggaattcgtgacctaccaaagctaaaagagctgctgccggttattaccgggcaaatcactaacatcactggagcctcagcttttctaatccattaaatggttggttaatctaaatgaggtgtcctagaccgttggaatctgtggcctatttttcctaggggaatggcctataacttgctattttccaaagggccgagaatagtttaatgtgcagtaaaggacgctggtgggaggggggtagaagggggctgagaccccaccccaccccgccgcctgcagcaggctcccggacggctcggggagcgtcccccgcctgggtgcccacctgattcccttggccttcaggactagacgcgtcctctcagcaaacgggcagaacctcatgctgtagatgcggatcgagccctccgggaccggccccgggggcgcgcttcctgccggggagaagcgaaggcgattacggcccagagaggtgtcgagaccccccgtatcccaccgcccccgcgtcccactgcagctccgacccgttccccgccggtggggcgctcccgggcggctgggctcccggagcagcctcgaacatgccgccgggggtcgccgagatcaccccctcttcgcggcgggcaggcctcacccttccccaagctcctggctgactccccggacatcgtggcgcagcgcaggccgagctcctctggggtttgcaggggattcaggaagtaggtggcgcgtccttcccgccctccttccctcccccgcttcctccttagctcaaaagtgcctgcccccggcggccgccagctccacccgttgtgccttcccggctttatgggatagcccttaaaacatcttaaggggctgtgtcaaagcatctcgctggccaagggctgcacccacggggagatacacaaaagttataaatgctcagtcatccctccgcccccgaacgaaggggtcaccactccgcactccacggggctccacgtctgaccctgaccctgacctccctcccgtgacactgacctcgaagcaccacccgctccgtcccaaggcttcacgacttcagagcctgtggcccgacctcatggctcactcaccggtccagagcgttctctccaaaggctcctgttcagcttgtgaagggaaaataaaaatctcttgactccaaactcactatgccaaagggaagagtcaagcttggaaactgagtcaggcaacactgcctcccattttgttgctaaatagctacaaagatcaaaggccacacacctccccaaggaaattccttgttggcccgcaagatctttactctaaaacagatcagttgaatttcatcttggcaatgtaaactaacagcttatcttcccaagtatgggacaaagacaggtctaggagtcatccttcctctcgctggagaaaaatgcaatttgaccgcttcctctaccctatatttaatcttgtaaaaatgcagattcaccaagcactagacgaatgcataactgactattcctctacgacctcctttcacgaatgtaacatgcgcattcagtgaatgctgatcaaaggccccaaagaatgcaactactctccccttttatctaccttccctttttactttccactttcccctactgcctgctctttccctttaaatattgaagtcctcaagccctctttggaaagagcacagatcacagatgttcctgtgattttgtgttcctttttctcagatgtgtcctcaaccttggcaaaataaacctctaaaaggattgagactcaccttggtcatttcctttgatttacaagctcatctatgcctcgctgcagggttgcccagccacctggacaggcttttcctttttctgtcagtactagcttaacgtgactactgggagggcctctgtccctaccgtcacctgtaggatacatccttttcattttaacccataggagacagcacaaacctggatattatcaacctcagaataatggtgctgctttcaaaactctcccacttattaaacatttgtgttttggagccctggtaatataacagtactcccatttttctaagagatagaggatgagttattttttacattatttatttctcccatcttctctgtttcctcctttctccctgttccccacttcctacttagctctttagaaatgcaattatcatcttttaccttcccttcacctgacactccctacagggcaagcttatctaactgggtgtttacttaaaagctccagagcaggactctcaccccccaggagactgcctccagagataacagtccatttacatccaaaagtatgcctgagacaaggccactttacaaatgacttctgcccatgatggcacaacccagcagataaagcaccaaagtgagtcatgcgaacccccacccactcgctccctccccagcatgcagttcataccaactgccccctttaaaagcccctgctttctgccccagaagcaaagtggtacccttaaggcaggaagcctgttttgctccccctaagctagctttggaataaaaaatcactttctttataccagactttgctcttcttattaataattggactctgaaagcgggaagcaactgaacctgcatttcagttacaataagggcacaggctcagaatcaagcaggtggcatgagtgaatttagttttgggtctgggaataaaggtctggccagagagtcctctcaaacagctcttttaacttaggggtcaggaaagaggggttccagggccatcatacagatgaggaaaaagactattcaatgatttccttgtttgcctagatttgaaagctggtaactcctgtgccatttattggggtgagattggggtagatgtctatttt

SEQ ID NO: 913708 - DNA, 4001 bp, Homo sapiens
ttcttagtgaagtaatgacaaatccccttcaaatgtattttttaaatgcattttacctttcttttagggaaaataattgcctacccctaaagattatccccttagaagactaaaattagttcacaaacactaagcacacagacagaaaattccttaagaatagggggtttgttttaaacttccacagaaccttccacaccaaaggtatctaataaatgtctaatcaacagacatccaaaggtcatgggaagggaagtggttccaatggatacttggtgtcagagaaaagtcaagtgactgttgcacatatcctgtggatagcccgtaagtcaaaaactatgctagtttcaaaacaggctctgcagaaggatgagctagacagacacttccctctatttgactcaaccaacagcccaatccacaggaatatgtgcagtaaactcagcactaccctaggagggtcagggtctaaactctgctgtactggggtaaattactattctaggagggaacaatacattcagaataacaactaacagttaagctggaataagaacgggaaatcacaatagggcgaaagcgaaaggactctggaccaggaattcgtgacctaccaaagctaaaagagctgctgccggttattaccgggcaaatcactaacatcactggagcctcagcttttctaatccattaaatggttggttaatctaaatgaggtgtcctagaccgttggaatctgtggcctatttttcctaggggaatggcctataacttgctattttccaaagggccgagaatagtttaatgtgcagtaaaggacgctggtgggaggggggtagaagggggctgagaccccaccccaccccgccgcctgcagcaggctcccggacggctcggggagcgtcccccgcctgggtgcccacctgattcccttggccttcaggactagacgcgtcctctcagcaaacgggcagaacctcatgctgtagatgcggatcgagccctccgggaccggccccgggggcgcgcttcctgccggggagaagcgaaggcgattacggcccagagaggtgtcgagaccccccgtatcccaccgcccccgcgtcccactgcagctccgacccgttccccgccggtggggcgctcccgggcggctgggctcccggagcagcctcgaacatgccgccgggggtcgccgagatcaccccctcttcgcggcgggcaggcctcacccttccccaagctcctggctgactccccggacatcgtggcgcagcgcaggccgagctcctctggggtttgcaggggattcaggaagtaggtggcgcgtccttcccgccctccttccctcccccgcttcctccttagctcaaaagtgcctgcccccggcggccgccagctccacccgttgtgccttcccggctttatgggatagcccttaaaacatcttaaggggctgtgtcaaagcatctcgctggccaagggctgcacccacggggagatacacaaaagttataaatgctcagtcatccctccgcccccgaacgaaggggtcaccactccgcactccacggggctccacgtctgaccctgaccctgacctccctcccgtgacactgacctcgaagcaccacccgctccgtcccaaggcttcacgacttcagagcctgtggcccgacctcatggctcactcaccggtccagagcgttctctccaaaggctcctgttcagcttgtgaagggaaaataaaaatctcttgactccaaactcactatgccaaagggaagagtcaagcttggaaactgagtcaggcaacactgcctcccattttgttgctaaatagctacaaagatcaaaggccacacacctccccaaggaaattccttgttggcccgcaagatctttactctaaaacagatcagttgaatttcatcttggcaatgtaaactaacagcttatcttcccaagtatgggacaaagacaggtctaggagtcatccttcctctcgctggagaaaaatgcaatttgaccgcttcctctaccctatatttaatcttgtaaaaatgcagattcaccaagcactagacgaatgcataactgactattcctctacgacctcctttcacgaatgtaacatgcgcattcagtgaatgctgatcaaaggccccaaagaatgcaactactctccccttttatctaccttccctttttactttccactttcccctactgcctgctctttccctttaaatattgaagtcctcaagccctctttggaaagagcacagatcacagatgttcctgtgattttgtgttcctttttctcagatgtgtcctcaaccttggcaaaataaacctctaaaaggattgagactcaccttggtcatttcctttgatttacaagctcatctatgcctcgctgcagggttgcccagccacctggacaggcttttcctttttctgtcagtactagcttaacgtgactactgggagggcctctgtccctaccgtcacctgtaggatacatccttttcattttaacccataggagacagcacaaacctggatattatcaacctcagaataatggtgctgctttcaaaactctcccacttattaaacatttgtgttttggagccctggtaatataacagtactcccatttttctaagagatagaggatgagttattttttacattatttatttctcccatcttctctgtttcctcctttctccctgttccccacttcctacttagctctttagaaatgcaattatcatcttttaccttcccttcacctgacactccctacagggcaagcttatctaactgggtgtttacttaaaagctccagagcaggactctcaccccccaggagactgcctccagagataacagtccatttacatccaaaagtatgcctgagacaaggccactttacaaatgacttctgcccatgatggcacaacccagcagataaagcaccaaagtgagtcatgcgaacccccacccactcgctccctccccagcatgcagttcataccaactgccccctttaaaagcccctgctttctgccccagaagcaaagtggtacccttaaggcaggaagcctgttttgctccccctaagctagctttggaataaaaaatcactttctttataccagactttgctcttcttattaataattggactctgaaagcgggaagcaactgaacctgcatttcagttacaataagggcacaggctcagaatcaagcaggtggcatgagtgaatttagttttgggtctgggaataaaggtctggccagagagtcctctcaaacagctcttttaacttaggggtcaggaaagaggggttccagggccatcatacagatgaggaaaaagactattcaatgatttccttgtttgcctagatttgaaagctggtaactcctgtgccatttattggggtgagattggggtagatgtctatttttattttgattagccctattatgggaggagcagagaatgaggtgaaaagcaccaagtgttggagcaccctgcctgttttgatcctggctccacccctgtattcagttgctaggactagggtaacaaagtactgcagagtggcttaaataacagaagtgtgttgcctcacagttctagaggctacaagtccaagatgaaggtgtcagcagggttgctgccttctgaggagggagtctgtgagggagtctgttccatgcctctctcccagcttctagtggtttgagggaatctttggtgtcccttggagtgcagaagcaccacccaccccatctgtgccttcatcttcattcacactccagtatgacctcattttaatttagttacatctgcaacaaccctatttccaaataaggtcacatactggggcactggggattagaacatcaatgtatgaaattgggggagcacaattcaacccgtaacaaccacttattaactgtgaacatggggaagtcac

SEQ ID NO: 913709 - DNA, 4001 bp, Homo sapiens
agcttacactctatttacatgcatttgttttgagaagaggaactgtggtttgcattcggcaacttttcaaaattttttgtcacgccatctcttgatagtagcagaaactggactggagtacattcctcttaataagttagaagcctaatttatatgaaagattatattactgggtgttcccttattgtccaatgagttcaaaaagtgagatacgttaggtaaaaggttctattctcaaatgtgcttatattcaggaaaaatttcatattcccaattgggaaatcagggtcaaatgaggctatctttttaactacttgattctgcttccctatccctatttctctctacaacttgaggaatcaaagaaaaaaaaaactttttaaataaatatttggtataataacatttgaataagtaaaggcaaattgtcaagatcctgaaatcaggaaaagtcaaataatttgtaaaatcaaaaccactgagtttggaaaaggaacattattaactcattaactcctgttaaatcccacgaataatggtgtggtcaaaaaggcagatacaggccgggcgcggtggctcacgcctgtaatcccagcgatttgggaggctgaggcgggcggatcacgaggtcaagagatcgagaccatcctggctaacacggtgaaaccccgtctctactaaaaatacaaaaaattagccgggcgcggtggcgggcgcctgtagtcccagctacttgggaggctgaggcaggagaatggcgtgaacccgggaggcggagcttgcagtgagccgagatcgcgccactgcagtccggcctgggcagaacagcgagactccgtctcaaaaaaaaaaaaaaaaggtagatactatcctctgtcagagctgttggataaagagactggaaaaatagcacatataaattcatctcacgaacggtcttactgtaagagttcaggctagattcgaatctcttcaatatttattagctgggtgaccttgggcaaatgacaacaactttcgggtgttcttatatgtaattcgtagctaatagtaccagtacattatgtggtttgcgaaggtttcattcagaaactggatgagaaatattgaatgcttagcatgtgtctgatacatagtaagtgttcaacattagctattattattttatgattatttcaatgtagcagggaagacttttcacagttttcacaaagacagcacattcccagaaaccaaattcccctgcttgccagtgccttaaacacgtaaacacgtgggactcgtggtgtcccacgcaaggctgagaactggttatctggggtggtctctgcctgtttccagccaaatcagaaaaaataagaacaccttaattaaaggtatgcggtttaaagacctgttctttattcttaggctgcactttgttggatgtgaaattctttgatgcaacagtggccaaggctaaataggatttctcgtaaagtgttaggcaaaagttaaagttggcaagcctactgtgggccccgaaattcgtgaaaaccccaggaaacagaattgacctcaaacccctcttcccttccaatacaacgcaggccgaacggacccaccggtggcggtgagagaggtcccgcgagagacctccgggaactcgggcaaccggaccaggattggcggcggcagcagcagcaaggaggcggggcctagacggggcctgcccctcgcacgtgatcctacccgccaactagccccggcgcccagagcatcagccaatcctcaaagctttggaagtacctgcccagcagtgcggctgagccaatgggcggcctccttacaggctcctggagatcgggattcgcgggtcctgccggcgccggtggctgacgaaagaggaaccggtagtggttggctgtgggaccccggcacccggctccgcacctgaggggaaatccgctggaaagcactagggccaagcggctccggtaggcgcgcggcagcagaggtggtccgccgccggcagccggggctttggtggccgctgaaggtttgcggcaggaggcctttgtgaagtcagtcggctccaggtcgccctccggatgcggtccccacaccgcctgcgtcacctgggttgaggggctcatttgaaatacagacttcgctacccaccccagcctgctgaatcggaaatgcagcggtgagccataggtgattattatgcacccttaaatttaagaattagtcattcggaggtttctctcaatggcgaacttgaaaataagttcaggaaaccagacaattggagcggaccgacagccctgattccaatggtaagagcagtgcgctgggtgtgatctttctgccagcaccttaaggcctcacttaacctcgggaccttagttgcatcatctatagaatgaaatgattgctctccgacctaccttctcgtggtggtgatgtgataataaaaattgaatagtgagcaacccagtgggctatggaaatgtgtggaagatggcatttctatttctcagtggggctcttacctattactcatcaaccttgtaggcagaattgactgatgcagcctacacagtatttaattacataaatgggacaccacctatgtgcccaacatgggatttgataggaaggatttgaaggggttagagacagggagaccaaataggagtctgcccagccacccagctttcgggtaatgtgcgtctggtcttcagggccaacaatagagagaatgtgaaattaagttgatgatggaaatgaaagaaggaggaattgaaagcttctcaactaagaaaccagaagacaagcaacaagagagcatctcatgaaatcacacaacagggtaactgagtgggtatttcctgtgagcagttataaagttagattgtggacgggtacggtggctcatgccactttgggaggccgaggcgcgccgatcacctgaggtcgggagttggagaccagcctgaccaacatggagaaaccccttctctactgataatacaaaaaaattagccaggcgtggtgacgcatgcctgtaatcccagctactcaggaggctgaggcaggagaatcgcttgaactcaggaggcggaggttgcggtgagctgagatcaggccattgcactccagcctggtcaacaagagtgaaactccgtctcaaaaaaaaaaaaaagattcaagtccagattttgctaaagatgataatttgggggttttcagcatggactatgatagaaccctcagagtcgtttcagcatcctgagacaggaaatgcattttcatttctgtaggggggcgttaaggagacccccaccgtttggctgttgatgtcaaatcagtcagagaagatgatcccatgcaacctgaaccttggtaaaataaaagcatgctattattcatattagtgaaggaaaatatcagacatagctttattgctgactcctgcccccttcagagcccatagtcacaggcctcagggctgttctgtaagtagagctctaggaaaccttgccagtctttctcactagtaagcagggctgagactgtgggatcttccttcatggctgccatccacagtttcagttttggagtgtggtctacacacctgtgggaagaggaaaaaatgaaaggtgtgagctaggtcaactaggatgacatcacagagtctcccatatgtaattattactctacagtttcacttttttcccttaaatatttcattaaaaatatttaaaaatgcctgtaatagaatattcaatttgaaagacactatagaggtcccttttttacacaaaaggaatgagactagagtgaagcaatttgttcagttaatgtgagaacttgcccaaagagagaaactgacaatttattaaaataagaacagggaatacaatcaggaatgttctatgttaattattctacacccagattatgaccaaaagtaaccctgaatagctctatcgtccaagaagccggagtaaggc

SEQ ID NO: 913710 - DNA, 4001 bp, Homo sapiens
atcagaataaacggtctagcttgggaccttaaccgaattcctaacctctctgtgctcagtgtccttaattataaaatggggctaataattacacccatctcttggtactgtggtggggatatgtataaagtgtttaggacagtgcctggcacataagcatgcaataacttttttaattcttcttctaattattagatgttcaaataatactattattatttaatgttcacataatacaattattatttagataactatatagttaccagaagcatgaacgtatgtttaaaaacatgaaaggaaacaaatgggaacgttcattgcttagtctaggagattgtcttaaacctacagcagaggctggatgaggtggctcacacctgtaatctcagcactttgagaggccagggtgggaggattgcttgagcccaagatttcgagaccagcataggccacatagcaagacctaaagcagtgggtctcaacctaaagcaatgggtctcgactagaagtgatttttggcctccttcccaagggacatatcactatgtctggagacatggttttgttgtcacaactgaaggtagtgcatagggaagggggactctactgtcattgaatgggtagagaccaaggatactgctaaacatccagtgatggacaggacagcttctatcccacctctccaacaaagaattatctggcctaaactgtcaacagtgccaagtttgagaaacgctgacctaaggaaatacatcagctcctaagctgataatttatcaccaaatgggcaaaacatccagttgttgttattttcctcaaaaaacaggtaaccttaaggtcagcttaatttgagcaaaagggaagaatgtggaaatacaggccctatatactcaacaaggcagatttacataattttatttaaaacatctctgtattagtctttgtatctctctgacatgagtctgaaactctgaagtcacccccttgtgatggactctccgagacaagagtcgggagcctggagtgacatattctcaacactctagcttggaggccagctgcattatgcagtccacatcccagcaaagctgctctgccctccaaatccagacctgcaggagctggttttgcaaacttccttttggaagcatctgtacccatttctcaagttttcaaggtgtcttgaaaacttccagacacctcttgatagcaattccttctatttcattgtttggaaagatttgttcattcatttaacagatgttttttgagcatccactatgtgacaggctctctcctagctcatgaataaaagagacagagttcctaccctcgagaacgcacatgggtgaaggggactggggaggggagatggatgaacaaataagaaaatgctggatgcagtaagttcaataaagaaaggaaacagtgacctaagatgcctggggtgtggtgggggaactacctctgtggagcagtcaggtaaggcctcagtagtgttggctgtgcccttaaacattctgggagggaaccagttcaccagccccatcattcacattactctgcgctgggctagaagtttcatgcataggcgtgactcggaaaagggctccgcatttcagtagggcccgctaaaaaaaagctcgccctttgctatttgttgactttgcctccgaaaaaagggacagggagccccttgtaaaagctgagcagggcgccccagatgttaaacattcccgggctcctgtgaggcgctgggtttgctcgggggctctgggttcccgcttctcacctgatgtctttggccttgaggacgaggcgggtcctgtgagaataggggcagaacctcatgctgtagatgcggatcagcccctccgggactggccctgggggctggcttcctgcagagcagcgatggagggggacagggaaaggagaggctagtcagcccggtgaggaaggagctcgctcacttgcccagatcccaagatggctgtgggagctccaactcccaagtcccagagagggcagtgctgcatgtggcttttcttcaggagagccctccaagtcccttcctgccccgccggtctgcaggccaaggccaggcagctccgccgaagccaacattttctgtcacgcggcgcccccagctcgcggaccccatggagagcactcacctttccccagggtcctggtcgcatccccagacatggtctccaggtggtttgcgcagctcccggagctcacggtcgccgccctgtggctcgccaccgctgccgcaggctccagaaacagctgcgctctggcgcgcaccccttgccccaaatttaatttttgaactactgggctctggcggggcacggggaagcgatctggagcaggagctagggtaatttaacctggggagacatcgccccagatttggaagcccgagagtaggagctggcaaaaaacaaaacaagacaaaataacaccagaaaagctcccccttgctctggacatgtgcttaaagctttggaggggcctcctctacatcaagaatccctcaagaatgggcatttaaactccaacatggatttcaaaggagtttaatcaaaactgactagggtaaagctgactttttttttcccattctgaatctcttgcatcactaaactggccactctttggtaagtaagtacagctttaaaaaataataaggccaaacattctcatgatacagcaactaggaaagaaaaagtcattggtgttgaaatctcacataccccagagagtgagtgcctcctagacacctagacaactttggtgtctagacaactcacattttgcaccctagacacctcagttgcctcatcccagtcctggccctacttgtgagattttacccaagctctgaaaaactggcaatgaataaaattaagatacctggaggcaaagaacaatttgtgagcttcccccgttccccagcataaatttttgagaacactcttactagttgccaaggatacattgccaacagcccagccatataggggcgacttgcacagcttttctgtttacgtgagataatagacgtggctttggctctgatgctgataagctgagatcctgaatttcagcaggtaaaaaaataattccttaaattttccagaattgagctgatgtgggaattgcttgtaaatgcattttgtaggattaacagatcatgaaggaaagaaaaatattttctgtgtctcactcatactgactaaattatttccatagattaccttgattcctacaattgctcagtcaggcaactcatattatttctacttttcaaaacagaaaacagcttcagaaaaatgaaattatttgcccaaagtgaccagctagtagggttgaagaactttaaaagtccaaagcttgactcgttgtcttgacctttaaaactggtaatagtgttaggaggaaaggattttaagtccaggaaaagatatagcacgtaatggctgctcaacaaataatacttgaatctaaatatcttttattaaaatgacagagcctaattatgtagcttataactgggtactgtttggcctttggaattccagtctatccagaacttcttggttaataatagtgttaacattttttgctagtgaataagaatctttgcaaatcttcagaatagtgactcaactacattttttgctgtcattcaatgatttcatgtgaaataagcttagataataatatggaaagtattaacattttataagaatcagggaatggcaaaaatgtttgaataaatgttctctgaaaataaaatgcatatatgtcagcaagaaatctggtgttggagaagacatattggttcccggcttgctacgctgacaacttttcatttaagaagacagagaaagtaacagagtaacttctactactttggagctaattctgatcaagaaggacaaattggatggtaaaatagaagcaagaaacacaaccatgtcatc

SEQ ID NO: 913711 - DNA, 4001 bp, Homo sapiens
agaggcaggtattttatctaatgcatttttgtaacacagtacccgatgcacaggacaggcactcactcaacatcttctagaatgaactgaataccacactttcccgatgtgattttttttttttacttccaatcaccaaacaattaccatcacccagtttttagataagtcatctgttctctaaaaatataaatctcactccacagaacagaagacggatggtgtataatatattctaaagttctccacataagtcaataacatgaacaaagttcatataatccaaagagcaaattccttcaacaaacctgagagatggttgaccaaaaatacaaataagacatgactcctgcactcgaaaatactacaatctggctgggcacagtagctcatgcctgtaatcctaacactttgggaggctgaggcaagtgaatcacttgagattaggagttcaagaccagtctggccaacatggtgaaactccacttctactgaaaatacaaaaattagccaggcctggtggcgcatgcctgtagtcccagctactcgggaggctgaggcaggaaaatcacttgaacctgggaggcggtggctgcagtcaggatcacaccactgcgctccaacctggccaacagagcgagactccatctcaaaaagaaagaaagaaaatactacaatcgatcaagagatgtgccagaacaactgtcaggaagaaataagaaatggtggagagaagtggggaaacaacttttgctatgaaggtaaaatacgagactcccacaaagctttccaaggcaagctcatcccgtccttgagacctgaagaaaaggaggcactgacgaggggaaaacagtcactctgcagggacttcagtaactccctctcgtgcaggagtccctgggaggctccagttgcccgtcaatgtctgtgtaattgcgacccaaatcgaatgttcactacataaaaacgtgacttcttaaaagtcctaatactagggccgggcgcagtggctcacgcctgtaattccagcactttgggaggccggggcgggaggatcacccgggatcaggagttcgaggccagcttggccaacgtggtgaaaccccgtctctactaaaaatacgaaaattagctgggtgtggtggtgcacgactgtaatccctgttactcgggaggctgaagcaggagaatcgcttgaacgcgggaggtggaggttgcagtgagccgagactgcgctccagcctgggaaacaagagcgaaaaactatgtctcaaaaaaaaaaaaaaaaaaaaaaagtcctaatactcaacacttgttgactcattcttgccacaccaaccaacgctgtaaaaatttagtctgggcctactatggtctgaaaaggaacaggtattcccaaatctaacagtgaaagagaatgacttaaaaattatgaaacgttaaatcacgagaacaacgaacccaggattcctgagaggggagggggctacgccaaacccagaatccgaaggctcatcacggaccacggaacgcttcctccctcacatgtcggggtccccctccactcgcccacatcgtcacccggggcccctccagggaacccaactctgggtgtacccccatctctgggggccctcagtctttgggtggaccacggtcttaggtggaccccggtctctgggggatccgatctctggtggaccccggattctgctgggggaggggaaatgatcccgagtacgcggccagacggtcaggcccaggagcgggggatgggcgagcggaaggcgaccgctctcccacggctacaggcccggaccctccccggggacccagctgaggagaacgcgaaagttgcagtggccctcccggggccgcctaccttggcggacggcaccaccgtaattttcttgaagttgtaatgtgccatgccggcagccgtatgcacgcgggtacttggcactcccggaacttccgccgtcgggcgcaggtgggacttccactgtcgggcggttgaggtacgtcacttccgggagctcagccaatcgtgttctgcgtgctctacggcgctttccgcgtcgcacagcgcacccgcccggcttggaggtcagccacggagggcgtgtgagggcctcaggagcgagggtacagaggagaggacgcccgggttttagggggagcgcggagactaaattcctgctgagtaaagcgggggtttccgacagactgccctgcgggtttctggagcgggttcaggcccccagccacgcgccctgggccagggttggagggtccggggtcttgggatttgggagttgcggggcttaggagtccagagggtctaggggatccgggagtctgggggtcctgggtcgcggcgagccccgcaaaggaggaggaagccgcgcgtgcggggcgtgcccagcctctgggtgtggagcagatgacgcccctaccccggcctcgcgcgtgggacttgatcccgggccgtggtgaggaggccctcgcggcttccctgcagccctgctttctcgtgcttgttaaatcccaaaacgggcggagaagggaaagcctgatctaaggcaaaagaggtgcagctggttccgcgcagtgccttaggagagcccagggaacagttgcgagagacagtcctgtggggtccaactgaggagaaggttgatgaggatggagcctttactgcttttatgtttgtgaatagagtggccgctccctttgggaacccagggccacatcccttaaattaaacgttaggtagggctgactcagtcaagcagtgttcagagctgctgactatatattaactcgtttaatttctgcaacagcctcatgaagtgcatggggaaacaaaggcacacaaggctcgaaagcaccccgtggttgtgcagctgacaagctaacaggcagcagaggtgggctttgaacccaggcagcctggctccagcaaacctgcttctaaccattagctatactgcttctcacgcatctgggatgccccccactctccaatccttttaaacaagtcctattattcttacgcgaaaatacctctcataaattcccagcattccaatattgaaaatcattctgggtcatgcttttctcatctattaactatgcttccatttttgtgtcacaaggcggataagcatacctcctacatctttgtggcacttctaaaggaagcttctagggtaattaggatttgctggctatgatcatttgctaaaccacaggacagttctggccaccatttccgagattagcaaagctatgctcatacttattgccctttcttttaggttcttgtatgtttcctcaacctctcccactttctctcactctgatatagccagttcctctttttcttgtaatccggtatttagataagtccagtcaatactttgcttcagatgggcaaacatcctttctttaattttttttttttttttgagacggaatctcactctgtcgcgcaggctggagcgcagtggcgccatctcagctcactgcaacctccgcctccagggttcaagccattctcctgcctcagcctcccaagtagctgggattacaggcacctgccaccactcccggctaatattttgtatttttagtagagacagggttttaccatattagccaggctggtctcaaaccctgacctcaagtgatccacccaccttggcctcccaaagtgcagagattacaggcatgagccacctgcttttaacttgttcagctacaaaggcatgtctgtgaatgcacaaccataatgactcatcatgggcccagagctataacaatgataaggtaccaagcatcttacaccatgtgcgtgttgatgagaatcaacatccttgcctgttcttgtgattttgtggcagagtatagcttcttgggggcaagtatgtattctacaccactaggagcaagcttctttatcatacacttctgggcttctctggggaagccaaactcta

SEQ ID NO: 913712 - DNA, 4001 bp, Homo sapiens
cgctcttaataatgttttctttttctctcacctattgaaccgtttcagtagcaactgtgcagcccagtgaggtgacaattggatttcaaaacaaacacaaatgagcaaagtgaggaaaccatttgccgcggtggactaatggcccctaggggatcctggggtctgtggggcttagaactgggcccttgttttgaattcctctgaggtggacagaagctggaaggacacctcagttccagcgtggctgtgacagggtaactgcccttaaaatcagggcagcggagccacggttcccatcgcgtcccctcaaacactcagggccccgcactttggtttctcagcccatttcttctcgcgcctttcatcccttcactcatccagggccgttgccaaaaaaccctggcaaggaccaggcctcagtcaggcccacggtggtccactgcacgcgacgggaaactcctggaggaagctcgtttggcccttggggaaccaatgcccctttggccattgttgtaaggaacaaagagggcaagaactgagggcgcccccccaaggaaaggcgggggaggacacccacgggcgatccggggggctggccgggctggggctgaggtgcgccggggctggaggctgggagccgggggaggcagggctggtccccaaccgccgcgccccgcgagcgatacgcacggcgtccggcgcccggcagagccctttcctgcgccgcagccagtttacttttattccctttttcgatatttttattattattattttttcccgcgcaaagcgggagccagactgcccaggcgagccacggccgggccgccatttcccggtgaaagcgcagcgcgcgtcggcaccgggcgccccggaaagggaaccgaaggggagtgcccggcctcgcgccctcttccgcgccggccccggggcgcacgcccgcccgcggcgcccgggtgtccgcgcagcaacccccagccctcgccccgccacccggcgtccccgacctgaccttccccggcgcggcccgcccccggactcgggtccctaacctccgcccggctgctccgcgccccctccattgtcagcctggagccgccggcgccctgcccgggcaccttcagaggcccccgagcggccctccccgggctccctcgggccctgcgcagccccccacccatcgccccgtgcccatcggcggccgggcgcctccgtcctcccgctcctgcgcccgaaactccgcattcccaggagacctccgcttcctccgggtccagcctcgcctggggcccgctgctgaacctcgcatccctcctccttcccctctcagtaccctcgacgcccccggcccctcgctggccgcaggaatttgaccacttctttagcagccccccctttatcgcccaaggaagcaagttgggcagctggatttaagaatttgtttttgcagagggtgggtcggctatcgagggtgcgcccgcaggggctcgggggagaggcagaggtggttctctccggcccctgcactgccccggcggcgcgttttgtttccagaccccggagcaccctaaacaataatgccatcgccatggcgggctcacctggtgctgcgccgcctgctcccggcgcccggtgccctctgcgcgcccctccacgggcgcaggtttggcccacgcggcgccggtgccgggcaggactctttgcctttctttgggttctatctgtgcgtgtcaatggcggcaagcggcagttctctgggccgcggatagtagcggggggaggaggaggagggagaagggattgctccttctccacataaccacctctaggaggagttgctcagcctcatcccccgccagcccaggctccgcgacgggtccggggctttcggtggggcttgatgagctattgtccttcaggagtattaatggtgaaaccgcgcggcctccgcgtacttggccgatctgcgagacgagccgagggccactcgctaacatgaggctttccccagaactgggcacaaacgcgctatggtcgcgatccagtctcctgttagctggatccacctttggtgggagaaggtggcgtgggcgttcatctggcagctctggggagagtcttcgaaggggaaagcgaaaaatgccaccttctatatttttgtgtccttaaataataacaagtacattaacgtttgtgtccaccactgggaagagtgcatagggcggccacagccacgagagctgagaatttatatccgtgcctgtaggctttttagaaattaagaccgatttagaatccagcgttgcataatatttggagaggcagatgtatgttttggtgggtgagactgtgtgtatgggcataatttttaattgggttgctttacaaggtgttaatttgcaatatcccaacgggtatttagatgagcgcgaggctattgtcttcaggaccagtttttattagttactagaaaatgcatctttatgggggtgtggtggacactgtcgggtgtgataatggggattagcagttgctgtgttcctagtggaagccagtctcggctttgtattgtgagttgttggccagggctccatggctggaggggagtcaaaagaatgtgtttatttcagtgggaaatactaacttgctgtggaccatccaggtttcctctgatttctcctacagtcaaaggactgtgagaggcaacattttgatcccttccaaaaagagaaaccggtgcaaacagaattctccagccttggccaaatggctgatttttaaagctgttacatttggtaatattgtgtatatttgctactacaaacttgtaactatttaggcagtggggactttggagtgactgaaagcctcccagtgcctgagtgggaagaactcatgcctaccaccctctgcgtctctactagttagttaatcatggctattgctggcgtttatagatagcgggttaggtttagaacatgtgcattttaaagtgtatttgctgagaaatcagccatgtttctctctgacttcctccaaatcacgcatatatcatcaacatatgcataagcctctatttcagtctcctatggcttctcaaactcccctggactcaacagtctctgtttcttggggcttcctttactcttttcctaagcctttcacgccctctgtgtatgacctcactgttctttgtcttggaaggtattttccaggtcagatatccagtcaggataaagtcttctttccccaagatgtatatttaaagggtttcaaatgatcccctggggcatcccataatgatgtcctttcccattcctaaagaaagggtctctcttcttataccttcaggtgtccattcttcaccagaaataaccatcaagccaacattcaagagagttcaggagttttctatgagtgcttgaaaaatactcatactctgtcatccagtcagccaggctgactgaaatatagttgaataattcatcagtagatattagattcacattctccttgtaatttcccaataaaagtggcatatgtggtcatttttatgtgaattttatataacagttcattctagcattttgttatgtgctatcctgagagaggctggatctagtaaatttactggttaggattctcccatttcatactggttggtttcttcagacagatgatgctgtcacaactcagaaaatcaaggaagaggtcagcttcaaaatactctgattcttaggataaaagggttcttagagttcacctagtggaaacctttgctataggaagaaatctggtatttggaagggtgaaatgactcagccatggcctcgcaggacattagtgggagatcctccaatgcatgtccagatacccagtcaatgcagtttccgccaattccaaacttttcaggatgtataggggacaaatatgccacttaatatgcagatctagttgaattatgtgtgtttaataccgaacatttaacacataaaaattta

SEQ ID NO: 913713 - DNA, 4001 bp, Homo sapiens
acagctgctgggtgttccgagcaggaagcctgacagcgtgactagcatcccagcctcaggataaaagatcaggtgaagcctgtgccacaggcctctgccagtgctgatttgtacagaatgttaatagacttctggttcatcaaatctcaaacagaattaaggcatggatgggctcctaataacatcacactttatattcatgagacataaattaaaggatgcaaaactgctattgacaaacattgattctgggccctttgaagtgttgcccacagttgcttgttggcttcaaaagttttgttttaaacctcattaggtaagacttttactttttaattattttttccccttttgctggagtctttctttgatcaagcggaggaaaaaaaacatggtgttcatatttcaggacaattgtttcctatgttccttatttagctatgctggttgcaggtagagttctgtcaagcagcaattacctattaagtgtgggttcttgtggacacaattgatctctttaataggcatgatcttaatctcctgtaaacaactgactgcccacagaaatctatgcctgggttccaggaatcctcctgacttgagtcataaatccaggttttgaaatgctgctgccagcggaggcatgtgctcacctgtgcccccctgcccagccctgcccctacctgccatccctgtttggcacgtggactgcatcagtggctgcatctacttctgaaagccaagttgctagccggggagggccccacagatcccagcccaaaagaatgccccagtcaccagatgagccttgaaggactagccaagtcctggtcctgccattttacctcctaaatgacttccacattattttcttttatccacatatttttgtctccatcctattttaggcagccatcaactccccccaccccgcctcctataccatcaacatccacctgatcaccataatacaagcccatgttagtagtccctttttctttttattattattattattattattttgagacagagtctcactctgtcatccaggctgaagtgcagtggcgtgatcttggctcactgcaacctctgcctcctggattcaagtgattctcctgcctcagcctcctgaatagctgggaatacaggtgtatgccaccatggctggctaatttttgtatttttagtagagacggcatttcgccatcttggccaggctggtctcaaactcctgacctcaggtgatccacccgcctcaggctcccaaagtgctaggattataggcataagccactgcgcctggctgtagtcccttttcctagaaagttcttctctagccctactctgtccttcccctaatccttatgacaaccataaatttgttaactggaaccctgctcactcctgagcaagttaatttagttaactctcctagttaatgcatctttcatctcttagcccaaacattacttcctcagaagccctgcatgcatttcttctttacagcatttatgaggttgtaatgtcacagccgtattgctatttcattaatatttgtttcccattgtccccattagactgaaaactcaggagagcaggcactctgtttcaatcaccattgaatccttggcatagatgcccagcactggatagacgctcaataagtttatgttggatgaaatgaacaaatgaatgaccactttatccatgtgacagttggacatgttatcaccaggatgccttagatagcatagccaactcaatgtgaaaggaaaaactggatgtggaaaactaaaagtatttgtgaaattttaagcacacttcaacttattcatgaacactccattaatattcatcaaatacttacagaagctctgctgtgagccaggcattggtgatgtggggatgaaggaggcagatgtgaactggttgaggaggagatgggcagacagtgaaaaagtaaacagttaattttcgttagtggtttctatgaaaaagagtgaaacaaggcgatggaatagcaatcctcatgggcgggacgatgggaggtggttaccatgacatggtggccacggtgacatggtggctaaacaggacatcggtgcagtgctgaggattttgttggtggttacttgatcccagagcaagggccaaggaggcagcacacatgaggactttgctggagtcttcacagtgtttgtacagacggtaaaaaacaaaaacggaaatgttcagacaagtcaaaccatgaaatcactcatgtgactcaggcgtctcttttcccctccactgcctcgcatgaattactgaccttctgactttgtggagagattcccagaaaacaagccagaagcttttcttcctgtgtcaacaggaagtgacctggtgagtttgctgttcatctttgtaatgagattaatttccctgacatgtaatcttctctttatttcaaacaaaaagggaacacttttgctctttttgtaataactgcaggccttccacatattgtctcttatttccctaaagtgttgttatcatgacaaagtgaaattaaataaatttctacagttagtcctaaaggagaacattctctaaaatatacttaatccttttaatttagaaggaaaaagaggctggctaatcacgtaatacgtctttagctggggagctggaactaacctacctgggatctctggtttttaaatccaaacacaaaggctttagtgctcatccagatgggggtttcagatgttatcaagttaatctggtctctctgttccctgggtgacattttctcacgtgttgggttacgtaccgctggagggagtccctgccctgcatgggaggccttgggagtctggtttctctagttggctgattctttaccaaaaggaaaggcttcttcacaaggcccttgccagacacccaccctttgatgttctaggcaagggatcggtttttgtttttgtttttgttttaagagacaggatcttactctgttgcccaggctggagtccagtggtacgattgtggctcactgaaacctcaacctcccaggctcaagtgatcctcctgcctcagcctcctaagtagttgggactacagacacttgccaccatgcccagttaatttttaaattttttgtagagacgggggtctcactctgttgcccaggcaggtcttgaactcctgaggtcaagtgatcctcctgccttagccgcccaaagccctgggatcgcaggtgtgagccaccatgaccaactgagggattgtttttatgcagcaatcacctgttgggcctgaacaaacgtgtttcacgtttgttttcctcaagtaccttgaggcttcttcctgctaagccttcaggaaggggaggcagcctagagaagcacctaaaagcagcagcttggactcagaacagacctggggttgagccccagctctgccacctccccactgtgtgacctcaggccagtcatttatcctttctgggcctccgtttcctcatctataaaatagggataatgtagctctttcttcgtggcgttactgagaggtgtatatgggagcataaaggtaaggtgcctagtgccacagtgggcatagaacagacctttgcacaacaccctggctttgaaatcagtgaagtctttccatgggatgagacttgctgagcccctcagagatgaaagggcctggttctcggtaagtctagtctccaacccagggaaggaatgaccaccttctggggatgaacccttgtctaatttgatctctttaggatgggatcaatgtacactttctgaaagggccagagagtaattttctgctgcaactgctcaatcctgcagtggtagcacaaaagcagccccaagtgacacttatgctaatggacatgattatgttcctataaaactgtatttactaaaagagggccttggtttgcagacaccgctttgggagaaagtgatgcagccaaagcattgcacagctagagg

SEQ ID NO: 913714 - DNA, 4001 bp, Homo sapiens
tgaacgacttggccactttcccctgatgtctgtatgccagcctgtggaacacaagccgccttcccgaccacctgtctggcacacatctggggtaagaaagcattccaaagccccgaatcctctctttggaattgactaagctcattgcctgaaggctaactctcatattttctcttttatccattattgacttataatttcattgctaaccctaaaaattcaatggggtttgcaaaaaagggatttttcgggaccattatccttttgtgaacttcaaacataccgtgtcaacgtttctccttgcccgcaaagtttaggatctaattctttccgactggtatgttctctgggccccgcgtgggcctccgatgatttctcctgcctttctctagacctgtggtatttctgctgtgtctcggcctcagacaccaacaagccatcaaatgatgtaggggcttgacaacaatttgtaattacaaccaccacacacacacaagtcatgatttgaaaagaaaaccctttcagaagtgagtcacttggcaacttaatacagagctaagataggtgtctgagcacagttgacggaaaagaaaggagaagctattgttttaaaaacatgctaatcagaaaactgtaacttaatctgcttcattcaggaaacgctctatggagtgaaatggggaacaaaatgcaaaggtacttaataagacagagaggttatgactgttattttagttcttatcctctgcccactttctaccacccctcccgaacaaggcggagcattctctgatttttatggagaagttgtgttcattcttgacattttaagggagtagagctcacatttatttgcaagccacatacatgacctcgtttacttgtggccctccccaaatctatgagaggttagcacttgatttgcagaagacaacactgaggctcagagagattatgttccttgcccaacattccacagctagaatgtggcaaagctgagattcgaaccctggctccaaagcccacattcatgcctcagaccacaaccagcacggaactccaaggagactctatttctgtgcaaggtcctctttccatgcccacagagatccatctgacactcttggaccatggcacacagaaggaactaacatcttgacaagtcatctgctccggaaggtcctgagtcccccgttcaagactctctgatgggacttcccttccctgcgcactgcaacctcccttgggcccctgctcaccttctctgcctcatctgctgctgtcacagggaaaaggagacaaagtactaaacacaaagcttctccccaaatccaaactatttatgcagacccactgccaggatcttttgcagtcagcaggcttcccctctaaggccatagcacattgcttcttaccctagtgtcagccacaaatcgctggaaaactgtgtgtgtcagcaccaatagataggtatattttcctggggagagagtttatagctttccatggcttctcaaaggggtctatgagatccatgacagattacaatccatgccctggggcacattttcttgccccagtctcctttgctggaatgcattcatggaggctccgctccaagatggctcaagtcagacacctgttcccatgggagtggctgctcaaaagaaaccaagccacaggcctgcattggttcttgtagttagaacatctccaacttggcaactccagcctttcactctaaagtttctcatcactcccagcctagcttggtcctcctagtaaacttcggagtctctcaactacaaatattagaaaagaacacttaccccacaggctgtctttcccaccagagccattaacagcagaacatggagatcagacatcctggcaaacatctttgcagtttaaggacttgtgttttcctctcaataaaatttcttttgttgtctatgcctttaggggggaaaaatgtcagtctccaaggattcaggaacaaatgaagaggatgcaaattattaactaggcatcaaatactgtttaatgtttaatgttttgcaaactaactatcttgattaaacaaatggcaactttggggctgggctgagtcatgaagtggtttctcttctggggagaaactctccaaagaaagtagctgacatagccccctggctccacggtgcacatgacagctgctgggtgttccgagcaggaagcctgacagcgtgactagcatcccagcctcaggataaaagatcaggtgaagcctgtgccacaggcctctgccagtgctgatttgtacagaatgttaatagacttctggttcatcaaatctcaaacagaattaaggcatggatgggctcctaataacatcacactttatattcatgagacataaattaaaggatgcaaaactgctattgacaaacattgattctgggccctttgaagtgttgcccacagttgcttgttggcttcaaaagttttgttttaaacctcattaggtaagacttttactttttaattattttttccccttttgctggagtctttctttgatcaagcggaggaaaaaaaacatggtgttcatatttcaggacaattgtttcctatgttccttatttagctatgctggttgcaggtagagttctgtcaagcagcaattacctattaagtgtgggttcttgtggacacaattgatctctttaataggcatgatcttaatctcctgtaaacaactgactgcccacagaaatctatgcctgggttccaggaatcctcctgacttgagtcataaatccaggttttgaaatgctgctgccagcggaggcatgtgctcacctgtgcccccctgcccagccctgcccctacctgccatccctgtttggcacgtggactgcatcagtggctgcatctacttctgaaagccaagttgctagccggggagggccccacagatcccagcccaaaagaatgccccagtcaccagatgagccttgaaggactagccaagtcctggtcctgccattttacctcctaaatgacttccacattattttcttttatccacatatttttgtctccatcctattttaggcagccatcaactccccccaccccgcctcctataccatcaacatccacctgatcaccataatacaagcccatgttagtagtccctttttctttttattattattattattattattttgagacagagtctcactctgtcatccaggctgaagtgcagtggcgtgatcttggctcactgcaacctctgcctcctggattcaagtgattctcctgcctcagcctcctgaatagctgggaatacaggtgtatgccaccatggctggctaatttttgtatttttagtagagacggcatttcgccatcttggccaggctggtctcaaactcctgacctcaggtgatccacccgcctcaggctcccaaagtgctaggattataggcataagccactgcgcctggctgtagtcccttttcctagaaagttcttctctagccctactctgtccttcccctaatccttatgacaaccataaatttgttaactggaaccctgctcactcctgagcaagttaatttagttaactctcctagttaatgcatctttcatctcttagcccaaacattacttcctcagaagccctgcatgcatttcttctttacagcatttatgaggttgtaatgtcacagccgtattgctatttcattaatatttgtttcccattgtccccattagactgaaaactcaggagagcaggcactctgtttcaatcaccattgaatccttggcatagatgcccagcactggatagacgctcaataagtttatgttggatgaaatgaacaaatgaatgaccactttatccatgtgacagttggacatgttatcaccaggatgccttagatagcatagccaactcaatgtgaaaggaaaaactggatgtggaaaactaaaagtatttgtgaaat

SEQ ID NO: 913715 - DNA, 4001 bp, Homo sapiens
gaagtgtctttgcaactcatttggtggcaaaaacatgcacctaatctgaaatgacatgacgctactgactttttccctttagcatgaacacataatttcattacagttattaagatggttgattagagagaactggctaggaccttactgtgggtattaaataatatatgatatatgtaccgaattacctttctaaaatctgaaaaacttgaaatcccaaagcagactgtagacttgtatccacacttgcaaattccaaaacggcaatttttcagttatgagatgaataggtttttgggagagcgtttgcttgaggacctaaacccactcatttaactgtttctataagtacatacatttactgttttaaacaaccaacttagaaatgaactgctggaattctgtgagttaaagacttcctatataaaatctgaaaacctagggtaccagcagcaggaaccaggtctccaagcagctgggtgacaaattccttcaaagcattttctagggtaatccctaaccccagctccaatctaccaatcaattgtagctacgcttttaaacgtgtatcattactgttcgcaatttgctgcattgatttaaagagcttgttttaacaatttccagttatcagggccctcagacatttttgaaaaacctaccgaatccgaaaattattcctaacaccaatacagtacttaacgaagagtgagctattttagtaagttcttagtcatttaagagggaggttttaagaaatgaaccgcaagtaggaataaagaaaatgtataatgttcactaaacttttactattttgtcacacacagctgcatgacaagtcatgatctttaaatatatcaaagcaaactttcaaaaagtacttaaatattatgtcaaaataaaaaattgcaaaatccgaggtttttttttaaattgtgcttcaaattaaccagtcacaaccaccagtaaaaatagggaaagagggggagggggctgtcccatgacatcatctggcaatatgtagtttgaagcctgacagcgctctccaaataacccttacgaagatacagctgggaaatcatccctgtcaagcttagataacttgggtttaaataaaaggttcaaaaagcctccccccacctgagtcacatgtctgtaccatatgaaaaataaaaccatcactgatgcatctacctcccactacactgacagcaacggaaaggtcacaattaagtggaaactcgccgcagagcctgtttaatctgaagggggaagggaaagaaaagcgaagaaaaggacaaaaatctgcgcgcctccaaggcaggcaggcaggcaggcacctccgtggaaaacccactcccgcctgctgacacctatgctcatccaacagatcatgccgactcaagatgcaggtcattctcttagagaaagtgggggcccaagccccagaaaataacccaaacatccagcggaaccgaccacccccaacatttcccgagggtggtaggtgtacctcgcgaagtgttcggggctgtccacgaggcacaactcttttatttctgcccaaggaagggcggcctgagtgcgtctccctggagtgccagggcgtgcccagggtaaacgcaggcctcctgacggccctcgcccggccgccgtccctcccaactcccgccgtccggggcgccagacggccccggcccaccacctaccgcggtcgcgccggcgcccgccgatacgatgggcggcagcttctcgcgctctgactccttccctttcctctcctcaggcgcgggcgccgccaccaccagcggagtggcgggcgagggtacccgaaccgcctcactcatgtcgggccgggcggcgggagcgccaggcggcggcggcggcctcagtgttgctggggctggcgctgctgctgccgccgcggccgcgagagggctctgggctgccgcttctagccgccgctgccgccgccactccgcccccgcccgcgcccgcgcctttgcgcgcgagcccgaggccgcccccgcgcgcgccagccccgcggacgcggctccccacaggtcccacaggtttcttgctctcgcctcccccgcccgcccggggctcgcgcgtcgcgggtcgggagcgccggcggtagtccccctcgtcaaccccgagggcccggagagaaggcgccacggtcgacgcccgaccgccatattgtttgcagagtgtcgcccgagatgacgaggagaccccgcacccgggccgcgcaggagaacctggactaaggacgggcagtcggggagacaagtcgagccctgcaaagggtcggacggggatagagtgtccgagtggtaccagtagggcaggacgtaggcacagactacccttcacggacggccctggcctgcggcgccgagtcccgcgggcaagcgccctcggggtctgggctggtggcctttcgccttcttccaggcgcccacaaagctgtccgccttggggcttctgccttcttatccttgcccgccctcctgagcccaggagaggcggcccggagcttgcgcagcccggggagacagccttcctggctcagcaaccgactcttttgtacacgcctggatggcttcagcctacacaggaaaagcctggaggtggggaggagtgcgacgtggtgggccccccctttccccttcccccataggattggacggccagtccacactttccattcctgttcctctcgtccctctttgactgccaaatccgcctctcccttcccgtccccacgcgcctacgttttgctctctccccgcaaccctttgctgtctcctatccgtcccttccttgttcctttccgtttatgttagagatgtacatacccaaactctgctgcacagtcctcaatcaaatcattacaaataggagtaaaaacttgaaagccgaagaagagagcttttaattatgaaattaaaataccccccacctccaccaccaggacacctagacaatttcctttcctttcttgtcgccccctccttttcctttttctcagtctactggagcggcggggacacctgctgatctaggagaaaagagagtaagaatgcgctgtatcgcctgttaaaagcaaggaatttcgatattcagctctatcagattttttatctgtgccttcattattttattggaggttgagtgaatttttagatcaagagtacctaagtccaaatataagaaccaaaaatatctctgaaacaaacccaaatatgatttcggggtatctattgtttacataatttggagttattagtataactaaatactagttatggtgcatcatgagataaggttgcatgttttcaaacccacaatttgtaacaagtagatctgaagcaaacaatgttgccttctaaattttgaattctgactttcatttatagaaaggctttctactttaatatagttgctgttgccacctatttacttgttaattaacaaaaggtatagaataagtgccatatagtcagcaaaaagtatttcagtgctaatagccttggagggaaaatgatgtatgtcggcattactttgaagcatcctcctcctttctattaatatttttctaaattctttttcaggattttctttccttaaaactactgaaatactcatcccatagagaggaacataacattattttctgcttttagcaggtctgtatgctgatcatggatacaggaacaactcaaatgttattttataaaatgaagcctttattttagctgcaatttcagatattctgtgctaagtctaggttgatagaacaaatactagagggaaaagtatcctctttcctattgttttcaactagatttagtaatttgctataaaaatgtttggatgagaaaccacttggataacaggccttctgctttcttttttcatgtgtgagactaaataaaagtgtgtctgtacatgtagtcacattcaatagaacaaactgcttaaatattggcaaa

SEQ ID NO: 913716 - DNA, 4001 bp, Homo sapiens
ggcacccaaacaacctctatgtgcctcagtttcctcatctgtaaaataagatgactaataaaacctatttggttgtgtagttcaataatagcaattgtttatactagtaattaaactagtaagtttaatagcagtaatagtaataatgaacatctactttacagaatagttgaggattcaatgagtaaatacatataaagcattcaaaacaatgcatgactcctaataaatgttcaagaagtattaacaatgctgacaaaaaaattattgttgacataacagggaaccaacggcctcattactcgtttttggaatgcattattttccaacttaagtagttttataatcatgagttaattcactattattaaggacagaaattctgcaggcagcctgagttgaaatttgacttcaacacttactatgtgcccttctccctcagtttcttcatttgtaaatgaaaataacaaaaaataacctatatcataatatcggtagagtttaataaattaataaagcacaagaaaaccacgtactaggcagtacttaagagtcaacgatcattctttttcttgcatatgaatcaagcagcagggtggggctttagaataaacaagaatttttcaggttaaaaactgtttttagtaacttacaaaatgctctctacaagaaaactacagcaacttgtcattgaaaaagtacggcacatttttagctaaagaatcttatgtagcaatacacaggccatgaaaccaaaagaaaaacaaacagcaagttgatcacttaggtggaaaacagcactacagtataaggaaatcattagacttggattccagcccagcctttgattgatgctaacttctcctgccctcagtctagtacattacttctgcaggttttagcgattcctgtttgccatgagacatacatttaaggtaatttttaaaggaaataaggatgacaaacgaaaaaactcactatggactttgaaagacttttcatggctaaacaagcaatctgaaatgctcatttaaaagtgatgggactaccaagactacatctcatagaaacacaccattcaaagcacttgcgaaaggattctcaaaggcaatatctgtaaacatacaaaaaagacaagtaataaagctgttttctttcagttattaaaaagcccactaaataggaaagcaaagaacacaaaccacacctccgggttaaagccgaggttaccacaggctttcacgacgacgaacctgatgcctaaattaccttttccagcatcttccgctctctctctagtccagcagcttcaagctgttcttcctcttctagcatggccggggtaatcacagcagtgtccagttgttcaaccattgctggagcctccgagcctgacgggggagaaagctttcaaattgcagttttaaaaaaattaccaactactcaactccaacaagaaacagcctttctcccacccgagatgcactggagcaaaagctgaagaccgaggggacgccagcatcacctctcagaagacaccgtaagtcttcacaatgtctacaagtcgcctggaccacagtttacaactcgggatgctcgggaaaatgcagttgcctatgtgaaatcttcaccggcatgctaatacgtgcgattccggggtgtcctccactcaccgttgcagtttcccaaccctcctttcctcctcagtccctgcccggggtcggctccctccccgaaactccgccgcagcctccatgcttgcccacctcagccccgcaggctgccacccgcgcccaaaaggttttcctcactcaccgccgctgcccgcgggccgttccgctggcatgcctggacactcacccgggaaccgggtcccctcctctcagagcctgcaatgccgcgagctaactcctcacaaccgctgccggcccagccttctagccaaatcccccgccagggaaaaaagcgcgcttctccttcgcgggaaaatcctgtcatctcgcgataccttacattccccacccgccctcccgccccgctgcgcgagatttggcgcagcttgcggttttcgtcaggactgacctgtggcaaccgtaaacctttacctggacctctctcaggaggaaactgggtcccgctgccgaactcagcctgtaactatcctgtgagattgggcgaggtggccgatcgtggagaacccagtttcctcacatatctggttccgaactacgcaattaaagtttgatagtgctgttaatactttgcaaggcgccttccaacgctggctgctgtgattgagcacccgctagcccatgatcctgtaggtagagacgtctgcgtatctgcacgaggatgtcagaaacagaaacatttttatagggccagcctcgccgcacccgcagcgcgcggctcacatcttaagtgaaaaatcccccaaaatgacaaagaggagggcttttttgtgggtgggacgggagagagaaggaacaggaaattaagattatgactgggttaaagaaagctgtttaggataagggcaagctgaaagaagtgatggaccaagcggagtggccagcagaaggaagattcaggaaaccaaacaggattcattcattcgagtgggcagtgaaggaaggagcggagcttttcttgtccctggttttcacttcagctttcaattcctccttttcttgtttgcattccttttcaactatttcctttgtctccctctccagggctccctttcccacctccaatttcttaagatgtatggcattaaatatacctaccatgtaaccacccgtttccttcattttgactcccacaacttgtatgattgtgtctatacaaaatttaagagtttacaagccgggtgcggtgactcacgcctgtaatcccagcactttcggagcccaaggcgggtggatcacgaggtcaggagttcaagaccagcctggccaagatggtgaaaccctgtctctactaaaaatacaaaacagccgggcacggtggcaggcgcctgtagtcccagctactcgggaggctgaggcaggagaatcgcctgaacctgggcggcagaggttgcagtgagcagagatcgcgccattgcactccagcctgggcaacagggagagactccgtctcataaaaaatagaaacgaaacctagtctctatattttattttattaagatagggtctcactctgtcgtccaggcaggagtgcaatggcacgatctctgctcactgcaatctccacctcctgggctcagttgatcctcccacctcagcctagcaagtagctgagactacaggtgcgtgccaccacgcccggacattttagtgtcggacattagcccattccaggctaatttttgttggtttggggtttttgtgtgtttttgttttttggtagagacggtttttcgccatgttatctagactggtctcgaactcctaggttcaagggatcctcccaactcggcctccggaagtgctgagagtgcaggcgtgacacattgtgcctggcccctacaaacatttccaaaattagccggctgtggtggcacatgcctgtggtcctagtacttgggaggctgaggtgggagaatcacttgatcccaggtggtcaaggctgcagtgagccgagattgtaacactgcactccagcctgggtgataaagctacactttgtctcaaaaaaaaaaaaaaaaaaaaaaaaaaaaaaaaccatgggaataaagggaaatcttgagttgcttcaagggaaattccaggaacctagctagccctgacaagtaaataagcaacttgataaggaagaaggtaatggtagcctaaaacaacagcccaggaagttagattcaggagatgtttggttcctttataaaaactagagataatatcttaacacatgtctctgagttgttttttagaaaccccaagcgccaccaaacacatgtgctggcactctgctgcctcatttgttctaaatttattcct

SEQ ID NO: 913717 - DNA, 4001 bp, Homo sapiens
ttttttaaaatgtatcatacagaaatttttagggaaaatatgacactttctatgatcctttgcaaaatttaaaacatattaactagttttgacttctggttatcttgtgatagactaaactaataggaataagtaccttgatgaaattaatcacaattttttctactttttgctttaaataatttcaatgggaacaagaaataagacatctttcctctgcccaaaaagcaaatatacacagtgcaaaatttagccaactgcagaaacataaccttgcaatcctagtataattaagctttctaatacctacctccacatcaacagaaaatggagttcttatctgtaacagaaataaaaccaataatggaaatttaaagcaattttccacaatttaaacgactctcccaattactctttagcccagagagaaaatgaagattctcttaccaaaccataatcttaaatcacctccaaagatcccagatttcaaatcaaaatactaacattccaacctcactaattttaaaactaaatcaatgtgcataattataatacagaaaaaaaaacatgcaatttaaatatcaattctctccaaaattcaacctcttttattacaagtggtaaccgggattaaaaaaatcacccgtgggcaatctatatctatctatatctctgagacaattatttaaagattggcgggggggaattgcaaataactccagcactgcagatttttcaagaataggaatggatagtctgatggcgaaatctgtagaactttccagcacactgactgaatatttcctcacttgtaaagaaagacacaaataacagagtccacttcatctatacatacgtagacttttaaacacatcgcgttactaaatatcataattacaggaagtcagccttattctgtagcagtcatccacattcttacagagcctgcgaagtttcaactccaattttcctatgttcctgttagcaagtgcccaaggtgtcccattccacgacccatcatcccattaacagaagtttgatttcattcttttggggtatcagaactcgataattcccaagagttctgcattgtcttcccatatttaaaaacaaaataagagtaatacaggaaaataccccgacttcagcgcgcgaggtttaaccacccttttctttaaaacacagaggcgtcctctcgccagcaacaggtagggaaatgagaagcagtttagtcccgtctttccctgaacgtgcacccagatcagctcatggggactgggaaagagaaatcatctgcacacacccaacctcgcagccaagcagacgactaccgcaaccggccgctcgcaacagcttcagaggccggcggccgaggcttggcagtgcgcggcctcaacctgagagaagcccatccccaggcagatgagacattccagccccggggccagggagccacagccctgccctcgccccacgcccctcacccccaggaagcgcggagaaagcgccctatgccgggccggcctgcatccgcccagcccggcctgcccctccctaacgccgtcacacgcccccgaacccgctggggccacaactcgcccaagcccttcagggtaggggaagcccaaggtgacggggggcggcccctgcccagagagcaaggcagcgcggtcgctgaagcacgtctccggctcctgggaccctcctctgtcagccagtggcgacgatcaccagggcacctccggcgtctgtgccgctgctccgctgctcccctccccggcccctgggaaactttaccgggttccttagagaaaagcggacgccactgctgtccagtccagagacagccgtcagcgacccggatggagcgggcggggaagaacgggaggcaagcggggcggagagcaccaggggtggggagagttggggaagagactgggtaggagaaggcagagggggaggtggccacgcgagggaggcgggggaggggctggccggaagtgaaccgcagagcacgcgcgcgagcccgcccacttcccggccccggcaccggcgcctgcgccgaatcttccgggggggggggggggggggtggctggccacaggcgcctgcgcagtgtgccgctttgcgttgctttaagagggaaaagccaaatacagaaagttggagtttgcgaagacaaacgaagaagatgtcaactgtttttgagaatgcttcggcgtgcacaaagccttttaatgaagaaaatcactttgttttttggtttggttgtctttgtgctcatggatgctagctagtctttttattattttactctctcttttcccaaggagattttaaagtagcagatgaaacatcacaattatgaacataaagactggtgaagagttattttatcccatggcctcaactggagccagtctgaggatgtgagatgtgttgatggcaatggctgaagctactctactaccaccaccaccagttcagtttccttgtacagtgttggctaccatcactttctacactctccctgaaagataggcttgaattgcagggtctcattctatcagagaaaattacacattggctgcagtccctgattcataaaaacgaagtctggatctcctaggccagccttaacttcttaaaaagcaggagaacttgaaacaatgcacttttgaaattgtaagttgggtattgctagaatgaatattcagtacctagaagaagttccacaaataggccatctttctttttcttttcttatttttatttatttatttatttatttatttattgagacagagtctcgctctgttccccaaggctggagtgcaatggtgcgatctcagttcactggaacttccgccttagcctcctgagtagctgggacaacgggcatgcgccgccatgcccggctaatttttgcatttttagtagagacaaggtttcgccatattggccaggctggtctcaaactcgttacctcaggcgatccacccgcctcggcctcccaaagtgctggaattacaggcgtgagccaccggtcctggcctgtttctttatctcttgttgaaaaacatgttttagataagaactgtctgtgctagaatatgttcaagtgtgtgtattcgtgtcctaggcttgccatataaattaaaacagattcggtggcttaaaacaacagaaatttattgtctcacagttctgaagaccagttcaaaatcaaggtgaaagtaagcttggttctctcttggggtctctgagagataatcttttccaggcttctctgctagcttctggtggttgccaacaatccttggcaatccttgtagaagcatccctcttcaccttgttttccctgtgtgtctgtccaaatttccctcttttataaggacaccagatattggattagagcctaccctgatccattatgacctcatcttaaccttattacatctgcaaagaactcatttccaattaaaggtcacatttggccgggcacggtggctcacgcctgtaatcccagcactttgggaggctgaggcgggtggatcacctgaggtcgggagttcgagaccagcctgaccaacatgcagaaaccctgtctctactgaaaaaatacaaaattagccgggcgtggtggtgcattcctgtaatcccatctcctcaggaggctgaggcaggagaattgcttgaacctgggagacggaggttttgcggtgagcctagagcgcgccattgcactccagcctgggcaacaagagcaaaactccatctcaaaaaaaaaaaaaagttcacattcacaggtactggaggttaggacttcagcttatcttttgagggatcaaatttaacccacaacagtatgttacagaaatgaatgtagaatgacaagatgcttaagcaaggaaagcataatttcaacatgagaaatggtaggaatgttcacaaaaaatactcatattttgagagtttcattgctcttgttggcttttttt

SEQ ID NO: 913718 - DNA, 4001 bp, Homo sapiens
acaaggcctggctgcgcgggaagcgctcgggcccggacacccgcattaggttgcgcgaggagcctccaatcctggccgggggagccgcggcctcctctgatttcacacccagcccgcgggggcggccagttaaagccaccccatgggctatggcaacatttccgtcaatgtgtttcctgttggtctagctcgaaaaactctttgcttcctcctgcgcggtcccagcagtaacccaaggaaactcagggcgcactgtgaaaacgttagcccccaggcccggcccggctgagggtcccgctccagccccgacaggcgaccacagccaggctcgggccgcatcatcaaaccctcgaggctggaatcagacagacaggataacaactcaaaaacataaaaagatgaactaaaaatacaatccccctcccctgttaacggtgagaaggtaaggtaaagggctgagctagagcccgcgccgtaataatggagacattaaaatgctaattaagacgttaattgttttcagggtccctactgaagcttccaataacagagttcatttaaaactctagaggcgccccgtttccttatttaccctagggctccagacctcgaaggcgccaagggtcacccacagcgcggaccacgggcggcttatttgttaggccgcacattgaggggacaagccccgaagttctggaatatatgccctatgtgtccctgcttcccttcctaactggcgaccaggagctgctgcttcctactcccaaagtagtgtcggtcggtccgtccgtccgtctgcaggcctgcacctcaacgctttgaaagctagcattgttttttcgagattttgcttgcgtcaggcttcagactggtgcaaaacagcctcgaaaaaaaataggaagcaactggttattttagctgccataaagtcacatcccacacagaggaaatgaacaatatcagaaaaacggatcccggctatcagaagtcgagtgtttcctgaatttgtctgtattgaggatgtcgataaaataatcagcagcgtgcactactccgggggaagggtctgcttcatgcagccaggaaaacacttaacagcttctgaaaccagatttactcctatcgagaactcaagatttcctgtatgaacggaaagggtcaggctctttcactgcacaagcctgttgaaccaggtccagccccgtagccacccgggcccggctgcgatccctgccccacgggggccggccaggggcgcctcgacgcccctttccccgtccctcccgctaagggagccccaccccgggtaacacgcgcggtccacggctgccctcgccgcgaggtctaccgccggcccgcgcgccccgacgcctgcaaggtgcaggaaaaccaatctgagtcacggtgcggtcagccccggccgcgcgcctcccgtccccgcgcgtgcccgacagctgcttttccatcgcttttgccacagccgtctaccgcctgcccccttcgccccctcggcctcccgggcgctgccacctgccgggtggcgcttcctcgcccccaccctcgcccggccgccttacccagggggtcgtggcggagcagggcgtgcgtgtagtcgttcaccgtccgcgggaaggggtacagagggcccccgaagccgccgggtccgtaggcagcggccagcgcggcggcggagtggtgcgagaaggctggatggatcggcgtgggctcgtacaccggggtccggtagggggacacgaggctggtgaaggaggagttgggggacggcagcgtgggggcgggcgtgggcgcggcgggcccgcggcccaggatgtcctcgatgtaaaagggcgtcgggtgtgcgggttgcagcagcggcgtgggcgcgtacagcggcacccccacggcgcccgccgccggcccggggtgcgggtactgcatggctccgccgcgctccggcccctcgcagagctgctggcccgcgccgcggcgctacatttatccgcgctccgcgctcccggcgataggctccgccggccgcggggtggggccgcgctcgctggccccttcctgccgccgggccctgcggccaatggcgcggggccccaagagcagccgcccgcccccaccccggcccgccccgccggccaagctccccgcccccgggacgcgcttgctaccaggctccggggaactggcgccctggtgccccgccgcggctgtcgcccctggggactccaggcaccccggccgaggacgccctcgagggaagccctgggccgcgtccgtcgggggaggcgcgaggaagaccgccttctggagtgcgggctccagcggccctgtccgcggccccgaggcacctctgccgaaattcgggggcgccgtccaggcctgggcccggggtggcagcagctgtttccaggcggggagcagcgggactcggcgggagcagaggccgctggcctaagacgcctcctcggtgggtgcgctccctggattaacagtggcgctggctgtcacaccggccgtttcccgagctcagagcgggacagtgccctgggttcctagggctgctcggcggcccttagctgcggcccggcgggattcggatggctggagttcaggtgctgcggactcttggccgctccacctggtttcatttggaggcctcggactcaagccacttccgcgaggatgctggcagaagccgctgcgagcagcaatcaaggggaggcccgggtcctacagcgccgggcagaggctgtgcagtcttcaatccagtgggggccgctccgtgtcttttctgctggctcttgagggtcgcagctgtgcgcagtctggctctctggttttgcacgtgttttctattgaagcagtccgtactgctggcccgtatggcctcggctctgtgcggctccactcgcctccggggcaagggggcattttcttgattgacgccctcctgcggtcgtcacacctcgcggtgagccgtttctgctaaggtcctccattaatcatggaaatggaaagacttccctgctttttctattgagacttctcaggttttaaagtttataatttggaactatttgtccaaacacagcgggaccacagtaggaagaggcgtggactgtgagcctgaccgcctgttcgagtttcacttcgcacatttttgttgagcaactactgtgtgccagcagtgaaaaggacagatgtagtccctctcctcatggagacaggaaacaaattttaatatatgtatgtgctaggaaggagatgtacataatggtctaaaacctgtaacaaggggacatcacctatctgggggacattaaggaagggaaaagcttcccaagaattgatgtttgaaaagtgagtgggtgtcagcaagcccagggtgcttggacattccaagtccggagaatagcatgtgagcgttgttagttaatgcaacttccgtcaagtcaccatccctgagtttttctcatctgaaacgtttgagacttggcctaaaggctcctgatctttttagggtattgttaataggtatctttcagaatctaatgacagacaagagctacaagcccagacaaactcagaagtgtactacactatcattcgagttaaagcatgttgggggtaggtaagaatataattgctctattatacagtacatataaatcataaatttttatattactccatgatataaactatctctggaaggataacgaacattggctgactatgaagaaaggggtgggattggagggggcatgtatagctgtgaatatctggagacttgcactagatggatgtatgacctattcgtcgtataagtaagtccttgaagaagtggctgattctagatctagggcaagaaaagtacaaggtaagctcaaagacatcttgtgtcagaaaccgtgaaaagaaaatagggaccaccttggagtggtttccatcggcaaaatttggggtgatttaagctttaaaaatacattagg

SEQ ID NO: 913719 - DNA, 4001 bp, Homo sapiens
aactcttctggtcaaaaatcccatcattatgacaactgctaagtgttaagaagaagaaaaaaagatatttcaaatccattcacttagccacagactgctgataaggagtcaggaacaggagtgagtgaagcaagagactagagagaaacccagggttggacaccaaatgcgagagggtaattcaccgtgaagtactgagcgaaagcaattccccagaggcagtgttatagtgtgggactgaatactgtctcggacctacataagaggctgtcctcataagcaggaataaaagcagagaggaagaatcactgtcttgtgtgtcttgtgttgctgttgtgataggaaaaacaaatttaatctgatcttccctaagctagagaatcctaaccttctttactgcagaatcacaacaaactatacaacttttcaggttgaactatcctcagtcatcacaatacttaaggacaatggctacaaacaggcattttcagagctaaatccagtgacaaacatttttgtttggccccctgcaactttttttctttaaatctgatttagttgctccatttaaagtcaaaagattttaaataaaaatcctgattttgaacttctcttgaaaatcggaatatctcccaaccctagaactgcactccaaaactgaagcaagcagagtcaagtaatgacctctcaccatggttttttgttttagtttttaattttgcagagactagctctcaccacgtttcccaggctggtcttgaactcctggactcaagcaatcctcccacctcggcctcccaaagtgctgggattacaggcatgagccacccccgccggccttggcttctcactttgaacaaggcttatgccttcagcctcatcactgatttcacacagacgatattactccttccattcacctgcctgacccttctaggcaactaactctttatgaggaagaagatgggaacccagagattcatagctcaagtttaatcattccctcatccctcaagctacagaactagctggctgtagcaccaagaaccactaagaactcaaaccccttaaaggctggaagaccagactactccttcaactggaatccagagatgggagaggccaatctctaattgacccaattctgccacaccttcaaacaagtataggaaagaaaaatgagtgtcctaaatccaacagaaaattaagctttcggaatttacctctcttcccctcctcgctgctgtatatcctgcagtttctcaacgaactcatgaaatttcatttcttccctgttggacctcggcttaaagttctggaaattggccatcttcttctcatcatagtacaagaacttgtgggtgctggcactgtacacagagaagtctccattgccaatattctcttgcaggtattcaaggtcccatttcagggcaggatacacaagatttgtgtcggtcagcaccacaggctcctaaatgaaaacaacaggtgaaaaacaccaaatgaagtaatgccaaggagccggtgggttggcctccatgatcccaactacttctcaacttcagaataatttctcctgttaatcagcacgaacccctaagttccgtatctcctcgcctttctctccatcttcccataggccctagtctagagccctgccagtctcccatctctttcaccattcacctctgacctctcaaccgggtaccttcctcctctccctttagacgcggccccgccccccacctcattctcaataagctcctctgcccgggggtcgctctgactcagacgcggaatgggcctagtcgggaagctataactgcgcaactgggattcatcccaggcggggccgagggctccagcctcctcccggggctctccagagccagaggccacagcctccgccgctgtcgccgccatctccgccgccagggacggcccccaccggaaccggaagctccgcctattccggaccccaaaaaaaaaaaaacaaaaaaaccacacacccaacggaaaccatagagatgagctgcgagagagagcggtccagagacataaagaacgcggagccgaggcctgagggtgcgcctcctaatggtagtatgcagctctacatcctaggctccactgctgaagaaatggggctagacactagtcccacggaatagggacgacctggtagagcaaaacacaaaaaaagttgccccatgtgcccgagtctacacaagagtcaaagaaggaagcaagttcagttaggcattaaactttacactcatgaatggggagaaaagcaaactcttgacccacctaaagaagtcagaaggaaaagcagtgatcacattggtagatgtagagcaaaggctgactgaaggcttaggcaaaagatatacagcaagttgaattctttcaaaatcaaagacagttttcttttgtttagcatcatttgatttttctgcctatatcaccatgtctcctacttgaatatatgtttgccgtgaatcgaatgttattagaggccaaccatggacatctcacattttcaaacaatctatactgattataaaaggccatattaatacctctattgcttacttggacagttcttatggctggctgtgagaggcccaattctaagatgtatcccaagatttgtaccctacggtgtacacatcctgtatacatttctccccttaaaagaaaacacgactgtgaatatgatagagcatcactcctgtaattaggttagcttatatgacaaggatgtaattaaagtccctaatcaattaactttaaggcagtcaaaaagaggtgatttatcctggtgggcttcatcttatcactctagccctttaaatcagggctagaggtcagagacagaatctaagagatttgaagccacagcacagctgtcctgttcaccttgaaggagcaaactgccatatggcaggaaatggcaggtggactctaggagctgagaaaggctcctgggtgacagccaacaagaaagtgggcaccttaatcctacaaatgcaagtaactgaattctggcaacaaccactgaacttgggaaaggacacacacggagcctcagatgagatcgctaacccagccaacaccttgatttcagcctgataagaccctgagctgaggactcagccaaccagtacctggactcatggaatatgtgagaaaataaattggtgttttgggctgctaaatttacagtaatttgttatgcagtaatagaaatgaatgcactggcttaactatgtaattatgctacatagtaaccatgctacaccaaaccgataatagggctacctctgtggaagtgtttgaggctgcagggggcaatcaaggctttcattttatctgcagtgtttgaattttttttttttttttgagctagggtctcactctgtcacccaggctggagtgcagtgatgcaatcttggttcactgcaacctccacctccccagctcaagcaatcctcctaccatagcctcccaagtagctgggactaaaggcacacaccaccatgccggactaattttttttccttctgtagagaaagggttttgccatgttgctcaggctgaatgtttgaatttttacaagaatgtattaattcataaccttgggaattaaaaataaattaggccaggcatggtggcacatgcctgtaatcccaggacttttcaaggctgaggcaggaggattacttgagcctgggtgttccagatcagcctgggcaacatagcaagacctcatctctacaaaaaattttaaaaattagctcggtgcgttgatgcatgcctgtagtcccagctactagggaggctgaggtaggaggattgtttgagcctgggaggtgcaggctgcaatgagccatgatcatgccactgcactccagcctggatgacagagcaagatcctgtcttactaaaaataaataaattaattaagatcaagaagattaaaagaactaaaatca

SEQ ID NO: 913720 - DNA, 4001 bp, Homo sapiens
acactgtatgtctgagaaaacatgtcccactgaatggagtccaaacctcagcccagctcagctgctggaggccaccggcagccaacagccagcagtctgttgtgggtggtggtgggtgtggacactggaggtttacaaggtcacccaggcaccccccagcccagcagcccactgtcttgagctataaaggacaccacgtgcaggaggacagtgaactcttggcttcaggaggcctgttctgggcacttcttgccatgccgggagaactgtctccctggtccaatgggaagaacatcagtgatgcacaacaccactagagaaaactcatgaaatgcacacacccgcacgcacagctcccaggtcagtggccagagggaagctccagggtgctccataggagcaagtgtttcgagtgccacggtttgacaaccccagagtgcttaaagccataaagagcaatggcagatggcattcccaagcctatctcctacctacctcactcccggtccccacccaccatgggatccaagatcacggcagggtccccagcggctttgtctctcagtacccactccctcctggaagctgacctccaggaggaccctggtgaagttcctgggtggaggcactgggagacctggatccccctgactggctctgcctctaactcactgggtgaccttgataaggtcgctgccctcagtaggcctgtttcctatggtgccagatgagggagtcatcttagatgcacaggaagaggatggaacaccctatggcttgccgggcagaaaatcaaggcctgtcactcctgcctttcacctgtagaactccacctgtctgaacgccaaagtcaagatgactttgccagtccatcccagctaaccccagcaataacgtcaccacgttcagggtgggtgggcctggagcctgtaccagacctggcactgataaaacgggcgtctttccctacagcttaggctgtttctttaaaatatggtagcacagctggcagaagagacaaatacacctttaagacctgccagcggacagtattttacactaagatgtcaaaggcaacaacacctcaggacaggaggatgcatgcgtccaagtgctagaacaagcatgccacaggcgtccacccaactcaaatgaccagtcgcttatttgagctcctgtgctggctagaaattacagcttaagaggaataaaaaattccattcagacgtgccgctccagacacgaggcctatgagcaaagtttccggtggcctcgccgcccctccccgttccgggaagccgggcgggtcacctcgtcctcagattaacgagcagctcaaacaactgggagagcccggcgacagcttctccggggcacccgacaccctccgccaggaaccccaaatatgggaggcctggcctccagccagcacccccgcctgctgctcgatcacctccccagcatctccatgatcacacctcctcccacggcgctcggaccctcccgaacaggccctgcggaagggcccaccggccacctccccgcacagcccgggggcctatctgacatccagggcccgtttcaaggacactgcagcaggcagcccggtctcgggggtcttccgcccgattgcccccctcccaaaaacgcacacacacagagacactgacaatgccggtagaatcgaaggcgaaggctttccttgcgccctgcagtccaactcgatgctggcccggagaaggccgggcgccggaggatggaggcagcggaggcggcgagcggatgccggaacgcaaggctgcggccaggaccagcggcggcgcgggcgggggctcacctttttgacctggtcatccttcagctccgtgaagtaataggccaggagctgcgcggcgatcatgctggcggtcggggtcgcggggcggcaggcgtggggacggtcggtcctccgcagccctggcgagccgtggtcctccggcggctgctcggcggctcctcctcctcctcctcccccggctcctccccctcggcccggggcgcggcgacagctcgcgcgctcccggtctccgcgctcccgtcccctggagggtgacagccgccagccgacccacctcctccacgcccattggttgcggcgcgcctctgcaacgcccggcggtggcgtcccggccggggagcggggacgcggcggccgctccctcctgcgccggaaagggggcgggcgacgcagcgaaatcccccccgaccccgcatcatcctgcacgtcccccacgtagggagccgatgcgggccttcacgcgtggcggcgccgtgcccgggtgggccgtgccaggcggggaggtgcgaggcgcaggcaggaggcaccgcccggctccgccgggacgagaagcccctagggctagtctagggactggcagccccgggggcacgaaggcggtcccattcctcggaaatgagggctcgcccctaggagtccggtggacgccgaggtgccggaggggacttgcagaagtgggcgtggaaagcgggcggaagcgggagccggggacgctacgcagtcctcgcacccgggtcccgcgccttcctcacccaggccgaacgcaccggcctacctgggtcttcagcggcagtgcatcacctctccccggcgtgccccgcctaatctccagctggcagatttgtattgctgaacccaaagcgacaccccagagcacccgcccccgagtcaccagctccggtggctctccctcagggcgcactccctctgggcgggacttgggccacaggtcgtggcctgtccccatcctctgggcctcctcttgctcttgggcatccaggcccactgggacttggggcacggttcagcgccccttcccaggtgccgtgttttctactttcccagaggaagttacgtaggatgggaggactccctagaggtgctaccaggacagccactttaggattcttagattaattatttctgtgttccggaagcctccaggagctttagtgccttacaaaatgacatgtaatgagctcaaatatacaaacaagttgttgctattctggttagacaggtaaggaaattgaagctcagtgaggcctcagtcttgctggactttatacagccaggaagttgtagatctaggatcacagcttggatctgtgagtctttgaagcaggtgctcacctctagggtttgctgtggtcccagttgtatagagcccctctgcctaaataggtcactttcctgcaaccaagtctgcaccatatggtgccctgagatccaacccccaacctctaccctagctcttgactttaggagtccctagcccttgaccaggcctagcaaaggtacagtcaaatcagagggagggatgacgtaggttcaggggcctgacagccaccatcacccacagaaaaggaggagcttagatgcagtcctgaggccccagcttcctgtccaggtcacagtccccaccccctgccttagggcctatgcagaggggcatcttgaatcacctctgagactgtgtcttcatccataagatgaagacactaatgcccacctcacctccccttgattgttgtgtaatactgtacgcaaaatacgtgcacataatacacacttaaggaatggcaggtatcatagaactgactgaaaagttaatgcggttaaagcttcagggactctcactttcattcctacccttctaggccctgggagggcctagcagtgtgatatttgtatatttatatttgaattattttccatagagagtgccaatttatttaattttcaagcccaacaaaacctggatttgccctggatcataattataaaccaggaagagagagattttctggtacacatcaaacatttggaactacctacatggccgttaagcaaaatggagtgaatgagaacaagatggttgttctcaactgccatttcatttgagttctgcagatctgccaagctcacagggctggaaactcct

SEQ ID NO: 913721 - DNA, 4001 bp, Homo sapiens
gcctccaggagctttagtgccttacaaaatgacatgtaatgagctcaaatatacaaacaagttgttgctattctggttagacaggtaaggaaattgaagctcagtgaggcctcagtcttgctggactttatacagccaggaagttgtagatctaggatcacagcttggatctgtgagtctttgaagcaggtgctcacctctagggtttgctgtggtcccagttgtatagagcccctctgcctaaataggtcactttcctgcaaccaagtctgcaccatatggtgccctgagatccaacccccaacctctaccctagctcttgactttaggagtccctagcccttgaccaggcctagcaaaggtacagtcaaatcagagggagggatgacgtaggttcaggggcctgacagccaccatcacccacagaaaaggaggagcttagatgcagtcctgaggccccagcttcctgtccaggtcacagtccccaccccctgccttagggcctatgcagaggggcatcttgaatcacctctgagactgtgtcttcatccataagatgaagacactaatgcccacctcacctccccttgattgttgtgtaatactgtacgcaaaatacgtgcacataatacacacttaaggaatggcaggtatcatagaactgactgaaaagttaatgcggttaaagcttcagggactctcactttcattcctacccttctaggccctgggagggcctagcagtgtgatatttgtatatttatatttgaattattttccatagagagtgccaatttatttaattttcaagcccaacaaaacctggatttgccctggatcataattataaaccaggaagagagagattttctggtacacatcaaacatttggaactacctacatggccgttaagcaaaatggagtgaatgagaacaagatggttgttctcaactgccatttcatttgagttctgcagatctgccaagctcacagggctggaaactccttgaggatggaggactatgttttgctaattgctctgtctcctacacaagcgcagggcctggcacttggcaggctgaataagcctaatgcataatcaaaaacatggcccttaacccagccaccagccggtgccatcacccatgcccaacccgttgttacaactcctatctgagctggagccagggagaagctgacgcttggaagagccaggttaccctgaaatgtcctgtttgcaggcaggaaagctgcctctgctttgtcttccctggcctttgagagggaaactgcttctcaaggtgactcattcctccccactccatgaatgcaaccaggccccaaggcctgtcaatatttcctgagaaatgtctctaggcctgacctattgccacctcccaactcccagtccatctccctgtgccagaaatattacaagagtcttctaactgtcctcctcggctcctggcctcatgccatccaagtcattctgagcaccaggtcacattaatcctgctaaaatgcagcataatcatgtcatgacccttccctaaatcccttcatggccctctccttcctgagagagccaatttaaacatctctgcctggtttccgaggccttctgtaatcgactccactctttcccacttatctcttcctccactctggccgcaacaaggccacttcccaccatcctctgcccccaccatgtccactccatttgttcgccgctcatattcccttccttgccctgccttctccactcacctctgcctgaccaagcatcccctctcatctaaggcccagcttgccaaccttccctggaccacagctactcaccccaatctcccaggcctcagcacctcgacagggcaaactcaggctgtgctcacagtccatctggatatacacccagactcctctttacagggcaggaacctgggatgccacaggtgggccatcttgcccagtgtcaggttgtggtagagttttgagccaggactccagcctagtcctgatgcccagccagtgctctgtccatcccacccccaacccctcatgcaacctgggcctcagataagtaacactgagtcatgactgcctaactgatatgggtgactgtcttctagggggctggtcctatctgccccaatcagacagcttcctgaggccagggcccatgctgcactgctgtgtcccctctctgttgttccagtgctgacttcactaatttccttaataatttgcctctttttgctcttgcatagctcttagatccctgctaaggctccttgacagttactccctggatcctcaggaagaccccaacccacagggagtccttagttccctccctctccagatggccctccacttcccttcaagtcccctgaactctctctactcatttactgtggtacctcctacacaagttggggttggagtgaccagtgccaggctgccaccccaggaaacgcacctgcttataagacaataaaggctgccttctaagttggaatgtctgtaccaattcccatctgacccatggcactaggaatgttacttcaggagtgatctccaacagataacagctgtacctcccgcacctgggagcacactctgaatagcaatgtttacataacgttgacagtttgcagagcaatttctcatttattgcttcatttctcctgataacagcctggtgaggttagaagggcaaatatcattatctgcacttaatcagtcaatgaggatgtgaaggttatagagcttgggtgttttggtttttttcttaaattgaaatgaggtcttgccatgttgcccaggctggtctcgaactcctggactcaagggatcctcttgccttgacctctaaaactgctggaattggccaggcgcagtggctcacgcctgtaatcccagcactttgggaggctgaggtgggaggatcacgtggtcaggagttcgagaccagcctggccaacatagtgaaaccctgtctctactaaaaatacaaaaattagctgggcatagtggcaagagcctgtagtcccagctacttgggaggcttaggcaagagaatcgcttgaacctgggaggtggaggttgtggtgagccaagattgtgccactgcactccagcctgggcgacagagtgagacagtctcagaaaaaaagaaagaaaagaaaagagagaagagaagagaaaagaaaaggaaagaagaaaaagaaaaaaagaaaaaaatgctgggattatagacgtgagccattgtgcccagccctatagagtttgttaaggtctcaaagagagcgaaaaaacgaaaattaagaccagtgcctaaaccattggagcatcttagaaccctgacactatgggactgtcatgcacagcctgtcctaaagagatgcctcggaagagatcccaacctagcatttctattagttggatcagtggtttccaacctggctgcaccaaagccacctagggagcttctacaaatgctgatgtccaagccccacccagagactggactaatgtgaatgccgtccaagtttcactttctaacagttccccaggtgaaactcaggtgctgccaggaatgaggaccactgatttagaccctagctttccatgggaacatctggaagaaatgtctaaaatgaattgacccataatccttttagcagcttctgttggatgctgaaggcagttgctccagggtcttagtggctctgcagatcctgagctcagtggggtgaaggttactgtgactccatcagcgttgcagacagttctgcttcctgcgggagaaggctgctgaggagacactggccacccagcccctggagaggctggagttgtaaaatcacattctcagtctgcctccttttctctttcatttgcccaaagtcctgacctccaatattataacagggtcagtaaatcagcaaccaccaagctaaaactgtggcctgtaacattttatttggcccacctgatg

SEQ ID NO: 913722 - DNA, 4001 bp, Homo sapiens
tcccagctactcgggaggctgaggcaggagaattgactgaacccagggggtggaggtttcagtgagctgagattgtgccactacactccagcctgggcaacagagcaaaactccatctcaaaaaaaagaaaaaaaaagagaaatcacagatatattcatatctatgctgttgttgcaaatgtctcaaagtagtgtttacactcatcaggacttcaaaattgtcaggccgggtgcagtggctcatgcctgtaatcccagcattttgggaggccaaggagggtggatcacgagatcaggagattgagactatcctggctaacatggtgaaaccccatctctaataaaaatgcaaaaaattagccgggcgtggtgggaggcacctgtagtcccagctactcaggaggcttgaggcaggagaatggcatgaacccaggaggcagagcttgtggtgagccgagattgcgccactgcacttcagcctgggcaacagagcgagactccatctcaaaaaaaaaaaaaaaaagacttcaaaattgtcattgttattaggttcctgctggatcttgctgaataatgcattaataaatacatgcatgtattaccatggtgccactttaacattttaataaatgtaattcatgccattaatttcccttataatcctgtgtattttatgcatttaaaaacattattctgagaaagaatacaaggtttcttgtattcttgattgtccaaggggtacatggtacatgcacacacacatacacgtgcacaaaggttgagagttcctgatctaaaggatacaggaaatggtcaggaacagtcgtcaccttgttcctgtttaccatgttgtattacagatatttatatatctttctttccttactagcctatgaattcttacagagcaggaatgatgtcttttatttcttttggtcttcagtgcatagaacagggcttggcattcattgaatcatcatttatagagtatcttctgtgtataaggatcgagccccattgggtgaggaagaagaatggagagattcaaaggaaagtgataattaattcatgtgcttatttgagcattcattcattcattcattcagaaaactgttcaattgctactcaatgccagccagtatgtaggctctggggacaataggaagaatggaacccaagtctttattctcatggagcacccattccagctaatgggagaaagacagataaaagatttctgaagaaagacaaatgagaatgaactcacttgttctggaaaggcagcaacatggggaaaatcttattcttaaatctatattcatcacctctttctgggcaaaatgttactgggagaaagtaacacttaaaggttagaaaatgaagataaagatgctctctcttccttttttttttttcttttttagacagactcgctgtgtacccaggctggagtgcagtggcacaatcttgggtcactgcaacctctacctcctgggttcaagcaattctcctgcttcagcctcccgagtagctaggattacaggcacctgccaccatgcccagctaatttttttgtatttttagtagagatgaggtttcaccatgttggccaggctggtctagaactcctgacctccagtgatctacccaccttggcctcccaaagtgcagggattacaggcatgagccaccacgcccagccaaagatgcttagaaggaaaagtcagctgggtgcagtggcgcgtggctgtagtcccagctgctggggaggttaagatggggggattgcttgagcccaagagttcgagagcagcctgggtaacatagcgagaccctgcctcaaaaaaagagagagaaaaatagtctttggagttctcgtgaggacaatttaccttgttgcatggttgctggtcttgcctattaaactttgagaagttaaccctccattgcccaagatgtttcaggggctggcctgtccaaacacagcaagatagatgttttccctctctggagttctggttcttgttcaaggattctatgatgcaatcaattagtcagaatgtgcaagcttgcctagataccttgtgtctcctttttcttgtaagagaccacggctgggtgagaagggactgggtgacctccctaacctgccaaacatgtgctgagagaccaggtcatgggagaacttagtggcacaacaacctgaatctatgggtcagatcatttgtccaggaaagacagcaaagagaaagacccctagcagaaccaggggaaagagggactgggagctgaggatgacttaccatgaaatgggagacctggggaaagagaataaggacagcaaggttttcaactgattaagatgaaacctgataaggtgaaacctttctccaaagaggcataacttcaaaatataaaaagatacatttaataaattcatacgacatttctctaaagagatataaccttaaaatacacaaacacacaaaaagataattttggtaaatctaggacctgttcacagtagtatcaccatacatttgtattgaaagtatggaccaggcacagtggctcacgactataaatctcagcactttggaaggccaaggcgggaggatcacttgaggccaggagtttgagacaagtcagggcaacatagtgagacccctgtctctacaaaaaatttaaaaatcagctggcatggtggcatgcgcctgcagtcccagctgctcgggaggctgagatgggagaatgccttgagcccgggaggtcaaggttgcagtgattcgtgattgcgccaccatgctccaacctgagtgacagaatgagaccttgtctcaaaaaacaacaaaaaagaaagtgtaaaaaatatgtcctggggaaccctcagctccctcattatccccagccctagctggcctctctctctctccgtctttagactcagcccccttcactccatctggacatcccgcttcagcaaatggtgacgcttagagctggaatccaaaaactttttttttttttgagacagagtctcgctctgtcacccagactggagtgcagttgctcaatctcggctcactgcaacctccaccccccaggttcaagtgattctcctgactcagcctcccaagtagctgggatcacaaggatacaccaccacgcccggctatttttttttttttttgtatgtttagtagagacggggtttcaccatgctggccaggctggtctcaaactcctgaactcaagtgatctgcctgcttcagccacccaaagtgctaggattacaggcatgagccaccacgcctgaccaaagccataatcttttgaagagacagcaagagcactctgtggagttgtcatacttaagtatgtaattaagcacataaatacaaataaaatcactgtggattattcttttcagtttgtttcccatgacaatagttgtctctttccttccttccttccttttctttctttctctttctttctttttctttctttctttctttcatttctttctctttctctctctctttttttttttaagaagcagggtctctttccgttgcccaggctgcagtgcagtggtgcagtcatagctcattgtaacctcaaacctagactcgagagataccccgcacctcagcctcctgagtggctgggactgcaggtgtgcaccaccacattcaactaattttaaaaatttttctgtacagatgggggtcttgatatgttgcccaagctgatcttgaactcctggcctcaagcaatcttccagacttggcctcccaaagtgctgagattacaggtgtgagccaccatacccagtctatactttatctgaagaaaatttcttgaaaagttctatttcttcaatcatgcctcccacaagtaagtatttgataggaatggcacagtgctaggttcactagagcaatacaagaatgtgtttgacaaagagtttacaatctatctggccagatgtgaaactc

SEQ ID NO: 913723 - DNA, 4001 bp, Homo sapiens
aatttagtgggagtttatcccaccaagtacctgagggctgtaaggggccacacttcctctctctctttctttgttttgttttgagacggagtctcattctgttgcccaggctggagtacaatggcatgatctcggctcactgtaacctctgctgcccgggttcaagggattctcctgcctcagccttctgagtagttgggattacaggcgcactccaccacgcccagctaatttttaaatttttagtagagacggggtttcaccatgttggccagggtggtctcaacctcctgacctcaggtgatccacccaccttggcctcccaaagtgctgggattataggtatgagccaccatccttggcctttttttttcttttctttcctttttttttcagacagggtctcactctgtcacccaggctggagtgcagtagcgcagtctcccgggctcaagccatcctgccaccgcagcctcccgagtagttgggactgtaggcacacaccaccatgaccggctaatttttacatgttttgtagagatggggttgctccatgttgcccaggctggtctcaaactcctgacctcaagtttgagatgagatctgctcatctcagcctcccagtgtatgcagattacagccgtgagccacggtgcctggcctccttattcattttgtaaagcaggagggagtcatggcacagcagaaagcattgaaggaagagtcagccaacttggatttaatcctcattccatcctaaatacttggtgaccttggctaagtcctcctgctaggaggacttctgtcatctgcactttgagagatgctttttgcccagggccgtgacagccagccggtgtggccagagtagcagactgggctcattttagctgcctggaaagaaccctggttccctcctgttgacccttggcaacctttaaccagcccactttggaatgaattttgtagacaagttccctgagcaaagtgacaaaataatgcacaccatgaatagtgtaccattggcaaatagcaggtgccaataatagatatttcaattactgtctattgcaactcacaccttcttgctgcccacatttatatgctttcaaatacatgaacaaacagatctgccccaacagttctttttttttagatgaagtctcactcttgtcccctaggctggagtgcaatggcgcgatctcggctcactgcaacctccaccacctgggttcaagcgattctcctgcctcagcctcccgagtagatgggattacaggtgcccgccaccacacccagctaatttttgtatttttagttgagacggggtttcaccatgttggccaggctggtctcgaactcctgacctcaggtaatccgcccacctcggcctcctaaagtgctaggattacaggcgtgagccactgcgcccagccttctgctccaacagttcttaaaacttctttgaaaatgattctcctcgcctttgtggcctttccgagcaaacatcccttacagcaaacacaatcctcttcaagctttccaaacaccctcctcacccgcttccgcatccaatacctgccaggaagttccgagtgaagtgtaaggttcaggacagtaatgcaatgcccaggagtgtgggagaattactccctcttccctcagtgagtcttttactggtcatatgctcccagtatcttttctaataagctctcttcactcccttctgattttttttttaagggaatcagttttgtccgtgaagaaggagctgggcatctctcagcttcgtgggtcctccttaccttcttgatctggtcctccttcagcttgctgaagtaaaatgccatcaagtggaccgcaaacattttccccaagtttggtttctcctgagatgggcagagattcctgtgcagtgttcactcctacgactctggagtgttgcacgcttccagtccaggctggcagacctcctggggagcgaggtgttgcggactaaatacctccagcctgcttggttcaatgattaaactcccccccaccccacccctttggtccctccctctggcacacacttgattgtctaataggaggctctggatggtagctgaggtttagtggagggggaagcagggtattgatgggttgcttgactacttgagaattgggtgccaccaaatctcattgctaagcaaccctctcaagccggggctctgccaagcccactcagccgaggaaaatcttctgcgaagttgggcactaaacaaagccaactttcaaccggtggagctgctctgcaaatttccagtcccaggcttttctctttagttttttatgccagtggcataactctgtgaccccctgctcctcagaagcactgaactaactaaaactaaacattgtcctggtcaatgggatttcaagaatgttggggcagattcttccatttgtgacagatcagatctcttaactaatagcccatggttaacagaaaatgatcaataaatgtttacctattcacagtgttaagccagaaaatctttagttcacaggtagtgacccaggaaaaaatattcctgagaaagagtgaactgaagtcaccagtgctcactgggaatcactgctggagagaaggaagtcacagataagaaatgtctcagtccagccgggtgcagtgactcacgcctgtaacaatcgcagcacttggggaggccgaggcaggcagatcatgaggtcaggagttcgagaccagcctggccaacatggtgaaaccccatctctactaaaaatacaaaaaacttagccaggagtggtggcaggtgcctgtaatcccagctacttgggaggctgaggcaggagaatcacttgaacctgggaggcagaggttgcagtgagccgagatcgcgccattgcactccagcctgggtgacaagagcaaaactccatctcaaaaaaagaaaaaaaagagaaatgtctcaggccactgagatgttttattcactcacttctcactcatcatacttgacatgagaaggacccagaaagcacccaatacatgggtacaatcaaccttgcactcttcccacagtcactggctggctaatgaaaccaataacaacagcgttaacaacagcggctaacatggatggagcatttaccaatcccattttgtttttattactcttgttattattattttttagacagggtctcattcatcccccaggctggaatgcagtcgtggaatcatgactcgctgcaacatcagccttctgggctcaggtgatcctcccatctcaatccccagggtagctggggctacaggcacgtggcaccatgcccagctaatttttgtatttttgtagagatagggttttgccatgttgccctggctggtcttgaattcctgggctcaagcgatttacccacctcagcctcccaaagtgttggaattacaggcatgagccactgctcccggcccactcttattttatagatgaaaaaattgaggcccagaaaggttacgtgatcacaaagccataaacaggacagcaaggggtcaatcctggaagtttgattccagggcccagctataatacatggcattggctctccagccctgctttctccacgcaatagatactcaatagatacgcaattgataactattagtagcagcattctgttgggatgttaagaatttgtttttctttttcttttttttgagacagagtctcactctgttgcccaggctggagtacagtggctcaatctcaactcactgcaacctccacctcctgggttaaagcaattctcctgcctcagcctcctgagtagctggaattcagtgctctctacccattgccgtgtggacgagccatcaggtctcacttaagcccacaatgcagaggaggctcggttaaaattactccagatgctttattcagattgatataagcatattaaaactgtctcccagattgaggatccccatccttttc

SEQ ID NO: 913724 - DNA, 4001 bp, Homo sapiens
cagtagtcgagcttgttgtataggttgtagagaggtaaggccgagaggttgcttcccgggtagtagagcggcgcgggaaaggcgagcgagcgcggcaccggcacgcgcagcagcgaactgtcccggaacaccagcggcatgctcaccagagtctgcgccgacgcgtgcgccatgttggccgcctccagctcagccgagagctgccgcttccacttgttgcggcggttctggaaccaagtctttacctgggtctccgtgagctgcaggctggaggcgaggcaggcgcgctccgagctgctcaggtagcgcttcatgtcgaaggtggactcgagctggtacacctggctgcgcgaaaagacggtgcgcgtcttcttcttggccgcgccggcctgccgctcagcgccgccgtcccgcggccgctcggaccccggcgagggcgagcccgcgggcaggagcctctctttctcttctttaaagtccgagtgcgaaggagagaggaaaggcgtgcgctccaagccgcccgggcccgagcctccgctgcccttgggggtacctgaggagcgagaacagacagaaaggccatggagttggttggggagcctcggagaccgccagctctccctgggaccaagcggttggcaagcgcctgcagccttggtcccaccttaccaatcccctcctcttatccctctcactggccccccaaacccagcaccccgtcctttaaaagcgacaagagagggacccagctacttggagtatggggtctctgtgctcccacctttatgaatgggccaggggcaacagggagaggaggtctggagggggaaacattagcatggttttaaaaggcgaatttgcttggtggtaattgagctggaagagttcctcgagctttatagggtggcatcatttcacaggccgtttgtttggaaatcacgctaaggactaacgcaggactccccttcgtcaaatgttgtaaagaggaaccgtctctgaaatgcaccattgtcaatcatcttggagtgctaatcattccaaggaggagagagagagaaaggcagagatacggagcgagtgaggaagaagactcagaaagagattacggtggagacagactgcccagacccgacttgcagatctccacctcgtgtccggaaagaaagtaccagatgtgcagtgattgaggacagccgggtgtaaggccggccgcgtgtccctctcgctgtggtccactctctcaacaactcaaccttccccaggaagcccaagccggcacgggtctgtgttcgcctgctcccaggggcccaccgggcggaggaggcaccacagtgcgcgcccctctccccgcggtcccgaacccccggctgccgcagctctggccagagggggcccggcgcgggagtcttggcggggcgctcagcctccctcccctcgcgctcgctcgctgccacactggcgacgtgcgatccttacccaggcaaggaaaagggatggggggatggtgcttggggccctgctccttagggccgtgctggtctgggcagaagcaggcgggcgccttccagccgtcgtccggctcctcctcctccgaggacacggacaggctgcgcttcctggctggccagccgacgggctcccgcggtgcctccgaggggcccccgcccaggatggactggatggtgaagctggagacgccaccggccgccggacaccccttgcccgcatcttctttgctgcccatcctgggttcataagaaatcgaaggaaaccaagaactccctttagagacgatctgggtgatctgggtggaaggtggtgcagcaggcaggcagtggggaggggcggggaggaaatctagggggagggggcgccgaggctggtgaggcgtcccttccgcgccagggacatgcaggcaccggatggctgcgcaggggttcctgcccgcctggctctgggtgcgcccgcccagccccggtgcaaatgccccttcctcgcccgccaactcgccgggtctccggcggcgcggaggcggcgcggcctcatttgcatagaggttacccgaacgcggccaatcgcagcgccgccgagcggccccggaaaatttcaaaacgctccggccaggcacacagcaccggtgcgcccccagagcgcgccgagggcctggcgggcatcagcggcgtctaaccaggggcagccagggctgaaagcagctgcagattctagcccgggttcctggcggctgcggcaactccgactccttggaccccttggacccttctctccagaggcaggggcggtgcgggactcggagctggagtggctcgacgcctccgcaggcgacgggtctccgcgcctcccaggggcttgtacaggctgctccaccatcctcccccagccctccaccccttctagccccagtgggcgggcaaagccggcactcctgggaccgtggcgccctgcgtgggggtgaggtgggttaggagcaggcgtctccaggcggacgctcatcctctccagcatggccaggagccttgggagcagacattccccttccccgtctgcagacctcatccctgtcacaggttctacggacctacagaatctttagggggagggaggaagccctaagacctctagtcaagagatctgggttcaaattccggcacaactatttacacactgcatgaacttgcacaactcatgccgattaaagcctctctgccctcatagttgaaaataacttctcggattgcctcaggtagggattaaaagcctcgaagcactagcagcgcatagtaggtactccataaacctggccgggtagcccatggcccacccgtgttttaagcgaatctgtgtttttgttttgtaaattttgaaggtttccgaactgctgcagaaatagacgccttactcccaggaagaagataaggaactggtgacaggactcggttttagaattgagcagactcgactcaattctcggctgggtgatcttgggggaagacatttggaaattctgaggctcggtttctttattcctaaaattggaggaagcagtgcctccctcgcagaggctgttgtgaggtcaaactacccagcaccgagcctggcacaccgtggtgctcagtaaatagtgattccctctgtgttctcatagcccccttctgtgccctggctctcgcccctttaattcctagatcagctgttacccgagctagaattagcccagccaagcaaagcggtttggggccacagtcgtctgcacaagcttcctggaaactgaagtgaggcaaggcccgaagtgctcaggcaaccccgtcccctcaagctgtgacctctagacctcttggccaagagattccagaagccctgtctttagggtgccccccaagtgcagccaagggtgagtggagactctggaatcagtccccacaaatgtccagacactgcatgactgtgcagttccttcctcgcctgcaccgcgcccgggttattaagtaaagcgcttataatatcattagccgcggtgagttaccgactgcggccctgcccgtggcagaactcttccctacttaactcctcgaggggctcgttaatgggctaattgattaggagtcggccgcgcagccggggcaggggcaggcgagggggcgggggccagggggtgcgcgcagcggcccgggaggccagcgaggggcaggtgccggcctccgtcaccgcattaacctcttcagggctcagcggcagggtcgagacacattacaaatggtcagctttaatcatggtgtcagctcattaacccggaaggacctggcgctgaaatacaatttgtgcgttctcctctgcgccgcggcggcgcaggctcctgggccacgtcgcagcgggtcccgcgtgctcccgcgctgttggggggtacgcgggaggttcagcgaaagaatcgtcggattctcactaaccatccgcttctcgcagacatcctgagctaggcgctgcct

SEQ ID NO: 913725 - DNA, 4001 bp, Homo sapiens
ggagggctgcacattttacaaaaactatcggccgaaatctctgacccgaaaattttgtcttgttcctgctttctcttaatataagccaaaaaccaaaagtaagaggggaagcgcctccaatccattagggatgaattgcacgaaaatgcattgcaaatacttacaaaatgctaccgactgggggaggggaagcagaggctgcgcgcccaagccccagttcctgaaggccgctggacttctcggcgccctcggcccggcccagtctcctccggggtccggacaaggaggccgggcgctccctcccccacccctctggggcctcagaccggccgtagcagcggcacggaagagaccaccgggtgcgagtagtagacggggtgcgggaaggtgagcagcggctggctgactggcaccggggcccccgcggctgcagccgccgcgccctcggccgccgagttctcgtggtagaggatgggcacccgcacgatgcgctgcgccgcggcatggctcaggttggccgcctccagctccgccgccagctgccgcttccacttgttgcggcggttctggaaccagatcttgacctgcgtctcggtgaggtgcagggacgcggccaggccggctcgctccgagctgctcagatagcgcttcatgtcgaaggtggactcgagctggaagacctggctgcgcgagaagactgtgcgcgtcttcttcttgcggcacgccggcttcttctctggactttcagcgcccttcttccagtcttctgcgcccggagtggccgccgccgcccctacgctcgccccggccgcgcctggcgccgcttcgccttcctttttgctttcctcggagtcgctctcctccagaatgatctcgtccgggctcttggagtccagctccttgtgatcggggtcggccttgagcagtggctccggagagtcgcggtctgtgccggaggcgggggaggagtctctcagcaaggccttctccgaggctggggagacagacagacggacgcacacacatgcacaccgacacagccttgagcgaggcccggcgcctggggacggcaggctcaacccgcgccggcctccaggtcccaggccatgaggcctcaccattcccgcgggctgcctccttctcggctgggccagagaagggacgccgagtcctgggatccccctcctcccgaggacaggcaagcagatggtggtagcgcggccacctccttccattccctcagcttcctcgccaggggccggcagaacggttccctttcggcttaggcgcattggaatcaccccctccttccaggccgtgtcccaagccccggccgtccgaagcctccctattcacgcccgaggccacttttcccgggaagcaccgtgcccggggctccaattccacttcttttctcaccaagtgggattggattaacgggcagcgcaacccagcgcgagggcaggctaggggccgaaaaaaactgaccgagcagagggtttgcgggtgctggggtcccagaactgcggagggaagcagcgcggggcggggacggggcgggcgcgcagggggacaacgaaagttcaaagagaggtcggtaccttcaggtcgcgggaggtggccgccggcgggggtcagggtgtaggggtaccaccaggctggggagcgctccaggtagtgcgcgggcagggcaaacctctgcgccgggatctcaaagcgagggaaagccaggtcgcccacctgcgagagcgcgaagcccgcggcgccctccagggcccccttggccgccgcggcagcggcagcggcggcggcggcggcagccgaggctggcgcgaagagcgtccgtgggggcggctgaggcttagggggcggccggtggtggtctccgttgagcaggttcttgatggagaacggggactccttgggagcgggtggggggggcggcggcggttggggctgtgcgctggcggtgccggcagcgtccggcccgggttccggcatggtcccctctcctccgggtccccgggagggagggagcgggacaggcgggcggcggggcgagcaggcgagaggccggaaatcagaccataaacggaactcaactacggggcgcaaagtcgggggccgccccgggcgcaaatccaacggcgggagggcggagtgaggacccagacgggcgggctcgcatgagggaggggtgcggaggggcggggagcggccctgccgcggcaccgagggatcgaggcggctcggctgcggctgcggctcccgcggaggaggcagcaagagcagtccccggctcgaggctgcgtcaatccggcgccggatgctaatgatgaaatcaaaatgtcatccaagttaaatgcggggagtatacggcgattgggcgcgtacaatggcaaatgggattaggcaggcgaaggctcagccgagccccggccccgcagccgcctccgccaccgccccctcctcgccttccctcggattttggcgctttggcttcgggctataagagcccgcccgttattggctttatatagtccaattaggcagcaaatgaggacaagcctattagcacaaaaggatattggctcccgctaaagaggcactcggagcgctcctgcgagcgcaggaggcgagcgagggacgcggagcaggcggcgcccttggccgaagcgcactaacggccgcgagcccggagaccgcgcctgcctctcccccctgcggcgcagggacccgcttcccgccgccaggcctgcgggaggggggaggggcggaccaggccctcccgggtcacctcggggttatctgcgctcgcagctgccgctcccccgccccctggggctggacaggggcccgccgcccccacgcagctggagagccacgcagcgccggcccaagaggcaggacgtgacctcggccctcggagaactcatcattttcctaccctttggggtccggcgacctcggtatttttcctaaagcctgctaggaagggcgaggccaagaagagagggatttgggttccccacccaccatccagccgatagtaagggaatccaggtgtaagtcctcgcactgcgtcttcggactcagaaatccgcgtggccttggcctttagccctggaaaaccgaagagtgagccttcccccgggaccaggagtgggtgtgcctgtgtgcgtatgcgcgctgacccggccaaaacccgcgcgtcactcggtggggctgctggggcaacagcttctcggcaccgacggctgctctcggaagggcacccctctgctctggccgccggtgcccaaggctcgcggatcaactccgagtctgtgaccccgacgacagcactttctcccaggaagtctctccggccagctggcgtttggagctgtctaactaacgctttaatgggggcaaggtgaaccgaaggcgcagcggcgtagcttcctccgccgcggcaagcagcggcatccgctgcgcgtctcgacggcagcgaagtccttagagaaccacactggacctttgcagaacggcttagtgaaaggacattccactccactggctttaaaaacagctccccggttcgcacgagaagcccatgaggcagacatttaagactcatgatttaagcatcaagtaaatcagaattgtttgtgaggtcccctcccgagagacagctttcttatcagagaaaggtgacaaactggcctcaccctcttccaccctggtgaagctcccgcacacgagggctttttgggatcccttcacctccccaccgctttctttttcgttagattgagcctcgcctaattcaaggccgccctgcattggcagacgtgatcgtgtggggtccccacttgagaggtagattttgtttttcggtcctggggcgtcagaccctcccccaccaaatctcgacgggcatatgtaatgtttctttctgcattcatctacagcagcgaaccccatttttgctttggaaatctggaaacgtaaatggcgct

SEQ ID NO: 913726 - DNA, 4001 bp, Homo sapiens
cttcgcgcgcagccgccagcgcgcgcctcgcgtcccgccacgcagatggccggcccgagcccccagcgcccgcgagcagtttcgagaactaaagaggcgcgtcagctcgtccccgggccgcccgcgggcaatggccgagctcggctctccttccaccctccgccgggacacacgcggagccgagcgggggtcccaggcgcctagggggaggggttcccgcgcccggggcggccttggggggagggcgagtcgggtgccttgctcctcaaaaccctggtccacgactctgcggttgggggagccgggcagccggcgcagcaggagccgggccccgtccacaagtttcctacgagcagggcggaatcgacgaaaatacttaatacaaacaaacaaaaggaaaaaaaaaaggacgactaagctgaagagcgcgcacgagtcagattttcaccccaaatacaaacacgatacctctaggagcaggagaccaatacagggaccgcgctccgaggacacgcggcgcagccgaggaggaaaaagggcccggggccgagagctaaggctacgggaaccgggcgtgggaggagggcggagccaactccccacaaggaagtcttgtgcaactctcaggcgcctgcagccacgtgagcgcgcggctttcattttactcaggtattattactattattacttcttttgagacaaggtctcatttccgtcgcccggctggaatgcagtggcacaatcactgtcactgcagcctcgacctcagagcaagcgaccctcccgcctcagcctcccgagtagctgggacaacaggcgcgcgccaccacacgtggctaatttttttttctttacttttcagtagagacagtctatgttgcccaggcttgtcgggaactcctgggctcaagagatcctcccggctgggcctcccactgcgccaggcctgttctcactttcagagccctccggcagtcgccagctccccgccagggggccggactaacgcacccggccgtccgtgccttccccgcgctttcctgactccaaaatctcagcccgcggtgctcaccgcgtgggaccactgtctgggcgtgcggctctcgacctccgacgctgcgtctcccgatcccagtgggtccagttcttgccggtcccacgtacgggcccctcgacctcgaatcccgtcacccaaatctcagcgccacggcccctcattatgtgcagtcctcgctcggtcccaggtttgcggcgcttaaactcagatcgctcttccctgatcccaaatcccagccccagcccaacgatccccaccccaataggcccagtccccaggtagtccgggtacggggccctggacttcggatagtctccctaatctcaaatcccaccccccgtccccacccccagggggacccggtccccgctaggtcccgggtgtgcggccttcgacctcggagacttcggccgcccctcacctcggcctccgagtctctacactcccgctctcatatcaggcaccccggtggtcccttggagcacctagaggagggtgggacgcggggaacttggcagttgtagcagaggcagttgaggcttgttgaccatcaccatggaaacccccgcctgcgagcacggggcggagcctacgaggggcggggtcaggcgcgctgccggccccaatcctcagcgcctgcccgtcgagcgcacgcggctttgccggaagccctcctgctcccggcgagccaggccccgactaggccctactgcccggctcagccctttgccctggacaccaggaaacagaagcccaaggagcccgcgtccccaccccctgctacctgccggcgtgacagcgattcggtggccccccgaaccccaccttgaggaagacgcggcgcagtcctgcttccacgacggagccggaaggacgcaaggaccgcggcagggcggagtttctgcgtccggcgtccgggggcggggccgcgacggcgcattgtgacgcgccagagctgagccgccggttggccggctgggcgcggagcagagccgacacggctggcgggggaggcggtggaggcggacaagcgaggacgtttctggagaggagaagggaggggaggggaggggatagggggagggggaggaggaggagggagtggagcggcgggaaagatccctctgactgcccctgaggccctggaggaaggacactggtgagccccgcaggacactgaaatgtgcgccgaaaggacgcctgatggaagactaggatgggaaaaggaaatgagagccgatggcagggcgtggtggcgcaagcctgtggtcccagtaatttgggaggctaaggcgggagaatcgcttgagcccgggaggtcgaggctgcagtgatccgtgactgctccattgcgtccagcctgggcgacagagcgaggcgctgtctcaaaaaataaaataaggaaagtagtacactgaaggccgggcgcggtggctcacgcctgtaatcccaccactttgggaggccgaggcggacggatcaggcggtcgggaaatcgagaccatcctggccaacatagtgaaacccctactaaaatacaaaaaaattagccaggcgtggtggcgcgcgcttgtagtcccagccactcgggtggctgaggcaggggaatcgcttgaacccgggaggcggagcttgcgtgagccgagatcgcgccactgcactccagcctagcgacagagcgagactacgtctcaaagaaaaaaaaaaaaaaaaggtacactgagtactccggagaccgcctaaaggggtctcagagcagggcgttaggagggatttgtcaggttgaagttgctcaggtgataaattccgtggtgtgagaagcccccaaacctcagaatgtaactcagacccaggtcgagggcaagattttcagtcacagagcacctgaacacacagatttggtggctaatggctaagccagggacagattttctttcttttctttttttttttgatgtattgtagggctaataattgtaaccattttattttggtggatcttcttcatgaagagatgatgtcaaggcactcatcacaggttaagctgaacattgttactattgttattatttccagactgagtatcgccctgtcattcaggcgggagtgcagtggtacaatcacggctcactgcagcctcgacctcctgggctcaagcgatcctcctgcctcaacctcctgagtagcaccaccactctcggctaaattttgtattttttgtagaggcgaggtttcgctgtgttgcccgggctggtcgggaactcctggactcaagccatccgcccacctacgcctcccagagtgttgggattactggattgagccacgcatctggctgaacgttattttttaaatcaccagagaaagtaaaggagtgctcaaaatagtgtcagatgatgagtgggatgattgtgatgaaggaaggagtttgttaaaagaaaaagctagttccaagaaagagaatggaaagagtaaagcaggagctgtcagaataggtaaaaatgtccaaagagaaaactgcataatttgaggcaaaattacagaaaatagttcctgcaaaaatcagataggtattcagcatcataggaaaggggcgaaaatcagataggtaggtattcttaagaagttgtggccggccgggcgcggtggctcgcgcctgtaatcccaagactttgggaggccgaggtgggtggatcacctgaggttaggcgtttgagaccagcctgggcaacatggcgaaaccctgtctctactaaaaatacaaaaaaaaattagccgggcgtgttggcgcgtacctgtagtcccatctaccctggaggctgaggcaggagaatcgcttgaatccaggaggtgatggttgcagtgagccgagattgcaccattgccctccagcctgggtaacaagagcgaaactctgtctcaaaaaaaaaaaaaaagtcataca

SEQ ID NO: 913727 - DNA, 4001 bp, Homo sapiens
aaagcaatctctctcttaatattcattaaagtagtaatgtcttattttatagtttataaattctgtgagagcaacgagtcactttgcaggaatagcacttaaggtatctttcacctacctggagaacccaagaaattttcatcttactaggaattcagagacaaccacgtatttaacttttaaaaatataactaagtagaaagaattatatgcgtgtatttttggaagaattaagatgacttttgggacggaacgactgaaaactacgctttcagaactccctgccgcctgaggctgtggccctgaccccggcgcagggcccgccccgcgcggttccgggaagccgccgccgccgcccgttgcccttcgcgcgcagccgccagcgcgcgcctcgcgtcccgccacgcagatggccggcccgagcccccagcgcccgcgagcagtttcgagaactaaagaggcgcgtcagctcgtccccgggccgcccgcgggcaatggccgagctcggctctccttccaccctccgccgggacacacgcggagccgagcgggggtcccaggcgcctagggggaggggttcccgcgcccggggcggccttggggggagggcgagtcgggtgccttgctcctcaaaaccctggtccacgactctgcggttgggggagccgggcagccggcgcagcaggagccgggccccgtccacaagtttcctacgagcagggcggaatcgacgaaaatacttaatacaaacaaacaaaaggaaaaaaaaaaggacgactaagctgaagagcgcgcacgagtcagattttcaccccaaatacaaacacgatacctctaggagcaggagaccaatacagggaccgcgctccgaggacacgcggcgcagccgaggaggaaaaagggcccggggccgagagctaaggctacgggaaccgggcgtgggaggagggcggagccaactccccacaaggaagtcttgtgcaactctcaggcgcctgcagccacgtgagcgcgcggctttcattttactcaggtattattactattattacttcttttgagacaaggtctcatttccgtcgcccggctggaatgcagtggcacaatcactgtcactgcagcctcgacctcagagcaagcgaccctcccgcctcagcctcccgagtagctgggacaacaggcgcgcgccaccacacgtggctaatttttttttctttacttttcagtagagacagtctatgttgcccaggcttgtcgggaactcctgggctcaagagatcctcccggctgggcctcccactgcgccaggcctgttctcactttcagagccctccggcagtcgccagctccccgccagggggccggactaacgcacccggccgtccgtgccttccccgcgctttcctgactccaaaatctcagcccgcggtgctcaccgcgtgggaccactgtctgggcgtgcggctctcgacctccgacgctgcgtctcccgatcccagtgggtccagttcttgccggtcccacgtacgggcccctcgacctcgaatcccgtcacccaaatctcagcgccacggcccctcattatgtgcagtcctcgctcggtcccaggtttgcggcgcttaaactcagatcgctcttccctgatcccaaatcccagccccagcccaacgatccccaccccaataggcccagtccccaggtagtccgggtacggggccctggacttcggatagtctccctaatctcaaatcccaccccccgtccccacccccagggggacccggtccccgctaggtcccgggtgtgcggccttcgacctcggagacttcggccgcccctcacctcggcctccgagtctctacactcccgctctcatatcaggcaccccggtggtcccttggagcacctagaggagggtgggacgcggggaacttggcagttgtagcagaggcagttgaggcttgttgaccatcaccatggaaacccccgcctgcgagcacggggcggagcctacgaggggcggggtcaggcgcgctgccggccccaatcctcagcgcctgcccgtcgagcgcacgcggctttgccggaagccctcctgctcccggcgagccaggccccgactaggccctactgcccggctcagccctttgccctggacaccaggaaacagaagcccaaggagcccgcgtccccaccccctgctacctgccggcgtgacagcgattcggtggccccccgaaccccaccttgaggaagacgcggcgcagtcctgcttccacgacggagccggaaggacgcaaggaccgcggcagggcggagtttctgcgtccggcgtccgggggcggggccgcgacggcgcattgtgacgcgccagagctgagccgccggttggccggctgggcgcggagcagagccgacacggctggcgggggaggcggtggaggcggacaagcgaggacgtttctggagaggagaagggaggggaggggaggggatagggggagggggaggaggaggagggagtggagcggcgggaaagatccctctgactgcccctgaggccctggaggaaggacactggtgagccccgcaggacactgaaatgtgcgccgaaaggacgcctgatggaagactaggatgggaaaaggaaatgagagccgatggcagggcgtggtggcgcaagcctgtggtcccagtaatttgggaggctaaggcgggagaatcgcttgagcccgggaggtcgaggctgcagtgatccgtgactgctccattgcgtccagcctgggcgacagagcgaggcgctgtctcaaaaaataaaataaggaaagtagtacactgaaggccgggcgcggtggctcacgcctgtaatcccaccactttgggaggccgaggcggacggatcaggcggtcgggaaatcgagaccatcctggccaacatagtgaaacccctactaaaatacaaaaaaattagccaggcgtggtggcgcgcgcttgtagtcccagccactcgggtggctgaggcaggggaatcgcttgaacccgggaggcggagcttgcgtgagccgagatcgcgccactgcactccagcctagcgacagagcgagactacgtctcaaagaaaaaaaaaaaaaaaaggtacactgagtactccggagaccgcctaaaggggtctcagagcagggcgttaggagggatttgtcaggttgaagttgctcaggtgataaattccgtggtgtgagaagcccccaaacctcagaatgtaactcagacccaggtcgagggcaagattttcagtcacagagcacctgaacacacagatttggtggctaatggctaagccagggacagattttctttcttttctttttttttttgatgtattgtagggctaataattgtaaccattttattttggtggatcttcttcatgaagagatgatgtcaaggcactcatcacaggttaagctgaacattgttactattgttattatttccagactgagtatcgccctgtcattcaggcgggagtgcagtggtacaatcacggctcactgcagcctcgacctcctgggctcaagcgatcctcctgcctcaacctcctgagtagcaccaccactctcggctaaattttgtattttttgtagaggcgaggtttcgctgtgttgcccgggctggtcgggaactcctggactcaagccatccgcccacctacgcctcccagagtgttgggattactggattgagccacgcatctggctgaacgttattttttaaatcaccagagaaagtaaaggagtgctcaaaatagtgtcagatgatgagtgggatgattgtgatgaaggaaggagtttgttaaaagaaaaagctagttccaagaaagagaatggaaagagtaaagcaggagctgtcagaataggtaaaaatgtccaaagagaaaactgcataatttgaggcaaaattacagaaaatagttcctgcaaaaatcagataggtattcagca

SEQ ID NO: 913728 - DNA, 4001 bp, Homo sapiens
tcagttctccctctgcccaccctgttgccctccacaagaaccgtagctcagggcaactaagacagggcaagggccctggcaggggaggggtgtcccggtccaacttgggacccagttgggactgggtcccaagtcccaattgtgtccctggacacatgacttctcccaacctccattttctcatctgaaacatggggctaatagcaagcccttctggagtagtcctgagcatgtaattagaaaatggagtaaaacttctaggacctagtaagagtcaactaatgtggttctcccgaagagcagagaaccagagctcagtgggggagagggaattagagaagtcacctccaaggaaagggcctgtcacatttctgcagcccctgcaggcatctacccccaccgggctctcatttgcctccaggctttccaaggttctggccacgtgggagaagtaactttctatttactcagtcttttcccttaaataaattccattttttacctgaataaagctttataacgctacccttaacagaaaacttggcagtttacaaaaaagtggccgggcacgatggctcacgcctgtaatcccagcactttgggaggcagaggcgtgagaatcgcttgagcacaaaagtttgaaaatcaatctgggcaacataaggagaccccatctctacaaaaaatacaaaaatttgccgggcgtgctggagagtgcccgtggtcccagatactcggcggctgaggtgggaggatccgttgagcacaggaggatctcggcagcgagccgagatcacaccattgcactccagcctgggcaacaaagtgagaccctgtctcaaaaaataatacatatttttttatagagacggggtaggtctctggggcccaagcgatcctcccacacctcggcctccctaaatgctgggattacaggcgtgagccacctcgcccggccgataatgactctaatctacagaatgcacaccggaatgtaatacctacaagggaaaagatcttcttgcttaggaataaagcaatctctctcttaatattcattaaagtagtaatgtcttattttatagtttataaattctgtgagagcaacgagtcactttgcaggaatagcacttaaggtatctttcacctacctggagaacccaagaaattttcatcttactaggaattcagagacaaccacgtatttaacttttaaaaatataactaagtagaaagaattatatgcgtgtatttttggaagaattaagatgacttttgggacggaacgactgaaaactacgctttcagaactccctgccgcctgaggctgtggccctgaccccggcgcagggcccgccccgcgcggttccgggaagccgccgccgccgcccgttgcccttcgcgcgcagccgccagcgcgcgcctcgcgtcccgccacgcagatggccggcccgagcccccagcgcccgcgagcagtttcgagaactaaagaggcgcgtcagctcgtccccgggccgcccgcgggcaatggccgagctcggctctccttccaccctccgccgggacacacgcggagccgagcgggggtcccaggcgcctagggggaggggttcccgcgcccggggcggccttggggggagggcgagtcgggtgccttgctcctcaaaaccctggtccacgactctgcggttgggggagccgggcagccggcgcagcaggagccgggccccgtccacaagtttcctacgagcagggcggaatcgacgaaaatacttaatacaaacaaacaaaaggaaaaaaaaaaggacgactaagctgaagagcgcgcacgagtcagattttcaccccaaatacaaacacgatacctctaggagcaggagaccaatacagggaccgcgctccgaggacacgcggcgcagccgaggaggaaaaagggcccggggccgagagctaaggctacgggaaccgggcgtgggaggagggcggagccaactccccacaaggaagtcttgtgcaactctcaggcgcctgcagccacgtgagcgcgcggctttcattttactcaggtattattactattattacttcttttgagacaaggtctcatttccgtcgcccggctggaatgcagtggcacaatcactgtcactgcagcctcgacctcagagcaagcgaccctcccgcctcagcctcccgagtagctgggacaacaggcgcgcgccaccacacgtggctaatttttttttctttacttttcagtagagacagtctatgttgcccaggcttgtcgggaactcctgggctcaagagatcctcccggctgggcctcccactgcgccaggcctgttctcactttcagagccctccggcagtcgccagctccccgccagggggccggactaacgcacccggccgtccgtgccttccccgcgctttcctgactccaaaatctcagcccgcggtgctcaccgcgtgggaccactgtctgggcgtgcggctctcgacctccgacgctgcgtctcccgatcccagtgggtccagttcttgccggtcccacgtacgggcccctcgacctcgaatcccgtcacccaaatctcagcgccacggcccctcattatgtgcagtcctcgctcggtcccaggtttgcggcgcttaaactcagatcgctcttccctgatcccaaatcccagccccagcccaacgatccccaccccaataggcccagtccccaggtagtccgggtacggggccctggacttcggatagtctccctaatctcaaatcccaccccccgtccccacccccagggggacccggtccccgctaggtcccgggtgtgcggccttcgacctcggagacttcggccgcccctcacctcggcctccgagtctctacactcccgctctcatatcaggcaccccggtggtcccttggagcacctagaggagggtgggacgcggggaacttggcagttgtagcagaggcagttgaggcttgttgaccatcaccatggaaacccccgcctgcgagcacggggcggagcctacgaggggcggggtcaggcgcgctgccggccccaatcctcagcgcctgcccgtcgagcgcacgcggctttgccggaagccctcctgctcccggcgagccaggccccgactaggccctactgcccggctcagccctttgccctggacaccaggaaacagaagcccaaggagcccgcgtccccaccccctgctacctgccggcgtgacagcgattcggtggccccccgaaccccaccttgaggaagacgcggcgcagtcctgcttccacgacggagccggaaggacgcaaggaccgcggcagggcggagtttctgcgtccggcgtccgggggcggggccgcgacggcgcattgtgacgcgccagagctgagccgccggttggccggctgggcgcggagcagagccgacacggctggcgggggaggcggtggaggcggacaagcgaggacgtttctggagaggagaagggaggggaggggaggggatagggggagggggaggaggaggagggagtggagcggcgggaaagatccctctgactgcccctgaggccctggaggaaggacactggtgagccccgcaggacactgaaatgtgcgccgaaaggacgcctgatggaagactaggatgggaaaaggaaatgagagccgatggcagggcgtggtggcgcaagcctgtggtcccagtaatttgggaggctaaggcgggagaatcgcttgagcccgggaggtcgaggctgcagtgatccgtgactgctccattgcgtccagcctgggcgacagagcgaggcgctgtctcaaaaaataaaataaggaaagtagtacactgaaggccgggcgcggtggctcacgcctgtaatcccaccactttgggaggccgaggcggacggatcaggcggtcgggaaatcgagaccatcctggccaacatagtgaaacccctactaaaatacaaaaaaat

SEQ ID NO: 913729 - DNA, 4001 bp, Homo sapiens
tgcttcactagaacatacatcataatcactagatcaccaacatcccagtaaaaacgctgccccaaaggactaggacacgggctgagggctatggaattctgagaactaagctgcttgagttttggaaatgtggaattagtaaaaccagctaattatgctgaacctgttgtcttaacatgaagataatcaaatctgccttgtcttgcaaacttccagtgattattacttaagacactattgggggggtgtacaaatggaaagcattacatttattaggaaacctattcaggggtgaaacagtttcaagtactctggaatcaggttttcaaaaggcttcaacaatccgacttgttcaaggatctaaagggtggaacccagtcatcttaatgatctgatccacttatgcccttgtttatccctgcgtgatccacagaccaacaccctgaggcgtctctggggacatgcacaagctggcaaccagacccacgtacacccatttaccccaatggaccagccgctgtaagcctgtagaccacggccactgcgcaccgccaacgcacgcagaggaagagtctggtctccccgtccgcagcgccaagaaagcgctgggggcggggagggctgctcagctcccccaggtgactggacccggaggttttcagatcgagcttgcacgggggccacctagataattaaaacaccaaccctaaaacagatctgggtgggggctaagaatctgcatttccaaaaagcgctcccgaacgagctcttcgcagtgatacaggttggacgggattaacgcttgccttcaggcagagccaatcaagataaatagggcgcgccggagtcctaccagttcggctatctgcagagtaaacagggccgttcaagcaccacccacctcgttttcttttgttcaggacaggactcgaggaaggatcctggcctcccctcctagacacactcccgtgcccccgggaaaccgggcagcactctcgccaggaggctgggagcgcgtctggccgcgccgcccccattactcacttagttccactctcaaaccaaagtccacccggccgggcccgcggactttcatgctctagacttaccacggaggcgagcaggactggtttctgttgctaccaggcaagcgcggctggcagccaagagccccgaaattccaccgaagctcaaccacgcagagggctccggggaaactccaggtgcatgtttttgttctcaacctgcaacagaaatccaagtggtggtggggtcccttccgcaaggtgggaggcccgggcgcgcggtaaacgtgttttggcgggaagcagcgccgaggccccgagacaaggtgacggcgacgttcccgcggcctgctcacggcactccagcagcctcggaccgcccggcccggcaggaaggtcggccccagggcctgcgcgggctcgggcgggagcttccgggcggggggcggagcgagcggcgcagcggggagagtgggggcagggacgggagggttcccggagggaagggcgcctcgcgggagggggaggggaggggaggggaggggagggggcccctggcgggcttccggggccctgagggcgagagcgagggcgacggcaaggtggggtgggggctgctccccggcccgccaagctagcgctgcctaggcgggagctcggggacccgcgggccgagcgcggctgaagggagggaagggaagaggcgctcgtaggtctgcgtccgtctccgagcgaccggggcggcggaaagggacctggggggggcggccgggactggagtggcggggccggggcgcccgcgcggcggctcaccacgccagggactggcccgtcggccccgaggaggcgcggggtccggagtccgggaagcggaggcctcgtgatccaagaccggcagccggacgtgggtcacggggtgcagaggaggaagtgccattgccgggcccgccaagatgtcaccaatgggaaacgcgtgcctgcaggtgcggccccgtggcccgcgcgctgggcccaggcaggaagtgggggaaggagagagtcagggcggcgggaagacatttctccgagttctcccgaagggagccaggcgcgagcgcgacctggggaaagtccagagtgccagccacggggaagggcgggcagtgcagagtggaagagaagccagcaagttagacacagcccctctctgggaggccgcctctaaaatggaactagcggacgtaccttggtttgtacatttgaccatggacacacgtaaagattttgaaaaaaaatctttgaaaaaaaatttttttaacgcaattcctaaacttttaactaacgcaattttgtggacctctgaatcttaattcaaatgaactggagaacaactataaagcaatttcgataatatgatcagtgacattttatattgcagaattgtaaattttgttgtcattatactgtaattttatttctttaaaagaccctttttagagccacaaatatttgcagatgatacctgatttcttgaatgtttcagattacgtggaaagtggaaatatacatgaaacaagatgtgctatgaactagtaatttttattaaagctcctgatgtatacatagagtttcattacacttgtttctacttttgtgtatgtttgactgttttgtttgtttggttggttttttttgagacacagttttcactctgtcacccaggctggagtgcagtggcatgatcttggctcactgcaacctctgcctcctgggttaaggcgattctcctgcctcagcctcccgagtagctgggactataggcccatgccactatacccagctagtttttgtttttagtagagatgtggtttcaccgtgttggctaggctggtctcgatatcttgacctcgtgatccccctgcctcggcctcccaaagtactgggattataggtgcgagccccatgcccggcctgtttggagtttgttgttgttgtttttttttttttttgagagacagtcttgctctgttgcccgggctggagtgcaatggcacgatctcggctcactgcaacctcccctcccaggttcaagcgattctcctggcctcaacctcctgagtagctgggattataggcgtgcgctaccacaccctggctaatttttgtatttttagtagagacagggtttcaccatgttggtcaggctggtctcaactcctgaccttgtgatccacccacttcagcctctcaaagtgctgggattacaggtgtgagccaccgcgcccggcctgttttacgtttttaacagaattattattattttgagacagggtctggctcagctgcccaggctggaatgcagtggcacgatcatggcaatgcagcctcaacctcccaggctcaagcaagcctccaacctcagcctcctgagtagctgggaccactggcatgcaaccacacccggctaatacaactgtttgtaaaactgagagaaagcaagtctttagaatgcacttactaaataacacgaattacagggaacagtaacatactgcatatagtgatgtagactgtgggaaactacaaggacaaatgagccagtcctacctcagaatagttccagccagataaaagaacccacagaattatggttatgttataaaataaagcaattaagttttagaaatccatcttgaaatatttgtgatggcttggatttgtttgaagttgtccacaaagtagtaggtggggagatggagaataactgtccatgattagtaactgttgaatctgtgtgacaggcacattagcctcaacctcctgggctcaaatgatcctcccacctttagcctccccaacgtagctgggaccacaggtgcatgccaccaagccgggctaattttttttttaattttttagtagaggcaaggtctctctatgatgcccagactggtctgtaactcctgggctcaactgatccaccttggcctcccaaag

SEQ ID NO: 913730 - DNA, 4001 bp, Homo sapiens
cacctaacagcattttggaagtattatcttttcacagggcaatacagagcacaacaaaagggaaacgccttattgatcttgatgagatttactcttgatgagattctcctgcctcagtacctggtattacaggcgtgcaccaccccacccagcgaatttttgtatttttagtagaaatgggatttcaatatgttggccaggctggtcccaaactcctgacctcaggtgatccgcccgcctctgcccaattctaagtttgtacactgaggaccctaagtgctgggaggaaatttaaatatcgggggcagggcacttgggagggagatgggtgggggagaagtgacaaccacaggggacttgaccttaagacccctctttcactgggatagcatgggcaaggagcaagggtgcttgctagaaattgttcagtctgatttataggaacccctctgtaagcagtgtggagacacatccaaaagacactttcagttttattgggtaacttctttgaaatatgcttcactagaacatacatcataatcactagatcaccaacatcccagtaaaaacgctgccccaaaggactaggacacgggctgagggctatggaattctgagaactaagctgcttgagttttggaaatgtggaattagtaaaaccagctaattatgctgaacctgttgtcttaacatgaagataatcaaatctgccttgtcttgcaaacttccagtgattattacttaagacactattgggggggtgtacaaatggaaagcattacatttattaggaaacctattcaggggtgaaacagtttcaagtactctggaatcaggttttcaaaaggcttcaacaatccgacttgttcaaggatctaaagggtggaacccagtcatcttaatgatctgatccacttatgcccttgtttatccctgcgtgatccacagaccaacaccctgaggcgtctctggggacatgcacaagctggcaaccagacccacgtacacccatttaccccaatggaccagccgctgtaagcctgtagaccacggccactgcgcaccgccaacgcacgcagaggaagagtctggtctccccgtccgcagcgccaagaaagcgctgggggcggggagggctgctcagctcccccaggtgactggacccggaggttttcagatcgagcttgcacgggggccacctagataattaaaacaccaaccctaaaacagatctgggtgggggctaagaatctgcatttccaaaaagcgctcccgaacgagctcttcgcagtgatacaggttggacgggattaacgcttgccttcaggcagagccaatcaagataaatagggcgcgccggagtcctaccagttcggctatctgcagagtaaacagggccgttcaagcaccacccacctcgttttcttttgttcaggacaggactcgaggaaggatcctggcctcccctcctagacacactcccgtgcccccgggaaaccgggcagcactctcgccaggaggctgggagcgcgtctggccgcgccgcccccattactcacttagttccactctcaaaccaaagtccacccggccgggcccgcggactttcatgctctagacttaccacggaggcgagcaggactggtttctgttgctaccaggcaagcgcggctggcagccaagagccccgaaattccaccgaagctcaaccacgcagagggctccggggaaactccaggtgcatgtttttgttctcaacctgcaacagaaatccaagtggtggtggggtcccttccgcaaggtgggaggcccgggcgcgcggtaaacgtgttttggcgggaagcagcgccgaggccccgagacaaggtgacggcgacgttcccgcggcctgctcacggcactccagcagcctcggaccgcccggcccggcaggaaggtcggccccagggcctgcgcgggctcgggcgggagcttccgggcggggggcggagcgagcggcgcagcggggagagtgggggcagggacgggagggttcccggagggaagggcgcctcgcgggagggggaggggaggggaggggaggggagggggcccctggcgggcttccggggccctgagggcgagagcgagggcgacggcaaggtggggtgggggctgctccccggcccgccaagctagcgctgcctaggcgggagctcggggacccgcgggccgagcgcggctgaagggagggaagggaagaggcgctcgtaggtctgcgtccgtctccgagcgaccggggcggcggaaagggacctggggggggcggccgggactggagtggcggggccggggcgcccgcgcggcggctcaccacgccagggactggcccgtcggccccgaggaggcgcggggtccggagtccgggaagcggaggcctcgtgatccaagaccggcagccggacgtgggtcacggggtgcagaggaggaagtgccattgccgggcccgccaagatgtcaccaatgggaaacgcgtgcctgcaggtgcggccccgtggcccgcgcgctgggcccaggcaggaagtgggggaaggagagagtcagggcggcgggaagacatttctccgagttctcccgaagggagccaggcgcgagcgcgacctggggaaagtccagagtgccagccacggggaagggcgggcagtgcagagtggaagagaagccagcaagttagacacagcccctctctgggaggccgcctctaaaatggaactagcggacgtaccttggtttgtacatttgaccatggacacacgtaaagattttgaaaaaaaatctttgaaaaaaaatttttttaacgcaattcctaaacttttaactaacgcaattttgtggacctctgaatcttaattcaaatgaactggagaacaactataaagcaatttcgataatatgatcagtgacattttatattgcagaattgtaaattttgttgtcattatactgtaattttatttctttaaaagaccctttttagagccacaaatatttgcagatgatacctgatttcttgaatgtttcagattacgtggaaagtggaaatatacatgaaacaagatgtgctatgaactagtaatttttattaaagctcctgatgtatacatagagtttcattacacttgtttctacttttgtgtatgtttgactgttttgtttgtttggttggttttttttgagacacagttttcactctgtcacccaggctggagtgcagtggcatgatcttggctcactgcaacctctgcctcctgggttaaggcgattctcctgcctcagcctcccgagtagctgggactataggcccatgccactatacccagctagtttttgtttttagtagagatgtggtttcaccgtgttggctaggctggtctcgatatcttgacctcgtgatccccctgcctcggcctcccaaagtactgggattataggtgcgagccccatgcccggcctgtttggagtttgttgttgttgtttttttttttttttgagagacagtcttgctctgttgcccgggctggagtgcaatggcacgatctcggctcactgcaacctcccctcccaggttcaagcgattctcctggcctcaacctcctgagtagctgggattataggcgtgcgctaccacaccctggctaatttttgtatttttagtagagacagggtttcaccatgttggtcaggctggtctcaactcctgaccttgtgatccacccacttcagcctctcaaagtgctgggattacaggtgtgagccaccgcgcccggcctgttttacgtttttaacagaattattattattttgagacagggtctggctcagctgcccaggctggaatgcagtggcacgatcatggcaatgcagcctcaacctcccaggctcaagcaagcctccaacctcagcctcctgagtagctgggaccactggcatgcaaccacacccggctaatacaactgtttgta

SEQ ID NO: 913731 - DNA, 4001 bp, Homo sapiens
cccgcgcggttccgggaagccgccgccgccgcccgttgcccttcgcgcgcagccgccagcgcgcgcctcgcgtcccgccacgcagatggccggcccgagcccccagcgcccgcgagcagtttcgagaactaaagaggcgcgtcagctcgtccccgggccgcccgcgggcaatggccgagctcggctctccttccaccctccgccgggacacacgcggagccgagcgggggtcccaggcgcctagggggaggggttcccgcgcccggggcggccttggggggagggcgagtcgggtgccttgctcctcaaaaccctggtccacgactctgcggttgggggagccgggcagccggcgcagcaggagccgggccccgtccacaagtttcctacgagcagggcggaatcgacgaaaatacttaatacaaacaaacaaaaggaaaaaaaaaaggacgactaagctgaagagcgcgcacgagtcagattttcaccccaaatacaaacacgatacctctaggagcaggagaccaatacagggaccgcgctccgaggacacgcggcgcagccgaggaggaaaaagggcccggggccgagagctaaggctacgggaaccgggcgtgggaggagggcggagccaactccccacaaggaagtcttgtgcaactctcaggcgcctgcagccacgtgagcgcgcggctttcattttactcaggtattattactattattacttcttttgagacaaggtctcatttccgtcgcccggctggaatgcagtggcacaatcactgtcactgcagcctcgacctcagagcaagcgaccctcccgcctcagcctcccgagtagctgggacaacaggcgcgcgccaccacacgtggctaatttttttttctttacttttcagtagagacagtctatgttgcccaggcttgtcgggaactcctgggctcaagagatcctcccggctgggcctcccactgcgccaggcctgttctcactttcagagccctccggcagtcgccagctccccgccagggggccggactaacgcacccggccgtccgtgccttccccgcgctttcctgactccaaaatctcagcccgcggtgctcaccgcgtgggaccactgtctgggcgtgcggctctcgacctccgacgctgcgtctcccgatcccagtgggtccagttcttgccggtcccacgtacgggcccctcgacctcgaatcccgtcacccaaatctcagcgccacggcccctcattatgtgcagtcctcgctcggtcccaggtttgcggcgcttaaactcagatcgctcttccctgatcccaaatcccagccccagcccaacgatccccaccccaataggcccagtccccaggtagtccgggtacggggccctggacttcggatagtctccctaatctcaaatcccaccccccgtccccacccccagggggacccggtccccgctaggtcccgggtgtgcggccttcgacctcggagacttcggccgcccctcacctcggcctccgagtctctacactcccgctctcatatcaggcaccccggtggtcccttggagcacctagaggagggtgggacgcggggaacttggcagttgtagcagaggcagttgaggcttgttgaccatcaccatggaaacccccgcctgcgagcacggggcggagcctacgaggggcggggtcaggcgcgctgccggccccaatcctcagcgcctgcccgtcgagcgcacgcggctttgccggaagccctcctgctcccggcgagccaggccccgactaggccctactgcccggctcagccctttgccctggacaccaggaaacagaagcccaaggagcccgcgtccccaccccctgctacctgccggcgtgacagcgattcggtggccccccgaaccccaccttgaggaagacgcggcgcagtcctgcttccacgacggagccggaaggacgcaaggaccgcggcagggcggagtttctgcgtccggcgtccgggggcggggccgcgacggcgcattgtgacgcgccagagctgagccgccggttggccggctgggcgcggagcagagccgacacggctggcgggggaggcggtggaggcggacaagcgaggacgtttctggagaggagaagggaggggaggggaggggatagggggagggggaggaggaggagggagtggagcggcgggaaagatccctctgactgcccctgaggccctggaggaaggacactggtgagccccgcaggacactgaaatgtgcgccgaaaggacgcctgatggaagactaggatgggaaaaggaaatgagagccgatggcagggcgtggtggcgcaagcctgtggtcccagtaatttgggaggctaaggcgggagaatcgcttgagcccgggaggtcgaggctgcagtgatccgtgactgctccattgcgtccagcctgggcgacagagcgaggcgctgtctcaaaaaataaaataaggaaagtagtacactgaaggccgggcgcggtggctcacgcctgtaatcccaccactttgggaggccgaggcggacggatcaggcggtcgggaaatcgagaccatcctggccaacatagtgaaacccctactaaaatacaaaaaaattagccaggcgtggtggcgcgcgcttgtagtcccagccactcgggtggctgaggcaggggaatcgcttgaacccgggaggcggagcttgcgtgagccgagatcgcgccactgcactccagcctagcgacagagcgagactacgtctcaaagaaaaaaaaaaaaaaaaggtacactgagtactccggagaccgcctaaaggggtctcagagcagggcgttaggagggatttgtcaggttgaagttgctcaggtgataaattccgtggtgtgagaagcccccaaacctcagaatgtaactcagacccaggtcgagggcaagattttcagtcacagagcacctgaacacacagatttggtggctaatggctaagccagggacagattttctttcttttctttttttttttgatgtattgtagggctaataattgtaaccattttattttggtggatcttcttcatgaagagatgatgtcaaggcactcatcacaggttaagctgaacattgttactattgttattatttccagactgagtatcgccctgtcattcaggcgggagtgcagtggtacaatcacggctcactgcagcctcgacctcctgggctcaagcgatcctcctgcctcaacctcctgagtagcaccaccactctcggctaaattttgtattttttgtagaggcgaggtttcgctgtgttgcccgggctggtcgggaactcctggactcaagccatccgcccacctacgcctcccagagtgttgggattactggattgagccacgcatctggctgaacgttattttttaaatcaccagagaaagtaaaggagtgctcaaaatagtgtcagatgatgagtgggatgattgtgatgaaggaaggagtttgttaaaagaaaaagctagttccaagaaagagaatggaaagagtaaagcaggagctgtcagaataggtaaaaatgtccaaagagaaaactgcataatttgaggcaaaattacagaaaatagttcctgcaaaaatcagataggtattcagcatcataggaaaggggcgaaaatcagataggtaggtattcttaagaagttgtggccggccgggcgcggtggctcgcgcctgtaatcccaagactttgggaggccgaggtgggtggatcacctgaggttaggcgtttgagaccagcctgggcaacatggcgaaaccctgtctctactaaaaatacaaaaaaaaattagccgggcgtgttggcgcgtacctgtagtcccatctaccctggaggctgaggcaggagaatcgcttgaatccaggaggtgatggttgcagtgagccgagattgcaccattgccctccagcctgggtaacaa

SEQ ID NO: 913732 - DNA, 4001 bp, Homo sapiens
acggcacaaatgaaaagaggacagaaaaaagatgtgtagtccaatccaattagtaaagctatttgttatatcatatataactttacaggacagtctggactatctcttcaaagggtcactcaaacctactgtttcaaggtaagattttcgtaaacttttccttggcaatcttgagaaagcatcactgaacatcttcaataataataagtttttgtttttagagctggaaaagtaggtaacaatattcttataaagttttacatgaattatcagaaattcttactctcaggcctttctcctcccttttgtactgtcttcaatgaaaattacggatccagttctcaggaccctcatccgaatcacaccaccaccacgtgactgggtttacaatttgtttttatgtttagtaggcttattcccttgtttaaaatacgattacagtgtactatactcctacactaaagaaaaaacatgcctagctaccaaaagaaaataaaccataaccgtattttgaagtattttacttctagagccttaatgccatcggaaaaaaaaactgcacaaaatacaactcttggaagatttaacatcgaaagctcaatttcaatacacacacatctaccatcactgggttgttttaactgtttcccaaaagtaaaacttaaaaacaaattctaacatatatacgccaaactacgcaaaacaattgctacatcacccacccccaccccgaaagttcaaaaagcaacaattatagttcactgggcccagacgacctacttgaaacatgcccatttcacattcctatttgataaatcacccacttttctgctcacaaaatcatccccgaagtccttattaacgtttaaacatgaaaaaaaaaaaaccctttggaaaatcagtacgtactcttttcgaagttccaaatctggaatataagggccggctaagcgtcctttattcctcccaggagactttccgtttatctagctgccctagagaccagaaagctagggagagtacgccccttccccctcccgtcagcagccaagcctggcttaaaacccttcgccaccgggcggcagaattacaaaggaggccgtctgcctcctttgtcctggatttgggagttgagcaccttcgtcgccattggctttcctcccccagctccagcctctctcatcttgggaatctgcgtcagaagtcactcgcagtcccgtcagcccaggtagccctgccgagactgcggaggaagggaggccgcggtgggaggccaggcccatccggcgccatttccatcgggagcgcgcccggcaaacccgatcctccctccacccaactgcccggcctttccctgctcgcttcactacccaccctcatcccttccagggagctttgaccaccccctcccctggccttctagatcagttttcggaagctggggaacaaaaaagtaaaaagagcggggaagggcgggaagccgaggtggccgcgccactgtacccaaaatggcggaggccaagccagcagggaaaggggaaaatgctggatgtcccctacttcgggcctcggcgtcgtccactgaattccacctgagcaagtcctcccatcggcaagccgccctccctgaagtgggagatggtcggggaggcgcagccccgccgcttccaagcggcggcctccgagcggcgaccaccccactaccccccaacccagcccctcccggcctttcgtccttctcccgactccgctctcgaaaccaccagcccaacctacccccttttacttcagataccctgtcaggcgatagttacgccgactctggtgctcgcggggtccagttcaaagaagggagaagtcgtttgcctcgtgtagcgctcgccacaacggttctcccaaccgtctccagcggtgacaaccgcttagggagctgcgcagcacagctactggcttggggggatgggagggaacgagcaagaagtggggggcggagcgagaactgcgaaggcggccggccccactctcgcgagacgggaaagtcggtttcgcatggcgctggcggcacgcagcgcgcctgcgcggtggtgggttgcgcagctgttgggggcgaggtagaccgagcagaggctgttccagttaaagagctgcagcgcgcaccgtttttcttgcttacgttagaaccatccagttttcagagcgtaccattctgccgcctcggggcgatggcaatggcagttctgccagtgtgtagaaggaaccgtgccgtagcgctctggagaagttctccggtgatctgcccccaccgtgaacaaattctgtgagggccccgccctggctaggcatcgacggcgcggaaagggccccacgtggttcgaccggcaaacgcggggcggattttctggtccaccatgtttgcattgtgcggtgaaaaataggagtgtttctgggccgcgaagatgaaagcgtccactggggccgatttcggctctcgggctgggtgtccgcctccttcccctggcccagagttgctggccgcccgccagcgcgcttcgtcccaatgtgccgcgcgggatccgggtttcttgggtgtattcatgtccaccacgttaccgttctctctgcaaatccttcctctttttctcctctggccttcgcgttttcatctctcccgccgtcagtgcctcggagactgattagcctgtggaggccgacgttgggttttttttatagttttgcgttgttgaaaattgcgcttccaagtgacacctaataaataagtacattttggttttgctgtcatgtcaccaaggttcctaatgacacattatggctttttttttaagttccaaaaaaggctggccgcggtggcttacgcctttgagaggccgagggggaggatcgcttgagcgtaagagttggagaccagcctgggcaacatagtgaggtgctgtctctacaaaaaatacaaagattagctgggcgtgatggcagcgcacgggagtagatgggactcccgagtagtcccagctacacaggaggctgggcaaaaggatggcttgtgccctggaagttgaggctgcagtgagccgtgattgcgccagtgcactccagtctgggagaccgagggagactcttgtctcaaacacaaagaaaaaccccgaatttctgcgcagagggttaaggggaagcctggtaaagagatcagtgcaagttcatcctggctaacacggtgaaaccctgtctctactaaaaatacacacacacacacacacacacacacacacacacacacacacacacacgccgggcgtggtggcgggcccctgtagtctcagctactcaggaggctgaggcaggagaatggcgtggacccgggaggcagagcttgcattgagcccagatcgcgccaccgcactccagcctgggcgacagagcgagactccgtcccacctccctttcccccccaaaaaaatcagtgcaagttcaagtacaaaggtaggaacatacgtggggtgtcaggaagatggggtaatgttagaaatgtggatgaagctagattgtagacaatcttcaatgtccggccaaaagactttcaactttgtggtacagacattgggaagcctgttgggggtagggtgagaggtgttagcaacgtaggaggatgtataattttttctcccatgagatctgcagtgtgtaggatggagacaggtaagtttccattaccttcatttaatggaaacttcatttcaaagctttaattcatcctcaaacctgcttaagacgagtgtggggcagtaagaattccctaagtcatgatgctcacatacccccaatggcccactccctaaaaatactcagtggaaggaagaaaggacagtgttatcatcattaaaagagatggaaaaccaaacaaggatgctgtagtaacaatggctcatatttatttttcagggttgtaaagagcaaatggagtacagtgtgtagcataagctacacac

SEQ ID NO: 913733 - DNA, 4001 bp, Homo sapiens
attttaatcattattaccattggaatcagtaccttccaatgtatattactccacaatttatagcacgatttcacttgcattctctcagatttttttgtccaaccatcccataatatgagcattatcactcccatgtgtccgatagggacagcaatcatcccacactaagtcagtgccagagatgtgatttgatttttttttttttttttgagatggagtcttgctctgtcgcccgggctagagtgcaatggtatgatctcagctcactgcaatctctgcctcccgggttcaagcgattctcctgcctcagtctcccgagtagctgggattacaggcacacaccaccacgcccagctaatttttgcatttttagtagagacggggtttcactatgttggccaggctggtcttgaactcctgacctcatgatccctccgcctcggcctcccaaagtgttgggattacaggcgctcactccagagctgtgatttgaaaccagagtccacagtctacacgatactgcctcaatagcagccacaacaaagctagtgctgaccagacactccgttgaaatagtgtggcctagcagctccaaagggtttataatgagagtcagcgagggagtaaaatggagcatgggccatgcagtcagacgaggtgcaaacctcagctcagctatgtgttagccgaatgaccttgggcagtgaccatgtcactctgaggcccagattcccatctgtgggatggtcctacagagagcactgcctcaggggattgtgcagtaaggaatggggatgggcggagcagggcaggcagaatttgacattttcttctaccttcatttattgtgcctgggactctgttacatgttgattgttgcaaatatcatctggtccctaacctcagagttggggagacccatgtgtaaagagagatggggtcacaggagccacaacaggagtcacaggagccaaggggtcacaggagaactaattctggcaaggaggctttgtccagaagagaatgtacaaacaaactttggagggaactgggactgtggctgggctgccacgtgaccccagccacatgccttcacatctgcaccaagtgacaaggttgacaaggactttcacgcccattatccagtccaacctcagaatcactctgggagctacaaaggcactttaacagtttacagctgggtaaactgaagcaggtgaggtttagcttaaggttacaggccagcgtggagcttcctgcctgtctcctgactccagaccagtctcccctgttcctctcccataataaaatgacccactgagtaccagactatccctggacagcttgacagagcctgtgtaccctcccttggtctctggctaaagggccactcacatctccccaggtcccacagaggacagccccacttacctcggaaggggaaggtgcccagtttgtgcagattctcctccagtttcccatagtccacctctgcagtggcagtgaagggggtggtcacaggggggtagatacccgcaatgtccaccttcttcccctcccctgaggcccagacccccacattcctggacaagctcctgcttagcccctgcctcacagaagaccagacttggggacccagcatctctgcaggaggcctgaagcacaattggtctatgtcccagagtgagacttagtttgaactctttctaaccccctattaatgatcaatgtttctagttaaaaatttgcggcctccctgacttgtggccactggggcaggcctgagctgggtgttcccagggtcaggggcaaggcctataggccccagggggccctgttccttctgggtagcagctagagagatgccacaacccagtgtccctctggccagatataggactggtttctgggatcccaatactaaagagtatctccttcggtatctccagtgggatctgggccctcctcccacaattcccagctctgaagccagaagcccagccaggtttccacgggcagttctgaggttggtggagctgattggctgagcaggtcctgccctgtgggaggtgtggcaaggctgggcaagaagctgcctgtgacaggctgtccatcccctgccccgctcccttaccaggctcctcctgccaaggcagccacgtgacaagcctgtgctagccactcacagccccacaggacagcaggcaccaggaagggggccaggatgagtgtattaccaagtcaatccatgcaggggccaagcctggccctggagatgtgagaaggggcaggaaaagttgagtggcagggaggaaaggaaaagagaccacagtaaagaagctgcagggctggctcagagggccaaccggctcccagtttccctcctccccaaaccagcatttgcccccagtcttccttcattcccaaagatttcagacacaagtggaaatgaacatcgcaattagcaaaaacagcttttttattgtggtagtttgtggtatgtgctcctggatcatgcagaaaaaaggctgggccctcagttagctccgggagccattcttaggaccctccggctgcacacagagaggggctgggtagctggctgggctggggcacgcattcactgggctggcacaggctgaggggtctctcgcccactatcattaggcccctccagcccgttatgctcagcccccggctcaggatgctccagggcgtgccgggtatcagcctgccagagctgcaccaggtccgtcggggtctttcctgcctggagggggcgggacggggcgtgggggttggcaagagaaaatctgttaactgtcctgaaggctttcacagaaggtaccctcattgacaccaccagtgcttctcaaatgggggcaactggcattgtgtgaagatacttttggttgtcacactaggggatgggtactactggcatctagtgggcagaggccaagaatgttgcttaaatatcctacaaggcataggatggtcccctacaacaaacaatcacccagccctaaatgtcaataatgctgagggtgaaaacccctcatttataccttctccatattttcctgcttttctcattatccctttagcctttcttgagcccgagggactctcccatggcctccttttgtgaatgctctgggccccaaagaagaacttggactaagtgttccctagtccaaggtgttccctgggcaccttccccttccaaggacttcctgcctagatcctaagaaaactcaaagaccacaggagctgacatggggtgctaggaactgtcatgccagctgagtgctcggtcccttccagctctggcctttcatgattctggcctccttgggccagtacttgaggaccccctctggcctacttgggggtctttgggaagtcctcttgctgcccctcctgctgtctctctgcacttgcactctggacatagacacacatagagaatggggcggacagttggaatggtgctctggaagaggacaagtttatgtactatggtgctggccagagccaatgatacatgtccctaggcgggggctgctccagggaccaggacagcacctccactgtatgagtgctcacgccagtgactgaatcaaggagggaatgagcttaccaggttcttggtcatcatgtcagccccatgcaggagcagcagtttgatgattttgtagcggttgagcctcacagcgtcatgcagggcagtatccccttcctagagtcagtgtggcactcactatggcccttgtgggcagtgggaggaggcaagggtgatgggaggtgggctggagaccctgctcaggagccaagtcctgaaggccccaggaggaaggacaccacctgtaggggcccgcaggctgcccacacacccatggcgggtgagcagcggacaggctagcactcaccctgtctctggcattgatttccaggcccagggatagaaagtgctccacaatctccacctgccctgtccg

SEQ ID NO: 913734 - DNA, 4001 bp, Homo sapiens
tggttgtgagcggagaagtgaccggctggctggagatgggcaggtcaaggtcatgaaggcggtcatctaggtgcgggtgtcaggtaatgagtgctcaccccttggtgggggctgggaggagctttaaagatgcagcaggctgtgatgacctgcctggattcgaggggtgaaggagagatgaggcatcaggatgggggtggcctcaggatgcagggctggggaggggatgagcaggtgtgcagagcccagtagcactcagtccactgcctacctcattccatctgcctcccaaagccccagggtggatgctgcctgcctccctgtcctccccaggtggggcaagatcatctaccttggcaagcacagtggagcatccagacggccagaggttcagaaagggctgcagcagaccgactcggtgactggctcatgggagagcagcacagcatccctggtcctgcaaatgcttaaaacagagagaatatgagggcaggcagatgccctggtcttgactgctgcccgttgagaaaggacaagctggagaagggctgcgtggtccctggtctctccaggccctgaggcagtctgctaagaacatatctgggatcctgcccctcacctcccataatggagaataggaacccggccagcacagccctttgcacagagcaggtgcccacttttgttccttcctcctttgttcccatgaagtgctctcacttctgcgggtcactcagagctccccaagcagccccagggagcttgctaggagtgactgacgggagacagcatagcacatcccaggtggtgaggatgcagtcccggtgaagggagtggggatcctgggatgatacgatgaatggaaggaaactaacaggaaaggcatctgggaccaggttctagttttggctttgccaagtcccataaacctctctgagcctcaaactcctgcggagaaacagagcaacatcccctactctacctccctacagggttagatcatgggagtgaccaggcaagctgcaaagtaaccttagcaaactgcgttcttacataggtgtggggatcattattcctatttcccagcttcccttcttcaaataacaggattaatcaatctggttccggaatcattcatatttgaatagagggcaggaacaacagaaaacttaattaggaagtcaagcactgtgagccagtaagaggcaagtgactacccgccacagagactgctgttacgagttcggcctttagcagccgaaccctgagacgggctccatcacccacatgattggcccgaatgccatattcccgaaacagggggatgcttcccaaaggctgctgggaagagaacctcgccggtgtcacactgagacttccgcttcacctcgctatcttgccctagaaagggaactcggaggggactcactgacgaaaggagctccagatggcggggggccaacctggggcgacccccagcgcccactttcaccatctggaccccagcaaacctccctgtggcccttggtcccgtcttcagcagctccttctggggtcccacaccttcggagcccggccctgcccctgagtctctggagagagcgagtcagcagttcgccgccgcggggctcccgtttgcctagcacgccagtttctgtccagtttcaccccaaatccccacctccccccacccccgaacctcacggccaccctgggaaggaggcttgacttgtgacatccacccctcttcacggctgaggaactttggccccgagcgaggaagcgaccggcccacggccacacgcccggagtgggtgaggctaggagtgggcccgctccgggacccctagggaccctacctcacttccgggagggttgaaggggggctccggagggaggatcgccgcccccagaggggacagcccggaggcccacgtaccggatcgcggcgcgcacagcgccccgcctgcaggagcccgggcgcgcttccgggtaggaccgcgtgatcgcgcacgtgaccgcccgccccgggaggggccggagccgccgtcgccttccgcgggttcgagccccgcccctgccaggccttgcccatgccccattttacagaagaggaaacggaggcgcagagagaagaaataacttgctgagggtccgaaccaggctcagaacccaggtttcctggctcctcagctgatcccttctctcctccccatgccccggaacctcaggctttgcctaatgaactgaagttctggggctagagctgtccttttgtgactgctctccctgacctttggggaggtgacatagcgcacagaagggctcagttgcccccagagtgccaacgctggaatttataggagttctcaatctattttgggagtggagtgcacattaggagttttgtgttgaacctatgtttgcaatatttattttaaaaaatcgtatgtgtattgggggtgcctggaagtggagggggcgctctggaagggcctaaatccccgaacagtccacccctcagtgcctgggtgccacctgggagctttgagcccagcccagcaaggtatgggttgcaagaactggctggggatatagtagattgagcatctcttgggggaaaggcagaggctaagaatcaatacttccaccacctgcagatcaaagagagcatcactccccccaacccactacccaccccttccagcccaccttagggcaaattcttccaactccccatctacagcacatagccctgccacacgcatctctttgctcagcccaccgttgagatcgttcactcactatgctttcagtggtcgaatgaattccatcaaatggatatgctgttatttacttattcattcccctactggtaatttccatttcccaactgcaatgtatgaggattctgatttctccacatcctcaccaatgcttgttattgttgatttttttttttttaagtatagtaacccagcgtggagtggtgtcttgtgattttatttgcacttccctgacgttcggcatcttttcatgtgctttttgcctatttgtgtaccttctctggagaaatgtctattcaaatcctttatccatttttaaattgtctttattattgagttgtaagagttctttatatgctctggttacaagccccttatcagatacttgatttgcaaaagtttttttcccattatgtggcttgtcttttcactttcttagtggtatcatttgtagcaccaaagttttacatttttatgtaatccaatataatctattttttagttatgtacgggttttttgtgtcaacatgtttctttttttcaaatttgtttgtggtaaaatacatataatgtaaaattgatcattaagcattttaagtgtattgttcagtggtattaactacattcctaatgctatgcagccatcaccaccatccatctccacagctcttttcatcttttaaaactgaaactatatccattaagcaataatgctggccgggtgtggtggctcacacctgtaatcccaacactttgggaggtcaaggcgggcggatcacaaagtcaggagtttgaggtcaccctagccaacatggtgaaaccctgtctctactaaaaatacaaaattagcagggtgtggtggcacacagctgtagtcccagtgactcaggaggctgagtcaggagaattgctggtaccaaggaggcagaggttgcagtgagccaagatcatgccactgcactccagcctgggcaacggagcgagactcccatctcaaaaacaacaacaaaaacaacaacaacaacaattcttcattcctcctcatagcaaccacaatgttactttctgtctctatgaatttgactactctaagtacctcatataagtagaatcatacagtatttgtctttttatgactggcttatttcacttagcataatattctcaaggtgcattcatgttgtagcatatgtgagaattccttccttttttctt

SEQ ID NO: 913735 - DNA, 4001 bp, Homo sapiens
cccactgctcaagagcagctctagctccagagcctcaggcctggtcccctcctcacctagcactgccagagctcggcgatacaggggcagtcctgggccccctgccccccagcccggcccgccctgctgctgtgccagctccacaaagggtggcagccatcgaggctccagctggcacagacactggcacaggagttcaaaggggggcagtattccattggggggttcctttccagcggttattccccctaacactttcttccacacatcagggggtgcttgggacctcagcttgccattcccatctagctggagctgcagggccctgagggtggcaccccaggctgctgtaggaagggcttggaaaacggtgttgagctgggctagctggtctcctatcaactcagtcctcagcaggcgtgccacttcctgctccgccagctcagtccaaccagcctcctcatcatccccagccaccagctgggccttcagctgttctaagcctcggtaatcccgaagctcggtcctcaacatggtcagcagtgcagatgggggcaggtggccctggaggatggaggccagagcctgaggtgcccggaatgtgctgctgtgtctcagttcttctggagtgagctgggcaccccgcaggctccgccgctggtagtacccgcaggcctcctcaaacaccagatccttggctgaaggcaactcaacaccctgtggggcttcccagcccacacaaaacagacccaaggctgaaagcagacgaagattccctcgggtctccagctcttcctcatcctccatgccgggggctggcggttctagcagatgtaccctgtctgtacttaggaccttcctctccagcagctgcccactgcccatgtccagcagttccaatgtggagcccagcacacaggccagagtgccctgaaatgtgcctagggctgcagacccccacgggcctacaggtgcctcctgcagggtgcccacagcccgcgtaccaccgtgggactgcaataggctcacagtgcccccgaagtcaagcaacagcaggccctggggagttggggcccaggtgtgtacagccagtggctccctgggggacagcaacccaggaaggcctcggagcagggtccggaagtcccatgtgtcccctcgtccaggattcagactcttactgtaggagagaccaagccgtggggcagccaccatcactttgcccttgcctgggctccagatgagtagaacgtgggccacgccaggccaggtggtggcagtgggcaccaggaagagttgtctgcaggaggccagcagcccgaaggcagggcagtggtgcagcaggacgtgtgtgcggcccaggctggtgctagcttccccgctgggctccagagtccggacgcacacacagtggctgaaagcggctgctggcgaccctgacgggccctcggcccgggcctgccgctcctcgcaccacaccaggcggcctcggagcgccgccactgccacaacgcgggctcccccgcccggacacagctcggtgctctgcagcggccgccagccaggccccacgcccgcgccccacacctcggccaggccactctcccacaccagcaccagcgccggccgcgctggccacggcaggaagaaggcgtccagcggggagggctggccggccggccaggcccgctctagctccgcgccgggccctcgcgacgcgactagcagctgtggggctaccgccccagggggtcgcaggagcagcaagtggcggccgtccggactgccacggactcggaccgctgagtccccggccaccagctcccggagccgcgccgcgccgccgaaggcgctcaggtccgagagcagccgcagagtccccgagcgcttcatggcgccgctgcgcgggagcgcgcccaggctttgcccaggtccagccgcccagcagggcgaggcccgattctcgggggagcggagcagggccaagacttccgtctcccgtggatgaggtgagcagaggccgggccgagcgtcgactccgccccgcccggccggctccgggatgcctcccgcagtcgctgggccgacactacacgcccgccgggggaggagccacgggagcgccccaggggctcagcgcctggaccgcgcccgcccgggcacgctctcggcgcagggggaggcccttccccagaccccaggacgccgcccagtggcccggagtcccacgcaggaatagggattccagccccctgagcccctctcccaagaatttcaccccaatttactcattcaggaaattttcgttgagcacatgctttgtgccaggctctgagtagacagccctaaacaaaatagaaaacctcaacctcatggagatgacaatctagtggaaatagtaaacatggctgggcgcggtggctcacgcctataatcttagcactttgggaggctgaggtgggaggattgcttgaggccaggcgttcgagaccagcctgagcaacataggcagaccttgtctctataaaaattttaaaaagacagaaagaaagaaagagagagagagagaaggaaggaaggaaagaaaaccacttccatatcactatgtgacagccttctctatcccctagtcccttttacagataaggaggatgaagcacagagagattacgtaacttaactaagatcaagcaggtattaagtggtggaggtgggatttcaaccacaggcactctggctccagagtcagtgcaacaaatcactttatcatatcaacaactcatcacccaaaccaaaacagagaaacataatttagaagcactgagcctgtgtaccgactcttcagtaacacctacaaatttgtatgcaggggtccttccaccccttgactgccttttcaggtgagcagttttcctcctctctccaaggccaatccctctttatgagccctgcctctcctccccggcccctaccttccttgagaacttgcatccatttctgtttcactgccctcattccgtcctcagcatagaaataccctgtcatctctcctgtcttggaattcgttctttcatcctcatctccccacttccacctccatcactccctccccttttcctttctcagtcaattttcttgcaaggatgctacatttgccacctccactttctttccttctatcctcaacccactacttccctgaagtagcttttgctgaggtcttcaaggacatttttatttgacagccttctcattgaaagtccctcctgtggtttgcactgcatctttcctggctggttttcctttccttttattttattttatttttttatttttatttttagatagcactgccttcagagttttatttgcctttggttcatcttcctccatcctttattgattgattgattgagatagagtctcactctgtcgcccacgtttgagtgaagtggcaccatcttggctcagtgcaacctctgcctcctgggttcaagcgattctcctgcccagcctcccgagtagctgggattagaggcacccaccaccacgcccacctaatttttgtattttcagtagagacagggtttcaccttgctggccgggatggtcttgatctcttgacctcgtgatccacatgccttggcctcccaaagtgctgggattacaggcatgagccaccgtgcctggcctatttatttatttattgagacagagtcttgctccgttgcccaggttgaagtgcagtggcgcaatctcggctcactgctatctccatgtcccaggttcaagcgattctcctgcctaagcctccctccctagtagctgggatttcagaagtgcaccaccatgcccagctactttttatatttttagtagaggtcgggttttgctatgttggttggccaggctggtctcgaactccaggcctcaagtgatctgcccgccttagcctctcaaaatgttagaattacaggtgtgagccactgtacccggcccct

SEQ ID NO: 913736 - DNA, 4001 bp, Homo sapiens
tccagaagcctgcacagccaatgcgaatgcgccccgccaggacttcttccccgaaaatctgccttccagactcttttctgaggcaggaaagcattaggcgaacaggcagattttttaaaaaaagaaagaaagctggtgggggaaagggggtctgcgcagctgaaggagttcaatgaaagtgggacaagcgttgcggaaaactccgttgcaccctacattcggacgagctcatagacgcgctctgctgcacgaaagagctttcgaagaggaagctgggccgcgcggagctggctgttccgccctcgcggcaaccgcaccaacaggaaccgaaacggcctcggcaagggcagctacagcctctcagtcctccggctacctttcctccacgtggaaggagcgctccacgtggcgcctcccgctacctgccgcgtccgcagacccgacccgggccagggggacaaccccaagagctgagaggcgggcgcacctcaagaagcaaaactcgaatttcgcaaggagtgaaaaatacgaaggacgcacaacggacctggcctcggggcaaagtgggactgagagcgctgagggctcttcgaggggaacccacagctgaggctccaacttgtagggaatttttaaaaactcaacacttggattcgacattgcagaggatttatttcttattttacactgcaactctgtccctgatgggaagggatcgcagttgcctaactgccaaactgcaacaacccgggaagagtgtgagcccaattagattacaagccctagagcaaaggggatcacaaacctccgggtttgctaatctgctggtgcggagttcagatctccgaagcctccctggagtatttctaggactcttaccgcttcccttataacgctgtgaccccagcgaggattttttttttcctttaaagaaaagctaaactgtgcagttaccgcaggagatttaaggaggaggaactggcggggggaggggggcattccgtctataaaaagcgccttacaaagtcctgaagtctggaaatgacagcggaggatataaaataaaaaattttaactccgatccaacttgcccaccactcaagcctctgcttaaattcgttttctgagagtgggagagaactgacgaaacgatctttccgtggaaaattccagtttcgtgcaatcccgcttgaacactcacacacacacactctcctgtctcacatacacacacacacacacacacacacacatacccattcctttcagctctttgttgtttgagaccttttcttcgcttttgtaactgctctgaacctcttgtttctttttcagaagtagacgggaaggctaattgtggatatatgtaagcacaacattttttcagtcataactgataagtttctgaaatgccttctgcattgcaaacatgtgcatcttaatagaaaacattgcttttctcaatcactagttacagcctcacagcacacaatccaggagaaggaaaacctcttttcttctctttgagagatctgcttggcttattttcttctttcccctttggaatgggggataggaagggcttgagggggtgttactaaaaaattttaaatgatccatcgaaacccctgccttaccttaggaaatcgagccagccatcatgaatgatggacggatccagctgcagagagaggaagttctcattgactgtcctgactgggttcttggtgctcacatcaagtagaatcagggtcttttccttcaaacctgcagctctgtctacaggcaagggtctcctgtctccagcctgggaggaaagggagagatggagcaacagagccaagtagagagcccccggggctaggcacgcgggggggcgggagttgctggagggcatggcttcagggaaggcacaaagcaccctcattcaatccctctgatttaaacctctcttcctactgggtctcgctagtgactaattgtccttatctaaagtgtgtgtctgtccgcctttttcccccctttttttcccttcctcccaccacccccccaacacacacacactctctctctctcccgctctctctctctctcgctcgctcgctcgctcgttttgtttttttcttttttttttttaattttttttaattttttttttcagtgttttggtgctggtggagcgaactcacgcccctagccagccttccccgtgactcttgccaagagaactcgtacaccggcaccgcccctttaagagatttctactgcagacattttttaactttttaaaggtaaggggaggggagcaggcgggaaggaggagaaaagggtggcgttgtaccctcctaatttaaccctctagggtcaggaagcagagggaggaatccaaaccatgccgttgtaccgtctgggtacagagcaaagggtctcgtttttacgtccttccctgagaggctctggagggcggttcaagctccgactccgacccgaaagccccagcgccaacccgggacgcgctgggatagagttcccaccgacagcacgcttgtttctcctgacagcgtcaggcacttcgtccgctcagggcccttttctggttgaagcagcaataccaagggcggttaagttgcagaggggtcttgaggcggtgattcctgtcaaagcatagagccctgaaggacattccccgaagaggagccctgatctctgtgacgcgttggatagccacaccgaagcatcctctgacctccatagggcaaagagtagcaagaaggaaaaacatagtgacctggtcaagcagcttttccgatccgagggccaaaagggacatgcgccctcgctctgctctgctcttcccgcaaccgaggaataagcgtcttgggagcgtcaatacatgctggctttggccaagtcgaagctacctgagctgtgcttggatagtcagggcggctctgcgtccaactgtgccacttcttggccactctattctgctgcacaggtagagtcccccctccagaccctcctggaggtcaatcctatacttagccctcctgcagggaagtgcgcctttacagtgccagatgggaccatagtgacactttcgggtttccatctcggcccccagtcaaaaccagagtcacatagccctggatggggaataacagccggaagccgctgtgatgcacgacccgccgctgctcattgagcttccaccccacaacagcttgcaaattgaactctaggtcctatcctgaagcgcgggaaagggatcaggcacagtttgctgcagtcacattgctgggccccactttcggcttctttctgagacaaaatgggacttctacttggcagatgaagggaactactttatgtagtgcgggcagtcagaaacgcagaagcgtccagggccctccttggtatcaaacaagcaaaaccctaaaatgcagagcaagggttttccccagaagtggatggacaagggttagtcttaaagcccagcaaacgctgtaatagcaacctgtatcctcttacctccacccagaccaggattaacaaatctgaaaacagctggaatagatgaccttcaactgaagttccctgaaaagcctctaccaacctaagcacccaggaaatcgagattatgttgcattcatctgtgaagcgccatgacgaccttctagaaataggactgcataagatgaggatatgggagaaagcaaatgcaagtcatattatttaaagatgatttttttaaatcaagctgttacatagtgaagtattggatgttggctccagccctaaggcctgtttccttcagttcctgaacatttctaagacatctagatcctttaaactgtgtgtgtgtgtctgtgtatgggtgtgtggtgtgacataaatttcagtcgaaattcttgtaatttttaagtatgtattgagcacctcttagagatggcaacagcctggcgggcaaacacttttgcctttgtgttcccagactggag

SEQ ID NO: 913737 - DNA, 4001 bp, Homo sapiens
ggcaggtggctcggcacaccaggtatgggtgtccccatcctggacaggatttctcccagcaccgtgtgtgtgtgtgtgtgtgtgtgtgtgtgtgtgtgtgtctgtgtgtgtgtgtgtgtgtgcgtgtgtgtgtgtgttaggataggggtgctgaatttgatttacaagacaaaacagtgttgggaaaggtgtggggagtgggtacacattcctgcccacttctgatttgacaaatcctatgcccaaccttgtatttggtatcatcgcccaccctatcccagcatgagaggcaagaaactggctcagtaattctcaggctttagcaattcaacgcccctacttatcgtcctaaaaatttttttattttctgacttaaaggaaaaaagtaaaaaaaaaaaaaaaaaaaaaaaaaagagtcaatccagttgctgagtgatgttcagacaaagacagctgccagtccattgcctgcgttcaccagctgaggaagagtacaggcggggactgggtgtgtgtttggggacggcctgggctctccgctgcctctccctggagtgagccctgtcaggatcccccacccgccaccctgcactcccccaccactgcagtgccgcgtggggaggcacctccctgatccgcaggaacaatgggctggggtgggggcaggtgcggcttggagtgcagcagagggtgggggccgcaggcccgacagcaagacagggaacccagcgcagatggtggctgtgctgccactggactcagtttctccagcttttggggccccgcagagccaagcgctcgtttcgtggctgaatctcccttgcgtcccggcattttaatatcatcctcgcaggcggcttgcctgtcgctcccgggaaagatgcctgggccgcgctcctctccccggcggccgctctcgccgaggccctgcaggtcagggacgcgcggcgcctccatgcgcccaactttccccacttgggacccacaggaagactggaatcctggccagccgggccctccgtgggagaagccttgatttacagccctgggctccgaaacctgctcgtcctcttcccgcaacccccttccccgtcctctccggctcccccacccttcggagccctaatcacgctccccaaagaaagcggccctagcacatctgcaaaatgcgagcgtctgtcctccgcactgggtgcctccccctgccccccgcaaggaagggaccatcgaacccccgccgcttcacccttccccagcccagtgagtccctggggatgggcggggaggtgggtgagaagcccttcggccgcagctgcagcccccactcctggctcgagcgtccggccggggtgggatggggcgagggaacaggtccaaatctccgatttcccccaggctcccactcctgcctcgctgagtcacgaaaattacccgctggggccacccggccacccggcggcgggccctttacccagccagcgccggcctccgcagcccatcgcgcgggggctgcacacgcggggcggtcctcacccgcacgcgcgaccagccccgcaggaggcgccacccgaggcagggaccaaccaggcgcctcagcgggggctgcagtccccgccgcggagtccgcaccctggcggggcgcagaacatgtgacccgcgggccgtctccggtccaccggaccccggcccccggccccgctgctgctgaccccggccccgcccgccagaactggatgcagcgcgggcgtccccacttttccacggcgcgcgagggggtgcggagcgttgggccaagcgcgcctcctccctccctgccccgccagccgcggccgcaggacccgcagcctgcgctcacctcggggcccgtcgctgccgccggcctccttgtccgccatggtcgcgcagccccggaccgcgaggggagcctccagcgcagcgcccgtgcccgtgcgggtctctgtccgcgtccgcggcggcgctcgggccgtgtctgagccgccgggcagcgggagcgctgctctgacgcggcagccgccgcagccacggctcctccccgggccccgccccggcccgcccggcgccccgcccctccgagctcgggccggccgggaaaggtcggggaaggcgggcgcggggaactgcctggctccggagctgcgctccccgcccgcccagagcggcccgccgaggcccggcctctcctctcccggcttcgggaccgagcggtcgccccgcagtcgaccgcggcgggggtagtggcgcgcccggggctgcgctgcgggagcggatttcaggccctcggggccccgcggcgcgtcccctctttggaagtcaccgaatggccaggcctggagcccttcagcaagcccagcgcgcccggcgctctcccgaggacgcccgcgccagtccccaccagcttctgtctgtcccccagggtcccaggggagcggccctgggccggcgcaaaggcgggctgggtggaccccggcgcgggcaggacccaggccgcagaccaaggacctgcgcgggggccgagcccggggcaccgcctccaggccgcctgcgggactccatggcaactccggacccagggaggtgcttgccccggaggctgagtcgcgccttccatatatgggatccagctgggccctccttagaagtctgagaataacgatattaataatgcaaggcttcagttgtgaatgattcatactccctgtccccagctcctccacacacacgcgccgctggcacctgtttgggcctggccaggcaccccctgggtccgcggtgtcaccaccctgccttggcaaacgagggcagtaataggaatccgaggagcaccgtcactgggtcgtttccgggtgcctggcactgtgctacctgcctggtgctttacctctatctcctttcctccccataactaacattttgcagataaggaagctgaggatcggcagggttacaatatcacacccagcaggtgagtcgcggagctgggattcccacccagctgtaaccaccagcatccctcacttccagagatgggtggcatttcccaaagatcacctaggggaggcttcatcgtacaatcccgttctggatgacggagtgggcagagagctgctgcgagagcgttatggatgacggaatgggcagagagctgctgcgagagcctggagaccagaaggtgatggcagagtgacaagttcaaaacacaaaacttgtcttctgtctgcctgcattaaaaatcccaaatggacagttcctggctgtgcatgaaaccacagtcaagttatttaacctatctgagcctcaatattctcatctgcgaaatgggtataacaggagaacccacttcataaaactgaagattagatagactatgcatgtaacatgcttagcttgggatctagcacatggtaaaaatcattaagtcactgatggcccccgagggcccttcctgcctacgtgcctgcgacagcctgcccacagctcccccgccctcctgtctcaccccttcagtccatgctttgtgatctggtctgtccccaccctactccagctccagctacagccgctctgattcttcaatccctctcacccacccctgcttctcttatgctggtatttcaaagacatgaaaatgtgcttgatgcctggatcacccgtcctctcatttcaccaccaccagcaacctaagaacttctccttctcatcatggactgcccaactccaggaaggctcccctgcatacccatgctggccaggggggccctcctcagtgtcctcaaggcactcgttcctccccatcagaccagggcatcaggacattggccttgacagcctgtcagaagcagcagaaacccgtagcccctgcacatctgcctcctgctgtggaagggccttgggcgccacgtgccctcatgggactcccagccacagtgacatgagggtgcgtgagaaggatgggaggtgacatgcaggccccagtgctgggg

SEQ ID NO: 913738 - DNA, 4001 bp, Homo sapiens
taccttctgcccaggatctgctttactttcattactgtatttgaaatatttcttattctactttgttttgctgccaatccaacaatctgaaaaaaaaaataatatatatatatatatattacaatgtatgtaattttaaattatttcagaagtacaaaaatggggggactagtacctcttcattttctgagtaagcaacaacagctggagtaactcggtcaccggcatcatttgcaaccacaccagcccggccatcctagagaaaaaaacacgaaatacatagtctcattagacgtattcagacgtgtgcatttgtgcaccagtgttactttgccatctgtgtggaaagaaaaactgctatctcaatattttaaacttgcaaatttaattaccatttaatttcctcgttttcatagaaagcctataattccatgaagaactgcctcatgttttcagtctgctctgcaaagtcaacaattgaatcaaaagtaataacaacctttctacacacaaaacgaaggctattattacgttacctttcctacctctcttccttcttaccattaccatttcttttttttttttttttggacacggagtcttgctccgtggcccaggctggagtgcagactgcagtgccagatctcggctcactgcaacttccgcctcccgggttcaagccattctcatgcctcagcctcctgagcagctgggattacaggcgttcccggctaatttttagtatttttagtagaggcggggtttcaccatgttagccaggctggtctagaactcctaacctcacgtgatccgcctgcctcggcttcccaaagtgctgggattacaggcgtaagccaccgcgctgggcccctttcttcccatttctacaaatgaagtagtattattccctttggcttttcctaacaagtcatttgacatttaaacgcgggactagtggcaacggagttcatgattatcgtttcttctgcctccccactgatgagagaaaggccacaagtcctgtcaggctctcacttccagaaaggccacctctgtagaccacgcaccatcaactggcttcacagccaggcagctttgcgggaccatcagccccagctcgactgcagcctccccgcccctccgggacctagacgttcgggcccagctcagcgcgttctgcggccctgctgtcccagagaccaccgcctccaagtacctcgcggccacaactttcccaggacctcccacccgcgggaatcctgaggccctgacgtcagcgagaccccttccggcatccagaggccaggacgtccccgtgacctcccccaaaatgctcgcagccccgccgtccccgggaccccccgggacacccagcggccccgctgtctccgggacccccccgggcaccctgcagctacgtcgtccctgggacccctccgggcatcccgccgccatgacgccctgggaccccgcgcgtctacatcgccgcgagcctccgccgcggagtagacgactttccggaggaatcgccaggcgcgaggccgggcctgcccggcccttcgctccggagtgtcctcgcggcaacgccactccacgacatccctaggccggcgacacgccgctctcaagcctgtggatgacccagcgccagaaaaccgggtggccgtcatgaagccctagcccagctccgcagcccctcaccttatagacggccacacaggctgaggtgcagcccaggtgaactccgatggccgccatgaggcagcagggacggcagcggcaggaatgagggggtcccccaacagcaacagctaccggccgcccaacggccccatcaggcaccgcggagcttcacgttcccgccagccccctgcgtccggtcggccgctacagcctcccgcgtcgccgccaatcagcgtgaaggttccgcctttcttcacgcgcagtccgcgagtagcttcagcgcgtctctgcgctccgcggaaactgcacagtgcgcacgcgcaaccggggagggacgggaaaaggctcctacactccgcccccttcctatcccttccttgagagccaatggaaactctgtgttcagttgcgtcatttgtcctggcaactactggcagattctttccaacctcgaattctgctcagctcgctttggcagcttggtgggcggtgggcgcgggtggcggaggcgattgaagctgctggcccagcatgtggtgcgcgagcccagttgctgtggtggccttttgcgccgggcttttggtctctcacccggtgctgacgcagggccaggaggccggggggcggccaggggccgactgtgaaggtgagcggtgtgacaactgcttgcatggcggcggccccgcgctgcggcgcagcagctgtcggctttggcttctcctggccctggctataaataacattccgcccaggaaatgcaggccctgtccctcgttttagatcgcccaagcccagctcgagtaaaaagctcaagccgggcctggtggtaacgtgaggccacgttgtggttttgctgtgaatattaaacttcagcagtaaaagctggtgggtttgtatttggattagagtttgtgcaaagaatgctagattcagatgatactggcgccagattgattctgctgcttccaaccagcaagatttgcctccccttgcacagaagacgtctttcaagtccaagctagttggtgactccccaaaggaaaacaaaacatggcattgagttgagtagcttaaatcagaggacatagctaatatttgttaggactctgtaggtgaaaattgctttgcaaaggagtacactgactccttgggaaagagaggaatacaaaagagtggttcctttttgttcacggtatctcagctgtgaactcgcagtcagaatacgtgagtctgtatcccaccaagtcccctagctctgagactttggtttttgcaaaatcagcgtacttcactttagagatctgttagcaaaggcaaagaaggtaagtggctatgctagccccttccttctggactcctgtagcgctcactccatgttttactgaaaataattagtttaaatgtatatgccctcagctggaaaatatatccctagtgaacaggaaattgtaggttcatcatatatgttgagtgaatggatgggtatagtcgtactaaagttgtgtttttgtttgttttgttgttttgttttttgtttttgtttttgttttgagacagtctcactgtgttgcccaggccggagtacagtggcacaatcttggctcactgcagcctccatcatcgggttccagcgattctcctgcctcagcctcccaagtagctggtactaaaggcaccaccaccacgcctgactaatttttatatttttaatagagatgcagtttcaccatgttggccagactggtcttgaactcctggcctcaggtgatcggcccgcctcagcctcccaaagtgctgggattacaggcgtgagccacagcgcccagtccttaaagtgttaataattggagcctggctttctatgagctctgcaataattaaacttttctccagaaatttaaaatatctacatgttattactcgatataaagatatttgtttagctaagttataattttgctccaaaccatgctataattgtgtcctatacttttaaaacagactttgtgaggcaaagacaattgatttgatgactcatctggggctcccacttataaatgtttcaagagagacagcatctggattaattaaatgggaagcttatgctgtctgtcctaaatttattacagcatgctgtgattattgcatgtctgactaacctgtctatatatttcatttgttaggtaaagaagcttgtgtaatcgcagaggaaggacataacagtttggtaactaaaagaaccagattctgcatccagctctattactgcttatgagtgatcctccctcctcagcctcctttcttatttacaacttaat

SEQ ID NO: 913739 - DNA, 4001 bp, Homo sapiens
atttagtaattataaaccctggtcaagcaaaaaatacatacagcagaacattttaagtaccagcaaaccacaaacagcagtgttttcaagaagaaaaaaaggaaaatctcagtttcatgctagaccatcctttgaggcactgtcattttaagtgtggaggcatcaattatttcccctaggctgaaagatctacacatataaaggttctatagatccactaagaaaataagcaaccatttctctgtatcattaaacacaacaggatactagtcttgaaacaccggcaaaattctgagtgtgaatattaaggtctcatatttcagtttcaagtgaaatagagttgttttaggccaaagaggattgagaccatacttcaagttgtcaactgcataatatttcaagggtcaaagactagctccatttcaaaagcctgtaaccttacagcctgaagaaaccctgtgggtctcctagttcaatatgacacccaaggcaggaatttttcccctagcatccctgacagatggtcagcctctgtttcaattactccagtgggggagttctcaagagaaggttcccaagggctatgatgaaaggctagaaccagccattcagacctggaggaaggctccagtcagcaagctcgcaagatacagacagcattaccaaacattgaaaccagacttccacaagcaagaatgcgattccgaactgaccatcataaagatgcaatgtgtaagacatacaaaccccaattctagaaccatccaaggtccttttactggcctagggagtagctcccacaatggggtaagcaaggtggcttttctccgacttattattattattttttaatgactctttaaggctcacagcaaggcttgatcaagtcagggagcaccaaatcccttccttccaaaaaccaaggcaagggacccgctggtggaaatgctaaggcttaaaatactcttaactttggtcttaaattcgtcactacagtaaaccagaacatttccggtttttcttttaaagatgtacataggctatgccgtaaccgaagtttggttggtgtagggtggattggggggagcggtgttttaagcgcagcccttcatcccgccttgaagtctagcttgatcctcccaggaaaggcgagcgcgcggggctgagctgccagccggtccccagccggagcctgggacggggcggtccggcccttacctgtcaatgctgatcacgcacagggtcatgatcgaggccgtgcagcacatgacgtccatggcgatgaagacattacagaaaaagtgtccaaagatccacttgcccccgatgaggtcggtgacgctgacgaagggcatgaccgccacagccaccgagaggtcggccagcgccagggacacgatcaggtagttggagggctggcggagcttcttgacgaagcacacggagatcaccaccaggcagttgcccgcgatcgtcagcagcgtgatgagcgtcaggatggagccgatcacaactttctcgactctgccgtagttgatctgttccccacagccggaggcattgtccgggggcgcgtcccaggtgggcgccgggctggctgtcacctcgctcagcaggtgcggcgcccaggagcccgcgaccgggtcggcgccaccgtcggggctcaagtcgggcagcccgcgccccacttctggcagaaggaaagagcggaggtgcccgtagaggtccgggcggccgctgctgttaacgtccatcatcgcgccgccgtgtgccgctgcccatggagccggcgccccggccacgcgcctccggctgccggccccggggcttcacctcaccggttccgctccgcccggcccagccatggggcccgcgccgaccgctggggggcgcctggctctgtctcggagccccgcactccccggacccccggccgctgcgggtaacgcggcagcgcggcctcacggggactccctgcgggaggcgcttcggcccccgacggacgcctgggacgcgcggagtcgagggagctcgggctgggctccgctggcagctccacagttcgcagcagcagctcggctgcgccgagagcgcccgggcggcagcggcagaagttgcggagtgcgccccgcccctcgcgcccgccgccgccgccgccgccgccgccgctcccctgcggcagccgcgccgcgtccccgccgccgccgcctccggccgctgcccgctccctcgcgctcctgggacgggatacccgggctgggcaggcaccgccgcctctcccgcgcctccctactgtgagggggcggcgctgcacgcgcctcccgggatcccgggtcccctcgcccgggaagctgtccttgccgcatgatagatacttagaacccctccagccgaccccagcctccgcacactagtcagccacagttcagtgggggcatttttcttttgttaagaggcctaatgagccagcggatgtttgggctcattgcgaaatgaagaacctagagggggattttatttttcttaattaaacaacaaccaaaaaaacgtctctgagcactacactaagcaacaaataggtacttccgttttctattttgaccgcttatgggaagaagcgaagatggaaaagaagcagccgaatggggtgagggtgggagctccgagaagaggaagaaagaaaaaaaggagggagggggattccttaagcccctggcacccaggagatgaggatgctctggggacaaggcctccaagggggttacacccatttggactaatccttcctggatgtctagaaacagtcctctccgctctgaaaatagaccctgattgcctttatatttagacttcaaagcctaatatattgaaaagagagttaattttcccgtagcattctggaagtcttacacataagcaaagaaatgaccggttatactcttctataaaggaatcctggaggtgtatgttgatttaatacctattggctaaaattccccttggtatccaaaccctgtcagagcggctgatttttattatttgtgagacttgcttcattccattttgtttgaaggtttcattggaagccagcagtgatttctgtagtttaagactctaaaaataatcaaatctgttttttcttgttaggccctagcggattataaataagaagaaaaggaataaaaacctcaaagtatattgatcagagtgctgaatagtactttcattcttcaaggtgggtattagctctgtttttccagatagggaaggttgttagctcttgcaatcagctggtaaggaatagttatgtttcaaacccaagtttatctgattactatgcccatattcttccctgtacacattcagaaaaagttttaatggaaaaaaaaaaaagccctaatgttcacagctcttttgctgtgatcaacatttcagaggctcctctctgcctaggataagcaaaccaatccattgagtcagaggaagagttgaatataatacctaggccacaaagcaatattatctaacagttaagatggatgaggaaatttcttcaaccttacttatgttagttattctctgtttcgcttttcttggtttgttatctgtggtgaaccacggtccgaaaatattaaatggaaattttcagaaataaacaatgtgtaagttgtcaattgcacactattctgagtagcgtgatgaaatctctatcttacccaggatatgaatcatcccttgtccaacatatccacactgtatatgccatccaccattagtcacttagtagccctctctcttaccagatcaaaaaaaaaaacatagtatatatacgattgggtactatccggggttttaggcatccactggggatcttgggagagaggaaatctcagacaaaagacaaatagtttgttgctggaatgcatctaagaaaccatttgttcacccttcagtgcagaggaggaaatagaggctgggagaaattttataacttatccaag

SEQ ID NO: 913740 - DNA, 4001 bp, Homo sapiens
gtctcttaagaaaaaaaaagagagagagaggagcaactgcctcctcgtttgaccaaatgaggtcacagaggtaacacacccggcacacagactgggtgctcaacagacgtgtgctatcatcatgccccttctcgagtctgcaggatcacttctctccgggacaactctctactgcctgactaggctgagtttcccgagggctgtgctcctgtgttggtgaaatacgcaatctcgaatttcacccagttcggctctggcatcttcccgtccacgtaagccaaactatgctaagccctagttggtcacaccgaaccatattcctataaagtaaactctagaccagtccctctgcactgtgctcccctatgcccctctcctggcactgcccgtgttgaggaggcagcactggggtccggcagcagcggcacggctgcgcccaagcgcactgccaagccccgctgtctggttcctacaacgcggggctggccgctgctgaactcgatattatttttccacatggcctctgcctgaagatgaggagcatctctccggaaggtcccgcgagagagttagacattgctccattccactccttcccccatcaccaccgtctcccctgccagaacaggtcctgtgtgcggctgtaggaacagaggggtagacttcttcctcatcactaacccggtcccttctccgcctctgcagatttcgtgatccaaagcccgattcagcttattcaaaaggagccactttcatttttgtagggctggctcaaaacgaggaaagcaagacaggcagcaacgccgccgaaacgagagcggtgccaaaccgttccctgctcggggtagactttttggagaaactccggggcgggccggcaaacactgttcctttccaaaagagttacatacagttttcactgagcggtcccgtgatcaaagcagtgaattttaaaggggacggaggacgtaaatagaagaaaaagcaaccgaaatgacttcttgtggtcctgaagccgctctgcgaggcgccaattcccagtcctgaacttctctccttcctttatgcccccattcctcttatttgtcctggggtccccgcgctgtgtggttgccctcagggcactccatggccggtcgcccggcgtctcgagccccagagtgcaggccgggcgtactggcatcgtctgggcgcagaaccggccccgggctgggcgcgaagctcggttccgaggcagcccgcggaaatccgccaccccggggcccacctgcctgtccccgagagttgccctggccaccccacaacgcttcgctgcccctcaacctgcccaccagtcccgcagaagcaggtccgagctgggatggagagagtggggagctgcccaggagcgcggcggagtaccttggccgcaggctccgcgctgcaggacgatgaccggcggccggtgcagcctctcggagcggcggctggcggcgcgcagctggcacaggttggcgtaggtgttggcgtcgctgccgcacaccggctcgctgctggcgcacacacagaggccggcctgcgcgcgccgccgcaccgtggccgaggctggcaccccgaagggcaccacgcactgcagcccctcgccgcacgggccctcctgcaggccgcacgcggcgccctcgggcgcgccgcacacctcgcagcagccgcacgcgtcccgggcccggccgccctcgcagtgctccggctgcggcgggcagcgcgccggctcgcagcggtctgggcacccggcggccaaaggcgccgagcggccggcccgggacagctgcgccgaggcgggcgccgccagcagcagcagcagcagcgggagaagagcggcgcgcgggatctgcatggcgactctggcggcggcggcggtggcggcggacagggcgagggccggagagcggcgccggggagagtgcaggagggcctcgggggcagcgggtgcgagtgcgcgcggccgcgcggcccagcccattggcctcgcagcggtgacgagccgccttggggacgggcacggcgcccgggatgggggctggccggatggcgggagggagggcgggcggctggaccgggaccgcccgcggagggggcagggcgggcgcgcccgggcacggcggtgctggcggggcgcgggcggggcagcgcacaggccggccctctcgcgggactcagtttccccgtctgcgcgccccacatattcgctttccgcaggttctctcgctgagattcgcgtccttcaaactaatggaactttgcaagggggccctgcggcggcttcgcgtgggagcgccggggaaagttcctgcaaatcgccggactgggggcccgcccgggaagctcggactgggccgggcagggactgcaggggcctctgcgcagacccggggcgttgcggcaccgcggaccccggtcacgcgctggttctgcccccggtaccccgcacgcgggaccctgaccgcggggcctctgcggccggacgaaggcagcgtccgcggagctggcagaaagcccgcgcccagacccacagtgaagtgataaaagcagagagcagaagtaattcgaatagaatccttcacacgtctgattcttttaaaaagttgttgtgggtggcatgcgtgtccgtattcgcagagagcctaggaagcggctcggcagctcgtaactggcgagggtggagcggtctcagatgggaaaggggttttcccctcttttgatttttcaccaagtgcgtgattatttcaaaacacttgttatcaaaaatttgatttcccactggagaatctttggtgcatccgttgggacagatgcgagtccgagagtcatcaggagggctgagggcgaccctggaggtgggtctgggtgcccaggcagcaccaggcctgtgggcagtagtcctgggtccacactgagcagatgggcacagctcgtgtccaaggacctgagaggaggcccttcgtccagccctcatcccgaaccctcaaacctccacccccaccctgggcagaggcacccagggttgggtgagccggcagagctgactttgggatagagtagcatgggagggggctgggggcttggggattttaatattcttctgtatttgggttgttcccttgtgcacacgttatttttccaatacaaatagtttaaaaagtaaactccaaatacctataagccccctcaaagcaccttccaaatatgaaccttgttaatgcccaaggtccagaggggtcccccagaaaggcccaggagcctggggcatgggaaagctgtcggggtccccatgctgactccctggactccaagcgatattccataaagccagggcctcctggctgcgggagggaggccttgacccaaaatccattcggccctggatactggagaggcagaggcctctgctgatgagaagccctgagttcctggctagctgtggttaaccacaaaaaatgcggggggtgatgattttcgaagtccatcggcaaagaaagactccccactgcagtcctggggcagatggaattaaaaggacacgtggtggtgaataaattggtgataacttatttttgtcgaatttccttattttacagaggagaaaactgagggccagaaagggtgactcccctgagtgtcatgccacaagttgagtgctggagccaggacaccttccaaaccggctgtgcctgcctgcaagccccatcctcctccatccccctgagcagccagactgcagagggaatgagcggaccgaaaacagtgtggccgcaacttccccactgctttgcgggaggtggagggagtttctaggctctttccctgttggggaattaagtagctggggatcccactgagtctccaccaccctctcacccattttccacccctcccccaccacatatacattctgctcccccagtgccaaataacttgcattttctggaacacacctgtctgcttacggtctctgtgcctttctt

SEQ ID NO: 913741 - DNA, 4001 bp, Homo sapiens
agaaagttgaaaaaaaaatctattgatgagattcaaaaatcatacttaaatagtgataggaaagctaaagtgctaaaggaattgaggctcatgaaaaatgctaaaaaccattttttaagtgttttttttttttgagacagggttgctctatcccccaggctggagtgcagtggcatgatcttggctcactgcaacctccgccccctgggttcaagcgatttccatgcctcagccttctgagtagctgggattacaggtgcctgccaccatgcccggctaatttttgtatttttagtagagatggggtttcaccatgttggtcaggctggtcttgaacacccaacctcaggtgatccacctgcctcagcctctcaaagtgctgggattacaggcgtgagccaccacgcctggcctaaagtgtttcttaaagtaagaaaaaagtcaagaaagattaggcttaaagtttagaaaattcagtcaacttttactgagttcttaccaggtcaaattctgggaaagacaaaatatagttcctatttggaaaaactcataatttaataggacacatgacctatagcaaaatgtaatcagttaatctcatgttaacagatggcaggactactcctctcttatttacctggtctttgaaataaacatggctctttaaactgtaaaggtggaccaaacacagaaaaaaggagttgaagataggtgaatgagccaagtatgaaaccacctctctagccaggtgtggtggctcatgcctgtaatctcaacaatttgggaggctgaggccggtggatcacttgaggtcaggagttcaagaccagcctggccaatatggtgaaaccctatctctactaaaaatacaaaaattagccaggtgtggtagtgggcacctgtaatgccagccactcgggaggctgaggcaggagaatcctttgaacccaggaggccgaggctgcagtgagccgagattgtgccattgcactccagcctgggcaacagagcaagactctgtctcaaaaaatataaaaataaaaaaggagaaatcacatctccaaacacagataagtcacaatttctaatgcttaggcaactaccaaatcctaacagaatcattgtccatcatcttttagaaatgctggagaacacgagatgaggcagaaaactggagatggagatgggcaaatgctgtaactttcaaaaagaaaaaaggagtgaagcctgaacaccataagccagtaaattaggaattgatccctgacaaaattctacagttaactgtcagactgtcagacatttagacaagaaaaccgtcgttatcactaggactttcatggactaattaagaataacttctcccaaataaatggaattatttatgactaaaggaaggcacatgacaaagactctatagctgtctttgtagatttaatatggtaaaacaggcaccaaatgataggatcaggggaggtgggtgacaatgatcattgagtaataataggtaaacacctttgaacaggtaatcaagtctcaaaattcaaaataattgtctaacaattaggactggcaaaaatgaaactggctaccttggtatttaatgagttccccatccttggaagaagttaaactgaagctggtaactacttagctgggatactgcagaacagatacacagtaccatactacaccatttaatataagggacttgagcaccttggattttgatatccatgggggtcttggaaccaatcccctgcggatatggagggccaagtgtatacctaacaggagttggattaaatggcctctaaggttcctttcattcttaagagtttcctgtttatttccctacctggttgcaatgttaaacttgtctcagcgggtattaaagaaggtaatcttacccttgagccaccctagtctggtctggcagctggcaatattatcccaggctgttttgcaccatgtatcactgacctactacagttacaactgttaacagtcacagagaccaatcctgtagaggaaaagtgctttctctttaaatgtgagagtaaaaagaggtatttaattgcataagatatcaaatttagaaatatgcaatttcaaaagtaaaacatatgctccagcaaatgcactcctacgaagtgttgctgggtcaattactggctctagagcagcaagaattataatttaaatcatggttttttcttacaaaaatgaaaaagcacatccttattatatggtataactttaatatagcattaccttgtgtttgtacaacactttttgactttgctaaatcattttacatcatacagataaagcactatccccactttgcagatgagcagggttcaaggaaattaaatgacagccagtattcatgacattatataaagttaacttttcacaagtccccctttcaggactgtcaactctgaggtttcacgtaagtgattcaataaacattgaaagaaaaaaatgatgtatccaagatctcatgactagtagtaggtgacaaaaccacacaaaattagtaactggaaggaatcttaaagattgtctagtgaggccgggtatgggggctcacacctataatcccagcactttgagaggacggggtgggtggatcacttgaggtcaggagtttgagaccagcctggccaacatggtgaaatcttgtctctactaaaaaaaaatacaggccgggcatggtggctcacacctgtaatcccagcactttgggaggccgaggcaggtggatcacctgaggtcaggagttcgagaccagcttggccaacatagcaaaaccccatctctactaaaaatacaaaaagttagctgggcgtggtggcaggcacctgtaatcccagctactcgggaggctgaggcaggagaattgtctgaacccgggaggcggaggtgcagtgagccaagatcgtgccattgcactccagcctaggcaacaagagcgaaactccatctcaaagaacaaaaaacaaaaattagtcaggcatggtggcgggtgcatgttatcccagctactgggaggctgaggcaagaaaattgcttgaacctggaaaacagattgtctaacaagttctattagtaaatctatagctctttctcctcatgttggtaagaggttttatttgtagaaggtatatgataaaattcaaccggatttaggctgatttttcccccctggaaatataggtacactgaggaaaatacaaatatttaaactgttttacttgcctaaatgaggcaagtaaattaaaaccagtgtggcaagtaaagtaaaaattagtgtgtgttctgggtatttttcttcaatgtattttaatgatgtaagtaaatgcatgtatcacttaagagcggtttttaatattgatgaagtccattttattggtggtttttcttttttttttgagatggagttttgctcttttgcccagggtggagtcaagtggcatgatcttggctcactgcaacctccggcccccaggttcaagcgattctcctgcctcagcctcccaagtagctggaattaccgtagagatgaggttttgccatgttggccaggctggtcttgaactcctgacctcaggtgatccacccactttggtctcccaaagtgctaggattataggcatgagccaccgcacccagccttctttaagacagggtctcaccctgttgcccaggctggagtgcagtggtatgatcatggctcactgcaacctccacctcctgggctcaagtgatccttctgcctcagcctcctgagtagctgggactacaggcacgtaccaccacaccctgctaatttgcatacttttttagagatggggtttcatcatgttgcccaggctggtctcgaactcctgagctcaagcaatcctccctctatgcctcccaaagtgctggcattatgggtgtgaaccactgtgcacggtcaatgtgttttcgttagtggttactgcttttca

SEQ ID NO: 913742 - DNA, 4001 bp, Homo sapiens
actctggatggtcgaccggactttataactacagagaaaatgtaattttaactagaacatacaaaccacttagttatacaaaacttaaaattggtgctttctttaaaaatcacaaatgctatatgctggagacagtatggagacagctaagcctagcctatcagtaatgaatttagaacaaaagcagactgacacaaaagaggacaaaaggaggcatcctgcctgtgcttaccacctgattctctaagttcaggggtcttttgcacattataggagattttgtgatgtagtggaaaacagaggagaacaagttccatagagtcttcatttgtattagcttatcttagtgccccactgctaccatcctaatacaggcagtaaagactaagtcccaacaggtttctctgccttaggactctctccacttcctgacatcctgcacacagccaccaaactactttcctaaacccccagttccatcagataactttccagctcaaaaactttaatggctccctacctactacgcattgggaaaatcccaactaaaattcaagacccaggccagcattaccctactgttataatacaggacttgtgtccttctaattaccccaaggaaattctataaagcttcaaccagactaatcggctcactgctcccccaacacaaactgcccgcatatctaggctggattacgcccacgccagccctcactccaacctttctgccattccttccaaagccagcctacccccccatctctggccccacacactacccatactacccatcttctgaccctcatcaacacacccttgtagctatctcaattcccgtggcatcccaatccgctccaatcaagtcaaagttccttggaaggcagacacatactttacatagagggtccagcacagtgccctgcacttagtaggtgctggctattactgattaaaaccagcaggggttcaaataacgtttctagggagggcaagataatactgcctatcttcttccattcgtagtaaaaagtattcagcgttcactacaagcctgaaaacgcctagcgtacgcagatcaacggtgcagtggagagggcacgccgccggatggcaaaaaacctgtgtcctaatcctggttttgccacaatctcggcagttgctgggaaatcaagccatctctcggagctccggttgtctccgacgtaaaacaagggagctgctgtagaggatcccgaggtatcttttggctcctaaatgtcccccgataggaaaccccacactcgtcttccaaggcgggaggcaggcaaacttttttcccagcgcgggcattccacacggtcctggaaactcagtgcccggagaaaagggcagggctgagggcaaggtgagaagcggtccccccgaagtcgccggattcctttaccccacggctcgagtccgcctcaggttcccggccccctcacaggcggactccgggagagtgacgcggcgcggctcccaggtgcaggccgggtgactctgtccgcccctgcgccccccgcactagtggcacacgccccgtggccccgggtagcggccccggcccctcaccagcccaagggacgtccccgactctggaccaggcctctggctcccgcctggcgagccgctcttccgggccctggggcggcctcagcgcggcagtacgggccccaggccggcgggacgggcggcgtgaggggcagcggtggcggctttaagtgctgaatcaccactttgcaacccgagcgccaaaccgctgtgacccacggggcccgagggcccgggcgctccattccgcttacccacacaggcgctccggaggcggcaggcgggcgccgaggactgagcggaaggtgctgggcagtgcggggtgcagaagccacgctagccggtaccgcattagccagcgcagtcgccgggatcaccgcaaacgcttcctgcttgcgcttcgagccggccctgcgcactgcgcatgctctagccgcggcgccgcgcggtctcccgggagctgcggagaggtagctgctccgggttttgcctggagccggatggggccaggacgcaggcgaggacggtgaagaccgcggacagccgaggcctgagcaggcggactggagggacaggggtttggccggggcgctttaggagccagcacccagactttcccaggcggggagggtcccagctagatcccaccggccgcacttgtgagggtggcgacgtgtgtctgactgtgagggggcgaggggccgctcataaatccagtgagggcacacggggctatgttttctgaggcacccccactgactagcgtgccggaccctgcaggtgttggaacaaggttcgtggtcgcggcggcctcacgtaaaatgaatccgcggccggcgcgcggcccgcgggctccctctagagcgcggtggggacgtggaccgcgaaggcacagatgcgctggagacaaggctcgagtgcggcgtgggggaaattcagacgcaggggtcagcgatagagaggccaggacccagggggacgtttccatccttggggaagttagcagctctcttaagaggaaggtgcggatgggacgggcgccgcagcaaaacaaggcttcaaatccagagtagaaactactactcttgttagtactccgtactaggaatactactaatgtcagtcggcttcagtggttactttttaaacaaagaattttctccccagtggctttatggggctttgcacccacgaacaacttaatagttgttatgaatctaactttccataataccttatgggagtctttaaggaagaatgctattagggatggtgacttgccagcttaagtacttttaggtttctgattgacagacgatcaagactgcagccaaaaacggtgtccttagtccaagtattgctttaaatgggaattcagtaggagggttccttaatcaagttgatgctttatcgaagacgtacccacgatctttttaacagtgcggtttcacctaaaggcaaacctttggatgaaaacaggtaaaaattatggcaagcctcctagtggtgtttgcaagtgcatggttttaagaacctttaaattaccagtcccaatgcagagtagtcaatcaccttgaagcagctcctctgagagtgttaatgcagcctttctgaatacatttatgctccattaatggaatctataaatgggctggggtagattcagacttggagggcttgaaacatatacaatttgggggacctctttgagacataaaatacaaattataaatacaaaattagcaatcagaagattactatagagagaaaatacatcacaacaaatactcgagacttggagattagtacccttttttttcctgagatctctttaggctacttattagaaatgcttacataaaaatgcttccagatggccgggcgtggtggctcatgcctgtaatcccagcactttgggaggccaagccgggcggataacgagatcaggagttcgagaccagcctgaccaaaatggtgaaaccccgtgtctactaaaaatacaaaaattagccaggcgtggtggcatgcgtctgtaatcccagctactgaggaggctgaggcaggagaatcacttgaaccctggaggcggaggttgcagtgagccaagatcacgccactgcactccagcctgggcaacaaaatgagactctatgtctcaaaaaaaaaaaaaatgcttccagacaacaactggctttccctctacaactcccagtttggagcctgtgcaagtgagcagccctgaagtttaaacttcattagcttcatgataaatttccctctggttggagtagatgtcctggataagaaagattaatattaatatagtctcataactatcatctcaataaagaggaggtggatggaaagaaaagtaacaattttgagagtctactctgtgtctggcattgtacatggctccttcattagtc

SEQ ID NO: 913743 - DNA, 4001 bp, Homo sapiens
gctgctccactgtctacaccacacagcccagctgctccactgtctacaccacacagcccagctgctccactgtctacaccacacagcccagctgctccactgtctacaccacacagcccagctgctccactgtctacaccacacagcccagctgctccactgtctacaccacacagcccagctgctccactgtctacaccacacagcccagctgctccactgtctacaccacacagcccagctgctccactgtctacaccacacagcccagctgctccactgtctacaccacacagcccagctgctccactgtctacaccacacagcccagctgctccactgtctacaccacacagcccagctgctccactgtctactgtctacaccacacagcccagctgctccactgtctacaccacacagcccagctgctccactgtctggtcctttgtctacaccacacagcccagctgctccactgtctacaccacacagcccagctgctccaccgtctgtctacaccacacagcccagctgctccactgtctaggtctgcgtcagcgcactctgcttccacaatgatgaaagtacctaacaatgaacttctccaaagtatccctgttaagtgatgcgggccgaacgttaaattatcatctgtagatgatctcttatagtatctaaaacatgtaaatcctacataaatagttgtgctgtattgtttacagaataagtctgtatatgttcagtacagatgaaatttttttccaaatattttataatgtgcagttggttaaatccatggatatggaccccaaggatacagtaggccaactgtatattaggtgatcactaagataggtttcgttactacataattactagactttttgacatgactttttttccggggggatggggctgggtcttgctatgtctgtcgcccaagctggagtgcagtggcgcgatctcggctcactgcagccttcgactccgcctcccaaagtgctgggattaaaggcgtgcaccaccgcccagctgtaatgacaattgctctttcaggattttcagaattcagattttaaagctaagctgcataatcacaagataaaatgaatacgtctatttatgcgtttaaagaataccatgtagtagacgcgggaacacatcatccaacccaagaaaaaggtctagttccatctatgcgatgctccccatctcttctcctgctccattcccaggagaagcgccttgagtgtgttgctgtcaccctcttgcacggacgcaggtgtatgcacccgcgtcacacgcgtggactcggcacggggaggccggtgtcgtcacgctcgtgtttctgacgatgctgtctacgcttgtttctgaattctctaaggggagactcgcaactcttagtctcctgcgactcggtttccagttccacgagttcctaaacctcaggtgactgtgcgcagacgacgatcttttccgctgacaaagaatggcaacgtctctgacgccccgactcacgcctccgccttccacggggcgcgggcgcccaccacagcccgggaaggcccggcctccctccagttcgggagaccaacgccgccacccccagctgtccaggcctccgcgccgagacctcacgggtggctcagacctcgggcctcctccccgccccgtcccgcagctccccgatgccgccctgcccctgtctcccgaactccgccgcccgtccacagtacctgatcagcctccggccacagacaaccgccggtcccggatggcgcccgctttgagcacagtctgcggcgcgcaccgcccactggccccgcccccgggccgcgcagccaatcgctcgcgccagcgccagtccacgccacatcgcccggccaattggcgcccgtacgcgcttgacgacacaatctcgccaagcttcgcctggtggtgccacctccctggcctgtgacaacggcagacgcgcgaagcaccgggaacctgagccgtgaccgcgggctctggcgcctttaagggggtcaacacgccccacccccagttccgcagaggcagcgtcccgcgactgggcggtgcccgagaccacagacgccgccagccaatcacgctttcgatcctgccgtgcgagcccgaggcgctgcgaacggtgcctaacgtcagacgtctcgaggctcgcgttccatggaggaagccctcccaatccgaaagcgcccgggcgccaagccctgcagccggaagctcggcgtcccatgggagcgacctccgcatggctggaccaatggaaacggaggaaaggcgggacgtcactgctgactggctggttgggcactcccccccctccccccccccgagttccgccgctgggactacagcgtttggctgcacggggagttctcgtatgtctagaacgatggcctttctgcggtgtctgcgaccgggaccaaggcggagcaaagtcgccgggggtgtggggtgttccacgctatgttgggagtgttcgctttcgaggtacatgactacgttctaaattttttttttttgagacagtttcattcttgttgcccaggcttgagtgcaatggtgcagtctccgctcacagcaacctccgccgcccgggttcaggcaattgtcccgtctcagcctcccaagtagctggaattacaggcatgcgccaccacgcccggcttatttcgtatttttagtagagacgggtttccgcatgttggtcaggctggtctggaactcctgacctcaagtgatccacctggctcagcttaccgaagtgctgagattccgggtgtgagccaccgcgcctagccctctaaacttttaaataatcgtgaaatgtatgcgcagctgaagcgaattcagctatttcctctaccttttgtgtggaatttaaaatactgaacttgtgagatgaacctggtgggcaccagttctcaaacttcttggtcacaggacgcttgcactctcttaaaatgtactgaggacacctaaaagcttttgctcactgttgtttactactgctatttactaacatagaaattaaacatattaaaatattcacttaaaaaacacacgacactaacataagttatatttttattaaaaatcttttccagacaaaaaacagactttgattttgttttatgtgttgacagatctctttcatgtctggcttcacacagataagaaaatctggcctcccgcatgcgcagcaagtcctcactgctgtcagtgcgttcttgggaatcaggacttttaagtgaaacaacgtatagcaaaaccaattttaccagaggctaaaaaataaggattaagttcctaaagcatacttctggccaaggaaaaaaaaaatcactaagcttctaaaggccaaagtattctaatattaaacattgaaataaatgtgagctatacatacatttaagaaagatgaataaaaagataattattacttaattattccagttctgggtcatgtgtagctgaagcctgtttcagtagctcagggcacaaagagggaaccagccctggacaggacgccattccatcacagggccactcacacacccacactcagactgggacagtgaagacacaccagttcacctcacgtgcacacctctgggatgtggcaagaactgcagcacccagagaaaacctatgcaggtgtggcgagaacacgtaaacaccacaaagacagtgcccctggctgggagtctttttctcatcaatgttacaaagaaatgaatgagcacctgctgtatgcagtttgaaaattgagaagtattttttaatagccttttcaaattatcttggttattctttttcgatactactaccccaaaacacgagtggtggattttccaattactatttggaatttgaaaccacttcaatggacattttgtacttgttacattaaaactcattatttttgactgtacctcgaatgcctattttcctgtgcgtgatgttgaaat

SEQ ID NO: 913744 - DNA, 4001 bp, Homo sapiens
tgatggatatcccaaaatgccctatttgatcattatgcatgacatggtggtatcaaactatcacatgtaccccattaatatgcataattattatgtgtttataaaaaagacacaaaaatgaaaattaaaaaataataaaatggcttaagatggtcaaagaaaaccagagctggacaggagttaaagcaggaaagtctgactttactgagaaccatttcaataggggaaagagacctccatggagaaccagcctaactgcacacaacacccaaggagcaggctggggcctatggattaaaagttactaagagaaaacatcagtgggaagggggttctggctacaccgacctaacaagacctgctgaagacaggcctgcgtgatcagacgtcacctgggagggacggggttgaggaatttaatcagatgccaaggtcagggttctcgctaaaacaacctggtagaattcttgctgaaacaggatcttacgaggaagagcacggatgcctaggagaaggtgcaggagcctgacaagggcttgaccaagcaaagacgtcatccaggtgctgctccccgagccttctaaagacggcacagcaagcacacaggtgacccagtggtcgcctcctagccggaaaggcctagactctcttcttaggttgccgtcgggtgggaaaaatgggaaaaccctgggaactggacagagaaaatgggcgggggctacctttctcaatgttttcgttcagatggcaattcctcttggtgtcggcaccaataaccttatcattctcatccacaacaatcagcatttcctccaagcgctgcaactgacgcctgtcaacccagtcaagatttatgtcagacatagctgctggctgtgacccgacctgaaatagatgcacacaaatgcctctttatgtgaaagatattgccatctcgtttttgctatgtgttaccaaccacattaggatttagcatacaccttctctacaagtgacagcaattgtgttgaagcagcacagttctgagatatggaaggtgaatcatctgtttctaatgtggtgtctctctgaacgggaaatcttgggtacatacatactcctcatgttttccaggtttcctttagtgacgagttaaagaatccccgccccaccacacacacacacacacacacacacacacacacacacacacaaaacacaccgaggtaaactgtaggtaacactctttgtacaagtttttggggaaaagtgcagccctgtgcaaaaccactggacctggatcagacgtggagaaacacacagccttgtaggaaagctacgtcacccacagaagggctatggtcctcttcagagccaagcagattcttaggtgaagatcttctcacaaaatgttttcagggccaggagcggtggctcacgtctgtaatcccagtactttgggaggccgaggtgggaggatcacttgaggtcaagagtttgagaccagcctggccaacatggtggaaccctctctctactaaaaaatacaaaaattagccaggcctggtggcacatgcctgtattcccagctactcaggaggctgaggcaggagaatcacttgaacctgggaagcagaggttgcagtgagccgagatcgtgccattgctctccagcctgggcagacagagtgagactctgtctcaaaaaaaaaaaaaaaaaatgttttcagggtcatttatcttcatgtaaaaccttctcatcatccttttctactttttaaaaaaatgcattcacgtctgtccattatcattactgttaatattttcagcaatctgctcctcctctttgcaaaaggctgtttgacttaatgcatggacatgagatacaatagaaatgcagagaaaacaattactgaatatgtacaaatttagatcataaaagaaagaattcccacaaggtaaaacatatgcactaacctctcttggaagctggagactcctgggtatcagatgtggaactcaatgtgcaagttgaaccagggcccttttataccctggggatgtagaaagatatcagctaaggcaatctgatatttttgtattcttaacaagaaaacacaccccggtctctctctatctctccatctctttctctctatctttctccctctcaattgagggataatagaaaattgttttgacacaatctcactttaaaaaatgcttttagtttttaaacctagggtaagttattttctactctatggctttctttttttttttttttttaaggtgatgtctagctctgttgcccaggccagagtgcagtggcgtgatctcggctgactgcaacctctgcctcccgggttcgggcgattctcctgcctcagcatcccgagtagctgagattacaggcgcccgccatcacgcccagctaatttttttgtatttttagtagagacgaggtttcaccatgttggccaggctggtctccatctcctgacctcaggtgatccgcccgcctcggcctcccaaagtgctgggattacaggtgtgagccacggcgccgttcgatggcatctttttaattcacttgctgtatatatcatcccagattttaaaaagaaaaaataaaggtggcaaatggaagagaaaaataataaacattgtgactaaaattactgaataaattcttaggatagctgaaaatcgataaataaatgcaagaccttggaaaccaatgtgtttggaagagctaaaaaactgtataatttcttgcctatcatattccaaatatcatctaccaactaaagctctaggccaaatagttttgcaagtagggtctcttaaaatatcaaaaaaatgtttgccatatctgtcggttctctcagggaatatgaggagagaagcacgatggacgcatgactccgctgactttggcacggataatacagaacaaaaataacacagcagcagtgatgggtaatattctataaaaagattaatgtgttttgctcttttgtctttccataagttcacctttatgcatgtaatttttagttacgtagaaaatcaaaaggctatgcctgaaatgttttccctggaaatcagttctgagactcaggaataaatggtctgtttgaaacttgtttcttttgcagtcagaagagtaagaatgggagaatgatactcttttaaagatctaaaaaataataaataagtctatgaattaggctttgaggaagaaactaatatacaataccgtacctattataatccaacaactctaatagtaataataataatagtaagacagccagacacacattgtgtccttcctttgtgccagtttctattttaagagtttaatgtatattaattcatttggtcctcacgacagctttctgagataagcgttattttttattatcacagcatcgataaggaactgaagcacagagaggtaaattacctgcccaaggcaatgtggctgcagatgcagctgagcccccagaatctgtgcagtttaacatgttgggatcgtcaccaccaaactaagcactgaaagctttagaggcaaatgttatcaaaatttcaaggaaggaattgtcattctctgtaaaatgttctaggggataaaaaaggagggaaaccctttgctaggttgatctgggtacaaggttctgacacataaagcacacaaaaaacattataaaggaaaggaaggaagacattttgattaggctatatgcggagaattttcttaagagaggttatgacaactttaagaatgacagttgatgacctataatgctgcaggtaggaggttaagaataaactctaggaatagatgattacatctgattaaggcaaattagaagcaacagaaagggctctagatatcagtgaaatatagagaaggacatggaggccaagactgggaaaagcaggtaaaaagaaatggaagtggaaagagttaaaaaggagtaggccaagtattgtaggtatgaaagagagggtaa

SEQ ID NO: 913745 - DNA, 4001 bp, Homo sapiens
aagcaggaaaacataaaagcaaatgagtttgccatctgaaataatcacatgagcccccactgacaccctttgggaaacattgatttaaaggtttaatgaaatatcattgaatgtagagatcctgatccatatctcaaagctaccacttattgtctgtgtgatcttaacatttctaaatctaagattccttattgtaaaatcaggatcatacagccatgcactgcataatgatattttagtccacaaaggaccacatatttggtggtggtcctataagattttaatgccacaattttgctgtactctatgtttaaatatgtttagataaacaaatacttgccattgtattgcagttgcctacagtattcagtacagtaacatgctgcacaggtttatagcctaggtgtgtagtaggctataccgtctaggtttgatgtttgcataatgatgaaattgcctaacagctgcatttctcagagtgtatccccattgttacacgatgcatgactgtgtaagtacctgccttataagtatcttttgagaattaaatggaataatttacataacacttttagaagccaggctgtcacttaatacgaattcaagaagtgataactacctttataacatttaatattattattattttaattatcagtaccaactccatctgtttacagaggagggttcatcataggcctgtaatgtgcattttctggaatttttacctcttcaaaattttgccaactggagcactgaggggaaaatttacaaatcagtattaagtaatggattttttgtttgtttgtttgtttttgagacggagtctcgctctgttgcccaggctggagtgcagtggtacaatctcagctcactgcaacttacgcctcccaggttcaagtgattctcctgcctcagcctcccaagtagctgggactacaggcatgtgccaccatgcccaaatttttgtatttttagtagagatggggtttcaccatgttggccaggatgggctccaactcctgacctcaggcgatctgctcaccttggcctcccaaagtgctgggattacaagcatgagcccccttgcccggcctaagtaatggtttttaaatcagctgagaaattcccacattaggccctttaggtaaggaagatacggatcttcccaagcagatgtggatcatcttcagtcaaggacgtaccaagagcctagattttccagggaggaggcaatctgtttatcttaagctcagcctgattgcgaaaacctgttgtaagaggccagcagtgcagaaagtgagaccagaagcctatggaggaaggctgtgagcttttcctaccacatctccactgtattacccacaagacatcagagaggctgcaagactgaggctttcacattcttgtgggtcctgctttttctctgtggtaaagaacctgcagaaagcaatgcctctactcagacaagctgtccattccttccccatatcagacagaagtgaatctgatgggaaagaatctctcagattgggatcattttctcccttcctgcaaaactcttttcccatttccctccccttctttgggctatagcatgaggtaagcttcctcaagttcatgctaacaaacataaaaatgcattaaacaatttatgtatgtgtgaacgtgcacacacatgcatgcacacattcagtccataagcagatactcaaatcgaggaattagaaaacctgacctcactgagatctaacctgttgaaatagtatttaattaccattttttcaaaaactttagacattatggcagaggagcaaagaaatccttacctcatggttgctgtaaattaggcagccgttctgcagggttttgcttagccaggctcctctgagatctggctattctgtcttgtggattttcagttacgtttaaaccccaagacagtgttatataagggagctaaacagcagccaatggtgtaagctgtgggtgtgtccttgcaagttggaaacctagggaaaccgaaaggggaaagtgaaactaaagctagcggaattcctgctgacgggggggggtggggaatgaaactttgtttctattttaaaacagataaactgcagacctgcaaccatagatgtttctagtgctgcagaaacccaatgactggccagcatttggaacgagattcacgtcctccctaaagaacatcagtccattgctgcctattgtggcagttggtggctggattctggatgaatacacagaaaaaggagaattgaaggagatagctctattttcagtttctatatttagaaggaacctactatcaaatataaaaatctactcttaattaattgagtaacaaggcttttggttgctggttgctttttggttgcttacttttggtttcagcttgacggaaataagcaaccaatctggtttaggaatgaaggaaagagaccaatacctagaaagccttctaacccctgatgacttaggcaggaggtaaaagcaaggaggtatggtttgaaatagagagccctctattgctccatcatggacactgtcattctgaatcaaattccagtacaacctccactacagttcatggaatttgagtttaaatagttagcaactacctggcacatagaagcatgcaaataagtggtaactattattattattattttcagtcatcaagttaaaaataatgattcttggctgggtgcggtggctcatgcctgtagtcccagcactttgggaggccaaggtgggcggatgacaaggtcaggagatggagaccatcgtggccaacatggtgaaaccccctctctactaaaatacaaaaaattagctgggtgtggtggtgtgcacctgtagtcccacctactcgagaggctgaggcaggggaattgcttgaacctgggaggcagaggttgcagtgagccgagatcacaccactgtactccagtctggtgacagagcgagactccgtctaaaaaaataaataaataaaaaataaaaaattgttgtccgggtgcattggctcaggcctgtaagtcccagtattttggaaggcaaggcgggaggatcacttgagcccaggaattgtagaccagcctggacaacatagggagaccccaactctacaaaaaaactgaaaaaaaaagctgggtgtggtggtgtgtgtctgtggtctcagctactcaggaggctgaggtgggaggctcacttgagcccaggaggtagaggctgcagtgagccatggtcacaccactgcactccagcctgggcaacagagtgagcccctgtctcaaataatcataacaatatataaaaacaatgtttcctttaaaaaaacctacctactttgtcttttaacataagaagcagaagaggagcaggtgcaagagtattttccttttggaaacacttaactgggcacactgccagatctaaacagtttctgctcaactccctgccagactcatctcccatgtcagctctcaccaattctgtaagcttccacagagagttcaacaactagttagaaagttctacacaaataagaatttctgaattaataggacaggttttgtcttgcactcagatacatgatcaggccataagcaaatgctgaaacagatgaattagaaaacatcttttggggagcaagatgtctttggaattcttatgggaaaaaatgggttttcaatttgccaatgcactagatagcatgcagagatatgaacaaaaagtttatcttgccattgctgtgaatttggcagcagtcttggttctacggggctatggcccaggctgattaggtattcagaatcttgcttagtgtctctttgggctaaacaaacccatgagggacacaggatagaacagcattaaggaaagaaaagccaatcgcgcgcgtgtgtgtgtgtgtttacagataaaaaagaaaatgggaaccagagaggatcaaacatttagaaaatgaaatttcagca

SEQ ID NO: 913746 - DNA, 4001 bp, Homo sapiens
ccttttgtttttttttttttttgagacggagtctcactctgttgcccaggctggagtgcagtggtgcaatctcggctcacttcaagctccgcctcccaggttcacgccattctcctgcctcagcctcctgagtagctgggactacaggcgcccgccaccactcccggctaattttttgtattttttagaagaggcggggtttcaccttgttagtcaggatggtcttgatctcctgacctcgtgatctgcccatctcggcctcccaaagtgctgggattacaggtgtgagccaccatgcccagccacaactaacatcttatgaccaggagcccgttatattaaaaagagagacttgggtactcttgtggtgaatttttttgcaatccttcatttataatttcttctcaagacaggtctacatgtttgctagaaagggatctcaaaagagcagcccctttttctgtaaagttcttcctctcccactgactgcaacatcagatgggagaactctagcaggtcagaatacttttgagtgaaagcattttctgcaggtcaccagttctaactacaccaggaaaaaaagaaatatatattttgtggaacaaacatatcacaatgcctacaaaatttcttattttctaacatctagtataatggtttttcaaattttagcaggcaacatgatcacctggaaaacttataacacacagattgatgggccccaccctagagtttctgagtcagcaggtttagggtagggcctgagaatttgcatttctgctaccttcccaagtgatgctgatgttgctagtcaggggaccacactttgagaacagttaattcagtgaaaagcaaatttcatagtaatcacaatttcatagtttcacagtaatcacaaaatttgacttggtatcaaaaacaaacaaacaacagaaaaacagccatctctgaaagtagcttctttttcccacgtgaatttaaccaatttatcaaataaaaatagctgcttcttctcacctggatgcctaaaagagtattttgtatattaaaaggatctcaatgctcttgccctgactggtccccgggccagtctcctctctaggctcaggcctctgttccctggtgaacagtctttaagtgttgcctgggtaattgtccctctattagaaagtgctacagaaatgacatctttggaaataagattgctttctcgtttatttccttaagagcattgctgcttttattaagccagctacccttactaagcgagctctgtaacaggagttaggaaacttgcctctacatatattctcatcttgcccctctgaatctactttcctacattcttcaccatgctctgtgcttggaagctgactctatggactttattaactccaaaactcttttattttttactttctactggggttggcccactggggagcaccagccagatattaaattgcaggaggaggtgaaggtcatggaattaattcctaagctcccactgtgctctgcttgaggttgtcagtgattttttcaccaaaggcctcttgagaagcccctcccctacagctatagcttagagtctccttgggtctggttctctcctcttgctcctgtaggcccagggttatcatgttaccactgttgtaaaccaacacgcctcttcccgctgccctgcaaccaacaagcaccatttcctgttgatttccctaaactttgcccatatcgtcttaaatagcccccttattaaactcttcttggttatcatgttgagggtgcctatcagggtcagaaccaccagtgggacagctcccttaggagaaggcctgtcaaaaaattggcccttaaggaaagttttagaatttcaaagtgtgcagaaataaggtcagtgaagcagagaaagactttacctcatggtgctatgaagatagcaggtgatctgtagtgctttggttcaggcttggaggctccttcaaggttcatccacagagttctagggcttctcagataagcatggtgcttatatatgggaggtatatccaggcagttttttacacccttgatgcctagtgaattggcagggtgaaaatgatacagaggaatagggctgtctctgctttgattacaaatacatgctgagttttggcagctaagaggatgggtgtgtgagaagcagttttgatacgcaaattcccttgctggagtcaatgtggtgtaggagatagagggtaactggactttatgatgacattcagtgttgtggaaaaaccagtggcagacaggaacgtatatttttgtgaatcatgtcagactctgttgtcaaacttgttactatcacatgtatcccgccaggtggttccagggacgtctacaatggaagctccttagaccagggtcagtggtttgtgcctaaaagaatactgtagaaagtcattgtcaatttgtggaagaatgaggttgcagatggttaggtcttcttctgtggggctgtgttaggcaaaacaactcctcaattttgagatattggtctataagaagggtcccatactggttacatcctccagcagcatttgcattactgccaaccctggctatagtggagcctattcaagcatattgactgttttgatgatctttactgttcaccattagtggttcaaacaacaatgtttgagctggtcagtagagaaacatatgcaatgtagtcagagaatgtgatggggtcatgggggttaaaaatctaaatccaaattcacatagttcttctgagttgtccttatgtttcttctgtttctactattttgaagattatctgttacaaagcaacaaccatcagagagtcaatcaaacaatgttcacatgtttaatgaaaaatttatatgatcccaaggctgatgtaattgcccacacaattagcagagaaaaaggaaaatttggaaagctgctattctgaattcctcttgtgaattgttacaatgtcatcctgtacgtttctggatcttggttttgtaggggtagtgcaccaagataagcaaaagggcaaagactgagagcgatttccctctgagtgagcatttcaaggtagggttattaacttcattacagtcttctcataattaccaaatgaaactgtagcctcgctgtgctatttcttctttgtcctgggcctgtaactagactatatttcccaggctcccatgtggtaaggtgtggtcatgggcatgggatgggaggctgtcaggaagcagaaatgattctataattgggtatcttaaattgtgtctggaaaaagagaagactagaccaaggtgacaggtgtaatttgaaaggaagcagcagtcattcatattggccagtttaaggggctgcttgattattttcgaatccagttggaaaatattcgtatttttgtctgcactcagacctgattacagagtggccttgtattttgtcttgacccatcatggtcacaggtgttaatgatgctctcagatgtctggggcagctcttctctttcttttcagggaacttctgagttactgctccagttactgctcctgacctttctaaagccaaaaattatatagacaagaaggactacccagaaaaggaacgtcacataagatcttatgcattcacagttgaaatgagagcagacatcttaggaaaagaatatgcttaagaaagagtatagtatataatctctctctctatgtgaattaaaaacccatctccacgtctattcaaggaaggatttaggcaacttgagatagaccacatctccccattcgcatgagacaagttcctagaagaatgtgctggacctcttgacttcttcttcttttttttttttttttttttttaagatagagtctcgctgtatcacctaggctggagtacagtggcactatctctgctcactgcaacctctgcctcccaggttcaagtgattctcatgcctcagcctccagagtagctggcactacaggtgtgca

SEQ ID NO: 913747 - DNA, 4001 bp, Homo sapiens
ctcagtcacactctctactgcattcattacagaatatggtgagtcctacagaatatgaccactctcagaccccaagcatgtgcagcacgcatcctaacacctgaagactcactatagcttccttgctccctctcaattctatttccaacttccagttgagtttgggagctcattcccttaacacataaactccttagctcctttctcattttacaaaagaaacagagagagtaaatagaattgaggttatctccaccatataaaacataaagtctattgtgcatttgcaggatagagatatttaatatacacacttaggtaaaagccctttgagcagccatttaaaaggcatccaacttcactgcttgattttgggtttttatttccactggtaagttagagaagctgatgccagacacttgcttcctgggctctggcttgtgaggacctattctcccgattcctatagaagttccagttgtatacacaacaacaacaatttcttcctttgcctcttatctggatgaaagccacagtgacattatcaaccaggctcagaactaatgctaccaccgcagtctcagaatcactgaggagccttttagaaacacacatcctcagactctaacccagacccacttaatgagaatctctggggagtcaaccctaggactctgtccttaataagctgtccaggcaatttttatgcatgctcaattttgagaaccactgtcttagggcacaagggcaatgcccagtgaaagtcacaatagataaagaattaaggaaagaaaggacagatgggtctgtattgtaatgggaaaaattctaagataagaccatgctaaaattctaagaaataagaaaagggttctatagattctgggtgactacaaaaaaaagaaatctgtaaatatctcaaatctttttttttttttttgaaatcaggcagaacatttagactagcaggaaataatatcgtttcaagaagagaaatcaggaacctcacagacagagggcaaggtgtctcataggaagtaagcacaggggttggtaacacgggattccagagctcccaggatgagggttaggcaaccaggtccggccaccccaccttcaaactggagaaaatatttcccttcctattcaatgagctaacacttcctctccagggcagtctcatgttttggggatagaagggaatgttagaggtgagaacagaactattttctccaagcactccatctctaattcatactcaggaggcattttggggtgaaaatatttaagtttaccagcccttgtgcaaatctgagatgaagaactacattaaaagtaaaattcacctttgcaggaagtggggtttgctattctgtgtatatctttaacagtatctgctgaaaagaacccttttgttaaataattgtattacaagtccccaacttaatcctttcaaatatgaaataagacagggtcagtgcacaagagcaatgcccccagacccatctttaagtgaagcaccaggccgatgaaacatcatccctctctgctgccttctttctctgattgcaactcaactccccaggcgtgcagttctggagatgaatttaggaagcttgccagtgtgaagcagaaaattgttcaggagggaacaaaccaccattggtaagacagatttacaaccaacagaggtagaggcatagtaaggctataaacaaacactaaaatggagctggccctctttgggaacatagcttctcaggatttgcattggacaagatgactcaacagcactaccgaatacgaagggaaaatatttacctcatggttgcagtgcaattctcagctgttcggcagggctcggttcaggcagctgcactcttcagaaatcttcctcttctgccaccaataaatgctgaagagacctatatatacaagtggcctctggttcctttttgtttgtttcccttcagctgacgttacaaaagggaaagtgaaactagaaagtgaaattggcaggactctttttctttttttctttttattatactttagaggactctttttcctccggagctgagttgtgatcagagaaagaaggcagcagagagggatgtttcatcggcctggtgcttcacttaaagatgggtctggggacattgctcttgtgcactgtccctctcttatttcatattcgaaaagattaagttggggacttgtaatacaattatttaacaaaagggttcttttcagcagatactgttaaagatatacacagaatagcaaaccccacttcctgctaaggtgaattttacttttaatgtagtccttcatctcagatttgcacaagggctggtaaacttagatattttcaccccaaaatgctcttgagtaagagccaagcccagctgcgtagtgagttagaagaacttcctctttgtggaatgtactgatggcatcaagggagcacaactcctaggaggacacatttacaaagctccctgccttgtgattaccatattaacccatctttgctctgccttataccaatatgatccacaggccactgtaaggagcagttatttagcctcgacagggcaggggattttagtctgaatcattgctgaatctccagtccctgcaaaacaacctgcacattgcatggtatggcaagcattccaaaagtagttgttgactaaatgaatacatgattagaagcatgggcagtgatgtctgtctatctggatttgaaatcagcttccacctttatgctatgaaactctggggaaaattattgaatgtctctgcttcggttttgtaaattgggaataatacaactactggtttattgtggtgttgggaggatgaaatgagagaatacgtgaaatgtccttagaataatgcctggcagtaataagtaaatgctagtttctattataattattaactaaaatcgttaaccaaagtgatcagaggggaaactctttttttcaggctggagtgcagtggaaagatcctggcttactgcaacctccacctccctggttcaagtgattcgcctcagcctctcgagtagctgggattacaggcacgcaccaccacgcccggctaatttttgtatttttagtagagatggggttccaccatgttggccaggctggtctcgaactcctgatctcaggtgatctgcccgccttggcctgccaaagttctgggattacaggcgtgagccaccacgcccggccaggggaaatttcaatgttggctttttccagaactttatctcctctgacattcaacaatccatcacaattactgacctaagccaaacaattcctaacatctccttatgttcttggcttccccaagccccacaatattttccccctttttattgatgtataataatttacatatttatgagttgcatgtgagtgtttgttacgtgcaaagaatgtttaatgatcaagtcagggtaattggggtatgtatcaccttcagtgtttatcatttttatgtgttggtatcatttaaagtcctctcttctagttactttaaaatatacataatattgttgctaagtatagtcaccctagtcggctatcaaacattagaacttattttttttatttaacggcatgtttgtacccataacctaactctcatcttcccaccaccccccttcccagtctctggtatctattattctattctcaatgtccatgagataaagttttttagctcccacatttcagtaagaacatgcagtatttgtcattctgtgcctggcttattgcatttaacataatggtctccagttccaactacattgctgcaaattacatgatttcattcctctttaatggctgaataatatcccattgtgtatatatacaatattttctttatccatttgttcactgatgagcacctatgttgatttcatatctttgctattatgaatagtggtgtgatgaacatgtgagtgcaggtatcctttt

SEQ ID NO: 913748 - DNA, 4001 bp, Homo sapiens
agaataaaagaaaaagaagaaaaaacagaatagctaggttcaggtgaaacttggggagtagaatgccagtcctacctggatctgcatctagtagaagaccttagggagataggattccctcaggtccagaaagagatttcccatgacctcggattgcagacataagatttcgcttactaaagcagttaaagctagtgctgctagtccttaggaaatccccagaatcaacatagttacagtctctcacctaacccagatcatgaccacctgtcttgcccacagactccagggtagataccacatctccttcccagtcaaagctattactagagtagaatcttgaaattttcagaaagtggctttcttgaagtggtaagagtggggatttccccactcttgtctgcacatgtgcagcttgtccccagcatgtgctggttatgctccaactgactacgtgaaggaactggcagacctgtgctcagttggttggtcagaacaggcccaatccaaggagtccatcacttcagaaagcaagtgaaggaactctccagagccggacttctcaacctttaatgtacatatggacacaaacatctggagatctttttaaaatgcagatctggattcagataagctgggatgttacctttcttacaacctcccgggggatctcagcttcagaccacactgtgagcagcaaggctctgggaagacttccctttttggcagtgatttccaatcaccagtttctcatacttaaattaccctttaaacagtcaaactttgctttatttttattttatttttgtttttttgtaggtctcactttgttgccaattctggtctggagcccctgggctcaagcaatcctcttgcctcagcctcccaaagtgctgggattacaggcttagccactgtgcccagaaacaagctttgctttatttcaacattcttcccacccctcccccctcctgcctcttggggtttcctccttcacatttacacacatacaatgcaggaagccttgtatgcatttaaggaagagaggatttggagatggacatttcttctgtaagccattcagtatgcctatgaagtacttgtggtcctctttaaatatatgtttgtttctggaccttatttctgttttactcaatcaggatttcagaatgcaggacctagaaatttgcattctattagaagactcaggttgatatgattcaggccactcgcagaacacagtttgagagactgcaagcaacaccttctccctgttcattgatcacgtgggaggcttagcaggtcactagacctgctagaggacaactcaagtagacatatcccccaattatgaaaaagtgcatttcaaggtaaaagtgacctcaacataaattggaattttgcagtgctgaattaattattgacacatttgctgagaagcaagcatggtttaaaaataaccacagtcacaacaaaaccacaaacctctgacttaggctttctaaatataagaaacaaaagacgaaccagaacctccagtaacttccctccaggccccagctttcactggcccgattttacctgaaagcatctgagcatgggctctctaggatctctcaatatgccccgtcccttcccagctcccagctcccatttccctgtgtcctttggctgcctaactctatacatcacaaagagctacagaaataaaaatgcatgaattggtaaggcagatttatgcttgaattagataaatgcatatttcatctctaagcaaacactgaaatagcataagtcaggaagttgtacataagaaattctgtttcctatcagagaagcagggactatttacctcatgatggctgtttccctgcagttctgaaaagctggggtcccggttgattttgtttttagcttactgattccaagcaaatgctgaagaggtttccacccagggtgctgttaggtctgtgcttttatgaaaggggaaaggaaagtgaaactgatggaaccctatcaagatccctcttgaggggaaactgaaacagaatctgtgagaactgagctcactcacgccaggaacatgttccagacagatttggaaaactgtggtttgaaagttgtaaaaaggcactgtaaaaagaaaataaaattttagaagcttccaaatgtgttatgtcaagaggcaaagttaagccctgaaaactgactcacgtaacgtgactgttttttttctcaggtgcatgactgttgctctttgacctgtgtggtgaggggttacatgttaaccagactccctagtctcactgcaatttctgcctctcgggttcaagtgattctcctgcctcagcctcctgagtagctgggattacagacgtgcaccaccatgcctggataatttttgtatttttagtagaggcggggtttcaccatgttggtcaggctgttctcgaactcctgacctcatgatctgcccgccttggcctcccaaagtgctgggattatagccttgcaccaccgtgcccggcctcagacaacctagtctttattaaaacgtagacctcatgttatggaaatagagacccttttgattgttactttttttttttttttttttttttgagacaggatctcactctgtcatccaggctggagtgcagtagcacgatctcagcttactgcaacctctgcctcccaggctcaagcgatcctcccatctcagcctctccagtcaatgagactataggcacgtgccaccacgcctggctgatttttgtatttttagtacagacggggtctcactatgttgcccaggctggtctccaactcctgagctcaagcatctgccctcctcggcctcccaaagtgttgggcttatgggtgtgagccactgcggccagccatgttacctctttacaaaagaatattaagcaattcccttggactgtaatcaatagtagccaatcaaattgtatatctgtatgttagcctctgtatggaaaatgttggccaggcacggaggctcacgcctgtaatctcagcactttgggaggccaaggtgggtgcatcacttaaggtcaggagttcaagaccaacctgaccaacatggcaaaaccccattgctactaaaatacaaaaaaattaaccaggcatagtggcgtgctcctatagtcccagctacttgggaggctgggtgggagaatcccttgagcccaggagtctgaggctgcagtgagccatgatcgggccactgcactccagcctgggtgacagagtgagactctgtctcaaaaacaacaacagcaacaacaaaaacaacaacaacaagagaagttgtcattctgttgaacacctctgtctttgcctatgtaaacagtcctcatttttctctacactggaagtactgttcaccattcttgggtgcagctctactcctgggactgctgccctcaactttttgttgaataaactcttttaactggatcctgagccttctgattattgtatattgacagtactgactatgcagtcctactcccagagattctggtgcagtgaatctgatgtgagcttagaaacctgtgttttcacaagtgccttggaaattcagtgcaggagttcctgtaccacattttgagaagtgctgtcatagaggtattttaaaaagcagttttcccctttatttatggagctaatgtggtgaattaagcagcattatcaggcatcttgagtgaagggaagaaaaccacaggacacctggatttcagtgacctctttgcttagttctgggatatttcttgagtcatatcactgagcctcattcccttatccttaaaatgccctaggatgaatttccttttcccttcatccaaatgatagaaaattatgccctggggagaaccactttcacccttctccaagatctgggttcagttcttgtggctttggccactctaaggcatgggtaaccatcaaaggctggcccttactctccagatagg

SEQ ID NO: 913749 - DNA, 4001 bp, Homo sapiens
tgttgctcacacaaagcctgtttggtggtctcttcacacggacttgcatgaaaccactaactacagatcacaaagaaatgttaccaccatgattgctggtactaatatatttgtgttataattttaagtgaatttgtgagtgtgtaaagggagcaacagagttcctcagtggatggggcagaggaggatgcccatcagctggcacgtgccagtgagttctccaggtgattttcccatttggaaatttttagcacaactggggaggagcagcccaatctcttcctgttcctatagcctctggaaataggagcaccttgatgtgaacctgagtccagcatagttcagagagcccccctcagacctcctcaggtcagtggctatagacacacctaaagacaggaccctgtaaaacctttcctgcaagctggctactaagacgccttgctctctggtcaatcccactcacacagacacaattaacatcactcttgaccaggaacttattctatataaaagggtattctatatactgaggtatttggcagtgaattcctcttacccatctcatccccaaacatgacattgcagagcatcttcaagtccttggggcagagtaaggtagggaatccagttttccttttctgcccccctgaatggtcgatggggtcttccctccctggcaatcacctcctcactcctttcctagagatgcttggtgggaaaggcatccttttctcttagttctccctaacatgctatcccctgaagaactccaggaggtcaatatataaatttaaaaatcaagtttactgagattatgctttatatacaataagatgcacccattttcagtgtatagtctgatgagttttggtaaatgtttatgcatatgtagccaccatcactacctccctatagactattcctatgattctaaaaagattcttttgggagccttcctactcaatccccaccatctccaggcaaccactgatctgcttcccaccattagagattagactagttttagataatagattaggtcattacacttttgaggagaaattctttttttgctgctgaccagcattcactacatcaataaaaataaatgctaagctttgggtttgtttttatataagaaatgacaaaaatgcccatttgtaagaattgtttcttccacttcccaccttaaagtaatgcaacgtttcagggcaaaattgccttcttcatgagtgggtttgcagtactgattgtatctttcacaatatctgttgaaaataaattcctccttttaaaattacaagaaaaaaagcctgtgacttaatcttttcaaacaaaatgacaataacagaaaaacccaaaagagtaattcccttaggtctacccttgaatcagccaagtttgtggctgagtgaaatacaccgctcctgccaagccttcctctcattgcaggaaatagctgcacacagggaggaaacatgagctgatgcattccccaccctgcctccccccatgtagttccgtagggaaccattccagaaacttaagaagcctgtgtgtacaccaaaaaaagccacagggaaaaacccctcaaacatcttacaaatgctcagactgataaagacatattgaatctataaacatcaggacaattcaggaatgtgcctgcacagtaagaaactcaacttacaatttgcactcaaaaacaagcatgattatgcattcttatttcactgacctcatgactgccctctgtgtctctgctgttccgaaaagctggtgaccaggctgatttgttcttcagaagtcttcctgtctgcctcaagtaaatactgaaggaactatataaaggggtgggagagtagggcacgcatcagctgatgttttctccgtttttgagtaattgcttttaggggaaggaagaggaaactggaaagtgaaactaatttaaaatcgttgggaggaggaaaatgaaacctaacggcttgagacctgcaatggctgagccagagtacgttattcaaaactgtgactaaaatttgtttgagagaatgtggaagcattcctaatgtaaaccaaaaaattaaattctaaggccatactcaccaaccatgtgactggacccctgcttttggccaagggcattccaaagttaacctgaaaactgatgtgaaggggaagctggatatgcctcattacatcctttttccttttggaattactaatagaacacactctttttttgtttttgtttttgtttttttttgagacagagtcttactctgttgcccaggctggaatgcagtggcatgattgcgtctcactgcaacctctgcctcctgggttcaagtgattctcttgcctcagcctcccgagtagctgggattacaggcacccaccaccatgcccggctaatatttgtatttttagtagagacgaggtttcgccatgttggtcaggctggtcttgaactcctgatagcaggtgatccaaccaccttggcctcccaaagtgctgggattacaggcatgagccactgcacccagccagaacatgctctttttaagtgtattaagaaacatttacaacctattctctctgaagcctgctacttggaggcttcatctgcataataaaaccttggtctccacgacccagacattcctttctaatgattgtctattgaatttctattggatgtctccaaacattcctttctattgataataactctttcaacaaattgtcaatcagaaaatctttgaatctgcctatgacttggaagctgccccgcttccctgtttccaattgtcccacctttctggacctagccaatgtacaccttacatgtattgattgatgccttatgtctccctaaaatgtataaaaccaagttgtggcctggcacatgttctcaggatctcctgagggctgtgtcacaggccataggtcattcatatttggcttagaataaatctcttcaaatgttttacagagtttgactttttttgtcaacattaggtatctgaccatcagtctagggtggggcccaggaaacagcattttttaagccaattcttattatttttaaaaattttttgtggacacatagtagatatatatatttatggggtacatgagatatttgatgcgagcatacaatgagtaataatcacatcagggtaaatgacttcaagcatttattctttgtattacaaacaatccaattatactcttttagttattttgaaatgtgcaataaactattgttgactatagtcatcctcttgttctaacaaacactagatcttattaattctatctaagtatatttttgtacccattaaccatccccacttcccccgctactactcttcccagcctctagtaatcatcattctaatctctatctccataagttcaattgtcttaatatttttagcttccacaaacaagtgagaatatgtaaaatttgtctttctgtgcctggcttaattcacttataatgacctccacttctatccatgttgttgcaaatgacaggatctcattctttttatggctaaagagcactccgttgtgtaaatgtaccacattttctgtatccattcttctgctgatggacacttaggttgcttccaaatcttggctattgtgaatagtgctgcaataaacatgggagtgcagatatctctttgatgtactgatttcctttctttttgatgtattcctggcagtgggattactggatcatatggtagttctatttttagtcttttgaggaacctccgaactgttatccatagtagttataatagtttacattcccaccaacagtgtacaagagtttccttttttccacatccttgccagcatttgttattgcctgtcttttggataaaagcaattttaaccagggtaagatcatatctcattgtaggtttttttttaacttatattttatgtgcaggtatacacgtacaggtttgttatttagg

SEQ ID NO: 913750 - DNA, 4001 bp, Homo sapiens
tggaatttatgcacaactggacaccatgagaatttttattgtttaaactttgtctacttaattttgtaactttgtctttgggaagctaataagagagaagctattgcatcagaagaggtaacacgtatctttcggtaattctgttcttctgctaggaagaagcagactttcattgtccttgggagacagtccccaatggggctgagcccttttcctccccatcctgcatatatacggtgcacgccaccgtctttttctgttttttgttgttgttgttgttttgttgttgttgttgttgtcaagccccttcctgatagcactctcctttcttacaaatgttagatgtggccaggcgttgtggctcacgcctgtaatcccagcactttgggaggctgaggcgggtggaccacgaggtcaggaattcgagaccagcccggtcaacatggtgaaacccgcgtctctactaaagatacaaaaaattagccaggcgtggtggcacacgcctgtaatcccagctacacgggaagctgaggcaggggaatggcttgaacccgggaggcggaggttgcagtgagccgagatggagccattacactacagcctgggtgacagggcgagactccgtctcaaaaataaagttagatgtgtgggtggcacttaaactttttttttaaacttataatgggaataattaacatttattgtgcaagtattatgtgctaagcagtcaactgataggatttattactgtccttttccacagtcccaagagatggacaccattaatttttacaaataaggaacagactcacagagtttgagaaactttgggatcactcaactagtaggagttcagtccggatttagaacaagggactatctgcttttagagcccaagaccttaacatctcattcctcaactcattaaatgcggaaggttcactaaccacgtgcagggcggggtgctagcccctggggatacaaaatgatcaagaaaaggacgccatcatactaaatcagtaaaggaaacagataaagaaatcctcataaaacagcggattgggtgggacgataacaatctgtgcttggtacagaggtagctcctgggaagggaagaactcagacccagaaatcagaaacgcaaactggcagtggcaggcgaacctgacgcctgcagggctgcggcgaaaccgcgtatgccacaccgagggaatggcagctggaaagagaggcacgcgacaggcctaaggagacccgtggcacgtagcagctgcccccggaacagcgcctgggggctctgcaggcgctgaccagtttcccggaggcggcggccgcggacccagcacggtcaccgtcgccgctgccgagaagagccgtcgggtcgcgatgggtggacaggccttccgggggagcgtcgcccggcacataccctgacagtcccgaccgcagacgccagggatgggacaggctcccggggagcatctcctgttcctcctccctgaccggccttcttaggcgctggggaggggccggactcccgagaagcgtccactcggccaccctccccggcaggcccgacttcagacgccgcgcgccgggacagagcgcccggggagggtccccaacgcagatgcccggttgctgggcgcgaggggctcggcccctgaaaaggccgcagaactgcgctggaaatgaataaaagcagcccggtttgaaaccaaggccgacgcagggcttgggaggagaggcaaaggaaaacccttacctcatgatggcagcgctctgcaggccgtccgggcggcgcagtccctcggatcgctctctcctcagcaccggggaccgcgggaagccgcgcggtgggcgtgcgcgtgcgcgtgcgcgcgccaggcctctgcagcccctggactcggccgcgcggcgtgtctttgttaaaggagagaccccagccccagcaagaacaggaaactggagattgaatcagatgccgagcgctcagaaactgaaacttaagaaatcgaaactaaacgtaagcttcagaaaccgaaacttaatagaagagctcaagagccgcggccagacgtttgcggagtccagggtctttcggagttgaatttgcagctgggctccttcactttggtctcggcttttatctgcctccctgagtacgctgagttcgcatgctgcccgtgtaactgtttgtttgtttgtttgtttgtttgagatagcgtctcactgtgtcacccagtcgtgatctcaagggatgcgcccgcctctgcctcccaaggtgctgggattacaggcggaaacttaagtccctgcttccactccagtcttttgattcaacaagcaacactgcaatgctatacatctatgctgttatttctgttgggtgtaaactgagaaatttggagctaaaatctatatacattttaagttttgacggatattgccaaatagctttaaaaatccactcttacccacaattgtaggagactgcttctcttccataccttcgccaatggtgctttgtaataaggacccaataaagacaagagtggtattggggatctaggcagaaaatgtcaaacacccataccttaaacattttgtcccctttgaattcattcagcaaatattgacaaacaactgtaagagccagactttgttcaaagtactgtcaatataacaataaagaaaacagacacgggccttacccttattgagttaatgtctgtattcaaaacctcaatatcctgtccataattcatcttttgcattgattttggttttttttttttttttgagacagggtctcactctgtcactcaggttggagtgcagtggtgagatgacagctcactgcagcctcaaccttcatggctcaagcgatcctcccacctcagcctcctgagtggctgggactatatgcgtgcaccactatgtcgggctaattaatttattttttgtagaggcggggttttgccatgttgcccaggctggtctccaacacctgggcacaaatatttttctaaaccttaaatattgttccgcccatcgtggcctcccaaaatgctgggattacaggcatgagccactatgcttggcctgattttgaatttttaaaaacatattgcattgaaatattgtctaccttgatcactgagcttctggcaccccacccctcaaaacttagtgcctgaagcgagtgcctcatttaaagcaatcacttctaacagttgtactgtcttatacagaaactgctggtcacctgtggctattaagaacctgatttttaatttaatataaatttaaaaactgataagttaatagaaaacttacatttggaataacttaggtatacgaatctgctttttataagttgcaaattttatgaactctaaatacagagcaagtatttccagtgattatcctcagcaaactaatgcaggaacagaaaccaaacactgcatgttctcacttgtaagtgggagctaaatgatgagaacacacggacacagtggggaacaacacacactggggcttgttggagttgggggtggtgggagggagagcatcaagaagtatagctaagtgatgctgagcttaatacgtaggtgatggtgtgtccggaattggttccttccagtaggtttttggtcttggtgacttcaagaatgaagctgcggactctcgctgtgagtgctacagttgttaaagatggcgtgtctggagtttgttcctttcgatgttcagatgtgtctggagtttcttccttctggtgagttcgtggtcttgctgacttcaggagtgcagctgcagaccttcacagtgagtgttacagatcttaaaggtggcgcgtccggagttgttcgttcctcccggtgggttcgtggtttcactgacttcaggagtaaagccgtagacctttgtggtgagtgttacagctcataaaggcagtgtggacccaaagagtgagcagcagcaagattcgttgcgaagag

SEQ ID NO: 913751 - DNA, 4001 bp, Homo sapiens
aataatttatgggtaaggcaggcctatacacataaagtgattacagttcaatagatgtgtttaccctccatagcctaataattatggtcactgagatttactctgctatagaacacatataaacagacaacgttgacaaataaggattggtttctatggagtaacatgggccttccaaaataattggaacacaattcctgatttcagaactgtcaaaaactcttgaaggcaaaaaaagaaattatgaggctctgagaaatcagaaatcaaaacataaaaataaaacataagtaaaaccatgttgaaagaaatccagaagagaaattatacaatctaaccttttcaccccaaatctgttcctcctttttcttgccactccaacattgatgaaatgtagagtaattgaaatttacttcggagatacagcaagggactccaaaaggccatggagagagaatttcaactaaaattgaaaagccatacagaggtctgcataaaaaacaaacagcacaccacaaatcaaaacctttaagataaaaacttaattagcatctacaggttgaatgagctagtaacttatgccaatcttatcattacattagctgaaaagaaaacgaactgacagattaatcaaagaacaaagcagtagcttcacttcagcaaaagctccataggatcaccaaagaataactggtgtgactaccgttttctcactggtggattagtttttggcaagatttttaatgtctaaatttaagttaaacttcagtttaaagaaattaagattaacttcatttagtcacagcacacttccaaaacggtcaagcttagtactgctgaacagctgtagttgcataaaaacaacgcatagtcctaagtagggaaatgggaaagggctttaaatacaaaaacaaaaaaaacatgcacacccgataagggcacatctgaatcccatccttcttatcctatcataacacaaaacagctacggttttctgggaaacatcctggaccgctaggggaaaataacaccagacatttcaattcactgtaacgaactctcatcaataataataacctttagctgttgtgacaacacgacataaatcaaaattaaattgaatttttaaaattgttagttcctacgtttaaaaaaaagttgttttaaatacattctgttctttcaaaactgaatttcctcagatcacacaatttaagacgcctttatgtcttcttccgcttgtcacacgtctttcgggttctgaccagcacatcaaggggactctaagcaggccacgtggttagtgtttgctagaacttgtttagcttcagatccagtcatcgagcatgctaggcttggctactcgcgctccacacagtttatccaaagatctaaaccccgaatgaacctgaatagttatttgctacaatgtctttctcaaatctcacatgttcctaaaataagggtgcccatgcagtagagacggatccgggcaggatcattagataaaatacgaaggctttaaacgtccttctcccaacaatcagcctgggaccggcgtcggggcagcagcctcaccaagattcggagcgacatcctcgccaggattcgaaacacctaggagacccgcgcccggctgactcccagcccctgggaccccgtgaagacgcaaacctcgggacgcctcccgcagaaccacctgtcagagccaagcaacagtccccgccccggagcctccgagctcctgctcgaaggcaatgacagcaggagaccccgctccctcggggttctcgcggccataggcgccgcagtccactgccctccggctaaagaggtcccgggccatcacctgcccgcctaccgaccacgcccgaccctccactgaactgagtctccgtccggatcagccggcccgccacgaacccagctccagtctccggccgctccttcttatccgccctgtcctgccgcgtcgccgccgtccgagccggcagcctgctacttacctcctgacaactgcatggagtaaaccacaccgccttgttaaatgccgtcgccgccgccgccgtcttcgtcaccgtcacagtcgccgccgccatctttgttgtgtctccgactcccttcccgcccccctgccttgctcaagtctcgcgtgagcaggatggagggcgaaagcgaggaggggcctgtttgtctctcttggggttccgtaggcagcagggggcagggattaagggggggtgtgtgcggggcgggtactgagtgggcggggccttgctcgggtaactcccaggggctggctagagacccagaggcgcagagcggagaggcctgcggcgaggatggagggcctggcagtgcggttgctgcgcggcagcaggctggtgagtgcgttcgaggctggcgtcctgggggcccagggcgaccttggcccctggaatcgcagctggcagagccttctaacgggcctcggggcgccggcctgagccccgctccacgtcctgggtccccagactctttacccgcgggcagtctatgaccccgacccccttcaggcctctggtggaggcagctggtggcaagggggtcggggctgtctagaagctgctttggcggagcaagtaccttgagtggagtcggagggtcgcgtccgcaagatgtcctttgcaggccgttgcgtcctgagagccaccgagtctggatctctggatctctggatgcattttgcacagatgtcacctccctgatgccctaacgcacctttcccgagtgattacatttcacaccccctcccccaaaaaagatagttaaaatataggcccagtctcattctgagcaggtgtctccctgtccttccttccgcggccccgctcaaaggtagtaagggacttcggagttgttcgggcttcccggccagggacagagttccctctgccccttatctcatgtctggagcctgggtatcttccgtggatagactcaccgccgcccaggggagccggagccggtgccggtccctcttccatgaacttaagctgaaaccagcctcttgttgtgcttaattcttatctgtgcacccacacaaactgttaacagcccctgtgttaacatcctatgctcttcaccccttggacctattatatagcatgcttttcagaacatacacatttggatacacttgtatttgtcagtacacttcactgggaattttcccactgcttacgtgtgcttttaatgtttcctttgcatttgctttaatgagttaggctttccaactgctgcttcagtcttatgcccagaggcagaactctgaccctttttcttattagagataattaatgttatttgactgttttacaggcctgaagtgcaataaaaaacagtaagtgattattgtttaatactgtttataattgttggttaataacttagcaaagaaaatttctttggttttacaatttgactctgttttagagccaaaatttattgaccgcatactctgtggtaggcacgttctcgttctacctgagtcatctcaattctcacaaccatcttaacaagtagtttaatcttgcagatgctgaaaaagaataatagcttgcccacagatagaaagggatagagctggtggtattcgaactctggtctgattctaaacttaaccttcatatactactgtctccccgtccttagagatatcaaaaacctattttgtttgaacttttggtttattgtggcttatagtcctttatagtttttgaagctcttttacataaattagctaaattgattgaacatcgactgtagcatagtggttaagaacgtaggttctgtagctaggctgcttggatctgaacccaggccctctcacttcctagtggtataaccttggacaggttatgctttgggtctcagtttcctggtctgtaaatggagagaataattgtgcgtattccaaaattgttgtgaaaattaaatgagctcatatgttcatgtaaggc

SEQ ID NO: 913752 - DNA, 4001 bp, Homo sapiens
actaactctgcttctcagatgtggggggaaatccaagcatcagagtctcatgaaaacgaaacttcaagaagcctcgcagagctggggtgggggtggcagagggtgggggggcgttcaggccacaccaggcagcagcaactgtgcgtggaatggctttggccagggcctgggcagactggcccgactggatgtaaattattcagggtctcgcttaaaaacacacacagatcatggcgttactaattcctatagagagtccatggatggccttcagtggggctttgaccccaaaatcatatgcacattttgtaactatgttcattcatgcatttttctgggggccgggggttcatagctttcatcagaccctccaagagctccctgactataaaaagataaagaagcgctgacaaggatagagctagaccctgctactgttttcctccttcctctggctgccgggacaaaacccctaggaatcgctcattccgtcctccctgccgagatcagagctccgcgacccgctttcttctcgaatacaccaagcgatcacagatctcttccccctttttctgcgagtgtagactccaggctggcccccactccccacccccatccggtcccgaccgcctctgctggtttcctgatcgcttaagaattggaagttgtttccaggtccccaggtgtgcaacttgcccgacgcgtttccccctgggacacagctcctccccaccctcccagctcccactgacataatttacttttgcctgggagtcgggaggagtagtttctcccggacccctccgaggaccgcgtgctatgcaacacccgccctgcagtccaggcgcctgggagaagcgcactcgcccgtgtctccaaactgctggacgccgccggctccgcgctcccgtggccaaaacgggcttctcagaactgctcctgacctcggcctcggagaccccagccaggccgcccgctcccttacgtgggtgacccgggcgcagcggcggcgctctccctgcgaccccggctcccggcacgtgtccctcctgcccggcgccgcgtcccctccccggcctgggcctgcgcgcaccgcgctcccgagggcaccgacgcccccgcacggcccggggagatggggcgcccggttccctccagctccacgtcccggcccccttccaagtcccgcccgggcgcccctgctcccagctccctaccccgcgtcgccggcggccggagcagcagcagcagtagcagcgccgggagaccgagggtccggcagccgcgcgcccgccgcggggccatggcggcagctccacaggacaccgctggactccccgggcgagcgctgcccaggccggggggaggtggcgagcgctgctctgggacctgccgccccgccagtcgcattcgctttcgcttttgctttggcccccgagggctcggagaggtgcaaagcggtgacagatccgtgactcagcgtccccacccctgctggggaaggagccccgccggccgccgcggcaccgcacagccacccctgtccccgggacgcatgggccgtgcccggtggggacccaggaccttacccacgcaagcccgggagcctcccggtcctccgcgctcgtcgtgctctgggacctccagtgtgcactcggtccggtgtccccactgcgaagagagtgggcaaagtcatcggagagcagactctctccagccctctctgcggctcggatccacttgacctcgcccggcgctggtcgcctccagctgctccgccttcggctttcctggtctccctccgcggccctgcgctcggttgtgagcggccggcctgggtgagtgcccgcggaggtgtcgccgcggtgcggaggcgcgggcacctgcctggtgcgctctggcccgggcggagcgcagcccccgccacctgctggctcccgcggcccccggcgcccgctggggccccagctccgccacttcgccgaattcctgctgcagctttgctcccctagaaaatgcctcatcttagaaggagagggggcggaggggggagaagggggagaggagccacagtgcttcacctctgagcctcgcttccttaggttcttccaggctgccatcctcctctttggctggtgggtttttttctttcttggggtctcaagtgaagcctgagaaccgggtctgtaagctcccaagtgcagattctcaggtctagcggtgacattggacaggacgagacatctccaagcctcggtcattgcctcttaaaatctcacaacgtgtttatgaggcttttgtgacatacttgcaaattctctttgaaaacgaaataatctgtacaataatcccccaagacacaggtttacctttataacaaacctgcacttataaccctgaacttaaaagttaaataaaagaatttagggccgagcgcggtggccactcctgaaatccaagcactttcggaggccaaggcaggtggatcgcctgaagtcaggaattcgagactagcctggccaacatggtgaaaccccatctctactaaaaataccaaaattagctgggcatggtggcgggcgcctgtaatcccagctattcaggaggctgaggcaggagaatcacttgaacccaggaggctgaggttgcagtgagctgagatcgcaccactgcactccagcctgggcaacacagccagttcctgtctcttaaatttaaaaaaaaaaagtagaaagaataatgaacctaccatccggcagtgaccacacaaggtccattctttttttctaagcaggaatagccacccttactccaactggggaaatcccacattattcaatttctctcaatacttaataataaatctcaagatgataagatcaaatttaaaaattaacaatattccttaatattctcaaatatattgagggtttattgaatgcaggctaagcatagcatgtatacaatagagcattttttattctatggacatttatgaagtagagatttctccattattacagactctttgtaaaagtttttaatggctgcaaattatcatagtttaacatcccctctattattttaatattaaagataacattgtcataaatgtctttctacaaaatcttgtgaatttaagatcgcttagaatagatttcctacagtggaactattgagtcaactggtagggaatatttttaaaggctttttctcttttaaacaaatatttctatcttgctttccaaaagtcttgtatcaatataccttctaactagcattgattgtgttaaagtacccattttactgcattctgaccaaaagtaaattttaaaatttgaaaataaaattgtaaatttggtatgcttaaagaactctatttcattacatatatatacgttgttaaataatgtaaatttcaaatatacttcgaactatagcaatcaataaatatagtggatatccatgagcctactgcctcatcctgtcaaaacttaatatgtctgctcaatgtttgcttcagatattttttggaataaaaaaattacagataaagttgaagcccctttgtattcttgcatctttctcttcctccgtcttccactttctcgcaggtaaatgtttcttgaaactggtactcatcattcccaggcattcttaggccccttttccatgtgtatgtccatgtgcaacggacaggatggcttacatttttaaaaattcatgtgattaaggctgggtgtggtggctcatgactgtaatcccagcactttgggaggctgaggtgggcagatcacttgaggtcaggagttcgagaccagcctggcctacatggtgaaaccccatctctactaaaaatacaaaaattagcagggtgtggtggcacgcacctgtaatctcatctacttgggaggctgaggcatgagaatcgcttgaacctgggaggtggaggatgcagtgagctgagatcacaccactgcactctagcctgggcgacagaa

SEQ ID NO: 913753 - DNA, 4001 bp, Homo sapiens
caagctggctcacgcctgtaatcccagcactttggaaggccgaggcgggcagatcacaaggtcaggagtgatcaccatgttggatcagcctgaccaacatgatgaaaccccgtctctattaaaaacacaaaagttactgggcgtggtggcgatcgcctgtaatcccagctactcaggaggctgaggcagcagaatcgcttgaacccaggaggcggaggttgcagtgagctgagatcgcgctactgcaccccagccggggtgacagagtgagactccgtctcaaaaaagaaaacaagaaagaaagaaaaagaaaaagaaaaaacattgagagctttgggaagggaaggtagcaacatctttctaaggtcaaagggcaaggctgtgcagctgatgagatcagagatctcacagtggtgctcccctatccactcagtcttcaaggaagacacctcctctctgctgggctttgactaaggctgcatttcactttcatattgtgtaatccagctgccccagttgccagctatggggtcctgtgacactgctagccaactgggaggaaccaaccggtcaccaactaactctgcttctcagatgtggggggaaatccaagcatcagagtctcatgaaaacgaaacttcaagaagcctcgcagagctggggtgggggtggcagagggtgggggggcgttcaggccacaccaggcagcagcaactgtgcgtggaatggctttggccagggcctgggcagactggcccgactggatgtaaattattcagggtctcgcttaaaaacacacacagatcatggcgttactaattcctatagagagtccatggatggccttcagtggggctttgaccccaaaatcatatgcacattttgtaactatgttcattcatgcatttttctgggggccgggggttcatagctttcatcagaccctccaagagctccctgactataaaaagataaagaagcgctgacaaggatagagctagaccctgctactgttttcctccttcctctggctgccgggacaaaacccctaggaatcgctcattccgtcctccctgccgagatcagagctccgcgacccgctttcttctcgaatacaccaagcgatcacagatctcttccccctttttctgcgagtgtagactccaggctggcccccactccccacccccatccggtcccgaccgcctctgctggtttcctgatcgcttaagaattggaagttgtttccaggtccccaggtgtgcaacttgcccgacgcgtttccccctgggacacagctcctccccaccctcccagctcccactgacataatttacttttgcctgggagtcgggaggagtagtttctcccggacccctccgaggaccgcgtgctatgcaacacccgccctgcagtccaggcgcctgggagaagcgcactcgcccgtgtctccaaactgctggacgccgccggctccgcgctcccgtggccaaaacgggcttctcagaactgctcctgacctcggcctcggagaccccagccaggccgcccgctcccttacgtgggtgacccgggcgcagcggcggcgctctccctgcgaccccggctcccggcacgtgtccctcctgcccggcgccgcgtcccctccccggcctgggcctgcgcgcaccgcgctcccgagggcaccgacgcccccgcacggcccggggagatggggcgcccggttccctccagctccacgtcccggcccccttccaagtcccgcccgggcgcccctgctcccagctccctaccccgcgtcgccggcggccggagcagcagcagcagtagcagcgccgggagaccgagggtccggcagccgcgcgcccgccgcggggccatggcggcagctccacaggacaccgctggactccccgggcgagcgctgcccaggccggggggaggtggcgagcgctgctctgggacctgccgccccgccagtcgcattcgctttcgcttttgctttggcccccgagggctcggagaggtgcaaagcggtgacagatccgtgactcagcgtccccacccctgctggggaaggagccccgccggccgccgcggcaccgcacagccacccctgtccccgggacgcatgggccgtgcccggtggggacccaggaccttacccacgcaagcccgggagcctcccggtcctccgcgctcgtcgtgctctgggacctccagtgtgcactcggtccggtgtccccactgcgaagagagtgggcaaagtcatcggagagcagactctctccagccctctctgcggctcggatccacttgacctcgcccggcgctggtcgcctccagctgctccgccttcggctttcctggtctccctccgcggccctgcgctcggttgtgagcggccggcctgggtgagtgcccgcggaggtgtcgccgcggtgcggaggcgcgggcacctgcctggtgcgctctggcccgggcggagcgcagcccccgccacctgctggctcccgcggcccccggcgcccgctggggccccagctccgccacttcgccgaattcctgctgcagctttgctcccctagaaaatgcctcatcttagaaggagagggggcggaggggggagaagggggagaggagccacagtgcttcacctctgagcctcgcttccttaggttcttccaggctgccatcctcctctttggctggtgggtttttttctttcttggggtctcaagtgaagcctgagaaccgggtctgtaagctcccaagtgcagattctcaggtctagcggtgacattggacaggacgagacatctccaagcctcggtcattgcctcttaaaatctcacaacgtgtttatgaggcttttgtgacatacttgcaaattctctttgaaaacgaaataatctgtacaataatcccccaagacacaggtttacctttataacaaacctgcacttataaccctgaacttaaaagttaaataaaagaatttagggccgagcgcggtggccactcctgaaatccaagcactttcggaggccaaggcaggtggatcgcctgaagtcaggaattcgagactagcctggccaacatggtgaaaccccatctctactaaaaataccaaaattagctgggcatggtggcgggcgcctgtaatcccagctattcaggaggctgaggcaggagaatcacttgaacccaggaggctgaggttgcagtgagctgagatcgcaccactgcactccagcctgggcaacacagccagttcctgtctcttaaatttaaaaaaaaaaagtagaaagaataatgaacctaccatccggcagtgaccacacaaggtccattctttttttctaagcaggaatagccacccttactccaactggggaaatcccacattattcaatttctctcaatacttaataataaatctcaagatgataagatcaaatttaaaaattaacaatattccttaatattctcaaatatattgagggtttattgaatgcaggctaagcatagcatgtatacaatagagcattttttattctatggacatttatgaagtagagatttctccattattacagactctttgtaaaagtttttaatggctgcaaattatcatagtttaacatcccctctattattttaatattaaagataacattgtcataaatgtctttctacaaaatcttgtgaatttaagatcgcttagaatagatttcctacagtggaactattgagtcaactggtagggaatatttttaaaggctttttctcttttaaacaaatatttctatcttgctttccaaaagtcttgtatcaatataccttctaactagcattgattgtgttaaagtacccattttactgcattctgaccaaaagtaaattttaaaatttgaaaataaaattgtaaatttggtatgcttaaagaactctatttcattacatatatatacgttgttaaataatgtaaatttcaaata

SEQ ID NO: 913754 - DNA, 4001 bp, Homo sapiens
ctcaggtgatgggtgcaccaaaatcttacaaatcaccactaaagaacttattcatgtaaccaaacaccacctgtcctccaaaacctattaaaataaaacacataggtcaggcgcgatggctcacacctgtaatcccagcactttgggaggccatggctggtggaccacaaggtcaggagtttgagaccagcctgaccaatatggtgaaaccccatctctactaaaaatacaaaaattagctggtcgtggtggtgcacgcacctgtaaacctagctactcaggagtctgaggcacgagaattacttgagcccatgaggtggaggttgcagtggactgagatcacgccactgcactccagcctgggcaacagagtgagactctgtctcaaaaagtaaaaaaaaaataaataaaaatgtaataagtaaataaaatgccctctttaaagacactcctacatctgggccagtacacagcccagcatgactgggcacttcccctaaacaagcaagcagactcctgaaatgcatcattatgtttcatttcttaataaattctttctacagccagttagcattctacttgttgccattatagactttcaaaaaacactataaactttcttatctgtcttcctgagtaagcaaagggaagacattattagaaaattcacactcaattaggaagagtggtttgaggtagaagttggtggttttttatttctttaaaaaaaaatattggccaggcacggtggttcatgcctgtagtaccagcagtatgggaggccagggtgagtggatcacttgagcccaggagttcaagaccagcttgggcaacatggcaaaaaccccatctctacaaaaaaataaattaaccaggtgtggtggcgtatgcctgtagtcccagctactcaggaggctgaggtgggaggatcgctaagcctgggaggcgaaggttgcagtaagccaatatcgcgccactgcactccagtctggctgacagagacagtgtcaaaaaaaaaaaatcttcgagaaaatccatttgaaacaaggaatgaaatttaaaatttgcatatataaacacgtatacatatacatatcatgtatatacataggattatgagaagtagtaatgttctaaaagtgagtatgcatatttttaaaaatttctgtaaagttgcacttgtaaggaaattcctaggtgttatttcctaagacgtaaaagcagtgtatacatccttgaagctaaacttttctgagatcttaaattctcccagtgtttgatatatgagtactcatgtctccagcaaattaacctgaacttaaagagcttcctgatagcttcttagttggggggtgggagtgcagagaataaaaggaaattcattgaagaataaaagataatttcttgagaaacctgctcatcgggaccctgttaacatccaaatatcccaaatatcatgccacactattcttcccagaattaattgtcaaggactgagaaggacaggagaacctaatgctatttcaggctctcttgacagaccaaggaacagtgaggcataaactggggtccccgtgggtcacaggcaagaggtggaacccaagattcaactcccttcttggaaccatctacctggggactccctctggttctgtggctgggaagagggatgcccatcagccttcccggaattccgggggcacccacaggcccttacctgcctggcagccaggcaccatgatgaacgtgagcagtccccacatcagcaggtatgaatccatcttcctgacccttgggaccagccggggcagtgaagcggaggtctttctctgcagaaggcccagttgccgtcagcctctttttggcatcgcgccggaggatgtgggatgggaagatcggtccgcctgggctgtcacccttgtgggtccatccagtctctatcggagtcaggagttgctctctttaagtattgggctggcgtgttcagccaggaaactgcctagcactctcttctctcatctcaaatataggaagtgtttttttttttttttttttttgatgacaatatagtttgcggtaatttttcaaaccaggttttttttttcaagttcaattgctggaggtgtgggctggggttgatgagaaggattgaacttcatttatgaatcctttcttcagctacgcccataaaaggagagggagattcccctgccgttgaaggtagggtgagcaagcacttcttggcagtggtctcacccagcacttcataagctgagtcctcccctcagggctgtaacgtcctcaggagtcagccgggaccacctgggatgaaggagcaaagtcctgacaagattctggtcaggcagcctccaatattcaaataatggagaaggatgcggcgaactgaaggatcctgagaattcataaataattccccaaggcttataacctgtactagccatcatcatttcaccacagtgccctgggctcctgaaagtgcattgtcattttataaggtgttttgcttccagatttctttctcttaaaggatcatgcaaaaagtgggctttggttttaaactttggattattttgtaaaattcagtcttgcttatttattgatcagagctctcttctgattattatgaaatggttgagtgtgttttgctccctggaaatttgtctaagacttaaagccattgcatagttagagcaaaacacaattttttaaatactagaaagcaagcaaagatattaacaaaaagaaaaccctccgggcaagccaaggaattcagggttccaaaacacatcacgttgactgggcctggtggctcatgcctgtaatccgagcactttggtagaccaaggtgggtggatcacctgaggtcaggagtttgagaccagcctggatgacatggtgaaaccaccgtctctactaaaaaaaaaaaaaaaaaaaaaaaaaaaaaaaaattagccaggcgcagtggcacacgcctgtaattccagcactttgggaggctgaggcaggcagatcacctgaggtcgggagtttgagaccagtctggccaacatggtaaaaccccatttctactaaaaatacaaaaattagccaggcgtagtggcgggcgcctgtaatcccagttactcaggaggctgagacaagagaatagctggaaccgaggaggtgcaggctgcagtgagctgagattgcgccactgcactccagcctgggcgacagagtgagacttccatctcaaaaaacttgtcaaaatatgacaagattctcttaaattccacagcaggtataacttcctctctaggaacgtttctcactctgcgggcaagtgctccagtagaaactcctagtactcccaccaaagtcacgctcctttcttcttgggcatgggagtagaatgcacttgctgcctctcctggaaaatagcttatgctttaagtagttaatgtggattgtcattataaaatatttaaatttatgttaatgtctttttttttttttttttggagcgcaatggcacaatcttggctcactgcaacctctgcctcccaggttcaagtgattctcctgcgtcagcctcctgagtagctaggattacaggcacgcgtcaccacatccagctagtttttgtatttttagtagagacggagtttcaccatgttggtcaggctggtctcgaactcctgaccttaggcgattcacccacctcggcctcccaaagtgctgggattacaggtgtgagccaccacgcctggcaattacaagatttttttaaagccatatcacaaagcccccacaatttttctggtaaataagaggcccaactcttggttctgagatggaccatggttaaacaagtcattgaactggcttttctggttcaccttacggatgaacgctctgtcgtcgtttgctgatgctgaggtttccagttgatgctgcatggcacgatgcagggatgtgagaagaagttgggggtgcaaaag

SEQ ID NO: 913755 - DNA, 4001 bp, Homo sapiens
ctttgattgcaggtagccaagactgatgtgttggtgttgcaggaaaaaaaaaatcaaagcagttaattgcctagagattcataactgggacacgagacaggagagacataatttctgagatgggaagaactcgagatcagcaccgtggacagcgccccgacctttcacgttttgccaaccggcgaacgctttcttaaggaggaaatgtcagctggtggacaagggaatcgtgtgtgtgtgtgtgtgtgtgtgtgtgtgtgctggtggacaagggaatcgtgtgtgtgtgtgtgttggggaggtgggtagagcagggtggttactactagctcaagcatcgctcagcttgttggctcccaatctctactttttggagcgcgaaagtcaagaaaatgggataggactcttcccagttcaggatcgcattcttccttcagccctgaagcagaccatactccataaataacttctagggcgcacagaaagcttttcaaagtcaaccaaacaagccagatagccgagacagcaccgcccacgtaacctgccccgttgggctcagtcttactttgggtggggcactgttctccgggtcgccggtgtgtgtaggcccgcttgctgacagacaggcagagttgggttttcgaacctcaaataaatttaagggcttctttgtttgaagggctggggcagggacataaatgaggggcgttccctaaaattaacattaaagactccagggttttttgttaaccagcgcctccagccgcggctcttctctcctctcttttgccctccccttaagtcctggggcccagttttaccagaggaagagggtacgcgcggaagagggcagggcacccctccccacgcccagccccggcccttacctggtagccagctacctcggcactgtgccgctcctccagctccaggatctgcctctccaaggactcgttggccccgcgcaggccctcgatctcgatggtgcgcgcctgcagctggcgccgatactcgtggatctcctcgcggctggcccggatggcctcggtgctgcgcgccgcctgctcgttcaggttggcaaacttggacttgtaccattcttccgcggactgcaggttcttagcggccagggactcatactgggcgcggatctccctcagagccgaggtcaggtctggtttagccacagtcacgtccacctcggccgcggcctgcgacgacgcctgcagcgtggccagcagctcggctacctcctcgtcgtgcacctggcgtacgaaggccagctcgtccagcagcgactccaccttcttctccaggtccaggcgggccagcgtggcgccgtccacgtcgcgctgctgcgccttcagggcgcgctcggcgccttcgcgtccgcggctctcctcctcgcagcgcgcccgcagccgctgcacctcctccgccagcccgtcgcgctccagcagggcctgcgagcgagccgagctggcctcctccagctgcgcgcgcaggtcgcgcagctcgcgctggaagagctcgccgacgcgcgacggctcagcgtggcgctgtcgcagcgcggccagctcggcctccaacgcgcggttctgcgtctccagctgatgcaccttctcgatgaacacggcgaagcggtcgttgaggccctgcagctgctccttctcgttggtgcggatgatcttgtactcgttggtgcgcgccgccgcctggctcaggtccagcccgtcggacgccggcggccggcgataggccaggccgaggccgagcgacgaggccgaggagcaggcggccgaggaggccacattgctgcgggacagcgactgcgagcggaagccgcccgcgccgccggccccagagaggcgggcggacaggcgagagccatccccgaacaccttgcggtaggaggaggaggagcacaggtagtgctccgagccgaagctcatggtgccgggatcggggccggacgtgcggcttcaacgcgagctacagaagaaaggagaggtgcggcaggcagggcgcggcggggcggtgcgcccggcttttaaggcgccggggctggggcggcgcgctgggggcggagctcctgctcagagtctggccgggagagggaaggggggcatccaggagtgggggcggggaggcgcagtgactaccgcagctgcgcgcgcgacgacctggggcgccgggacagggccatctgcatcggagtcgcccctttccgcagcgcttctccccaagaatcgactgcttcggaagtgactcgagcggaggggtgcctaaacgactgaggtttcccatccggaaaccacacagctctgtcgcatcccttgaccctatcccctcttctttaaccgactgggaggttaggggtttctgggaggtgtcccctacacccaccctcatcctgaggtgaggcgcacagaaagccttcccgagggcgaggtcgtgtttttccagttacagtgaggacctgcagagcgagcccttgtccccttcctcagggtccccaaggagaaaggtgggagatgctacgtcagaaagcatctctccagctgcccctctgcagctcctggggaggctccgggcggaaagatgttcagcaagtgcctctcccagaagagaggggagatcagtaaagaaagtgaccccgagctgcggagagtggggagaagcggcggtacagaggggaaaagaggccagacttggagaagcaggaggcgctgggaattgctggggctcatcgttagggcactaaagcatggcacaggccaggaccacaagctgctggaaagggggctgcagacttttgtgtttagagcattatattttaaaatatttcgaaaggagcatttttaaaccaggagatttcacctgtaaagaaattggatttctggcttcttctgaaaatgggaagagctgggatgcccacagtggcagaggtgagttgcccttgccatttgtataagaagtgtgctctcctgttcactacagtccctgccattctccactgaattacgccccccttcttaattcatttactttacctctctgaccctgtgggcatttgagatttcagtttgtgtaaatccagcagggcaggttctcaactggcttcagagagccactccctgtgcagatctctttttggagaaaagagatccctgcaaaaagattaaactccaggagtgggggagagtgctggtgactgagccggcctcttctgccacatggtagggttggtggggcagggggtgagaatcaaagaatggaatctgaaaagatgaaggctgggaggggtcagtgtggcgtctgtaatatgtacccacttgcaagcttctaatatcattcaggatgtggatatggctttggagagggagtaggaagacctttttagttatatcccagaattccagactgagggccttttattgatattggaatcttcaaggacgtagttctaggataagttttacttcatggggaaaggggaatatgcttgggacaggccactaaaggaagggtgaaaagggatcttatgggactttggagcatatctcttggctttgtgcttgatgtcatggaagatggtcaggccctgccacagcctgcccctctggttcctcatcacagaccaaagccttgagttggagggactcaattctgaggtctttgggcttagaaagacctggtaaggtgaacaataaaagattgctaacactgctgagtaatgattgtctgccagtacttgtgctggcacttttgcataggtttacctctgaaccatgcttcaaggtggccctcacctccatcttatagataaggcaccgaggtgcgggtgcagcacaaggtcaccagcaagcaaagacaagcatacattctctcttcactacataattctgcttagtgcagtgagactcttttttttttttttttttttctgagacggagttggccgggtgcagtggctcacacctgtaatcccagcactttgg

SEQ ID NO: 913756 - DNA, 4001 bp, Homo sapiens
tgtgcatgaactgagcttcatcaaacacttcacccatgcttgctgccagcaaagacacaagacctcctcctgaaatggaaaccacgcgtgcatcagtggcacacatccgtcataaagctggtgcggtgccccactgttcacctagggagggagggagggagggagggagcgtccgtggctccacggcctccatctgggccacttggagcctcactctgctttatttgggttggcagcaggagtaccaacagcagggtggcaccgtggctgaaacgccaaactaggtcagaccggcctgcctctggggagctcccagtgcgccctgggcctcagctccctggtctctccagagatgggggcaccctgggatcctgggtgggaatgaggcttgggtgggaggggccctagaaggtaaaggccataggcagtcagcatcccctttctggccctgaagagcttctcagcatctttttcttcaataaacaagaaatataaagtcctacagtgctttacagacttcccttatttacgaactaaagagatactaagtggcagggttaaatgggggcaccctaccctctggccctgcagggacagacagacagtgaggccggcacccaggcatccaggagctggggctgacagccagagtggagggcctaggctcagaggacaggggccaggggtgggagtcaagggttagggtttgggaattctgcaggctcaaggcccaggctttaagaccaggattcaggattcaggattcaggggcaggagcttgttggaggaaggggccaaggatgggatctaggaaccagagttaggggcagggtccagaattgggtttggggcctgattctggaaccagggttccaggttcaggggtcaaggacaagtgttcagggccataagctggggcctgaggttgaaattcagggttcagagtcaggctagattggctttagaggcaaagggccacagtatgaaggctgggattctagggctagaattcagtgattggggaacagggacaggaggttggggccacagccctgtgtcagaagttcctgggttagggtttgtggttatgtttcagggtttggggtccagggctcagggaccagagacagacgtttgagagcaggttctgtaaccagagttctgcagtcaggatttgtggttccagtgaccatggacctggggttcagggccagggttggggatgggcattccagggccagggttctgaggattcggaaatcagggctggggctgggtttggtgcgcacagacccggtttctggggtttgggttccaggaactgttaacaggggttctgacagggttttaatattggagtttcgaggtcaggatttgcagacaggagttcagaggcagggtcccagggtcaacggtcagctgctggagtctggaggatggggttcggggattcagggcccaggtcttcaggtctcgggcttggggatcaagacaggggtctgggctcccagacttgggaatcaggacaggagtctggggtcccgggtacagggatcagagtctggggcctctgggtctggaggttcacggtccagggtccaaggcttgcagttcgggaccccggggtcagggtcgggggttccgggcttggggcctgccgccggcacgggggacttacgtcgtcgaagagcgagcccacgttggccgtgaccagcagcaccgcggtgcccggggcggccgccttccccgccatggtgcccgggcggcgcgggcgctgggctgggcggcggcggcggcggccgcttcctccgggaccggccggccggggtcttcgcggggccgcggggcgtcagctgcgccggggggcggccccggggcgcatcgcgggctcggcgggtcggccgggcctggccggggctccggcctcgcgctcgctcgctcgctcgctgctccgcggccccgcgcccgtcgctcgccgccgcgcctcacagcggcccgcgcgcagccattagatccgctgggaaagttcccgcagccgccgccgactcaggctgagggcaagtcccgccccgcggagccgagcccggggcggggcctgggcggggcggagcctgactcggggtggggcctgtgcggggtggagccgggcctggggcggagccttgctgggggcggagccttgaggtgcggagcctgagttgggcctagatctgaacagagtggggcggggcctgcggggggcgtggcttgtgcgggacttggtgtccttgtggaggcggggcctgccccggggcggggcctcctttcggggcggggcctacgcggggcgctcttgcgaccggcggcctagtactggtcgctcccggagggcgctcctgtcagtcaggcccgcaagaacgccgcgcccccgccccgccccccgcgccgcggctgcgcacagactccgcccttcgcacttctatgacgtcacggccctgctccggcggcgcctcttaaaggggccctgggttccgggcgccggcggcgggtgcgctctcttgcggctctgaggggatgttccagcccccgcgcggccgcagtcgtccagccgcgtgccgggcgtgcgggggaggggagcccaccggggcggcggcagtcgcgcctgcaggggccgggccacgcgcgcccggctctccgcgcagacggagcgtggaccgtgcagcttcccggcgcgtccacccggctccctggccgcgacctcactcacgaggagcggctgcggcccagagaagacggaggggaggcggcgtgaggccaggcgcatcctgacgtcgcggagggctccggcccgggccaggctgggtctcagcgcggggcgtgcagggaaccctcgcagggacgaagggggctccaggggagggggctggtgcgggcccaggagcgcagagcacggaggagcagccggctcggcgcgggccccggggcagcgatgctgatcctggccgccggaggggccagagcatgggctggaccctgggtctgaggccgcggggacacagccgccgtgaaccgggacatgcctgtagatggaggaggagaaccacatttgtcatcttaaagcttccagtagctacattttttaaaggtaacaagtaatagccaaagttaacaatacgttttacttaacccaatagatagatacatcattcaacatgtaaccagaatttaacaacctcagtgagattccttcacaggaaggctttgcacgggcacctgcctcttggcagcagctcacaaggccgcttccagtgctcagcagccctgtgtggccagtggccaccatgcggagcaggcactccggaggattttgtggacacagatttaggggcggtcagggcctggcaatgggctctagcgaggctagcctccagcttctgagtaaaccgccaaggcaatgcccaatgacatcaaaaggggcttgttctgttctaggaagacacctgctgccagggcggggcggcaggaatggtgctgcaggctcgggccccaggcctgtgctgaggccgcatcactggcttgtgttaacacccccagggttcctccttacggccaccgctgagcaggactccagcaaaatccatttgatgtataaaccaatgtctactttagtcagtaggtgcctgctacagactgaattccgcccgccccaccccaccccaccccgcaaattcatgggttgaagccctaacctccaatgtgactgtattcggaggtgggctagcgggggtaattaatgttaagtcgtgcagtagggctggtgtttaatgttaagtcgtgcaatagggctagtgtttaatagaaagggctcagtgctgtccccacccttacatgtgcaaaagaagtggcagtgtgagtgcacagtgggaagcttcaccccagccagccacaaaccctgcaccagaaatccaacgctgctggaacttgatcttggatttccagcccccagaactgtgagaagtaaa

SEQ ID NO: 913757 - DNA, 4001 bp, Homo sapiens
tcactatagtaatgcaaacaatgatacgtggtcattagtgataaaaacgtatggaatacatcaaaacctgggaaatatataggaaataacaccaaatgccaaaagaatacactataacataaacatactaatttaactgtaaaatcttgctttcaaaccgataaagataaaaggaagttagaatgacgtaacagttatataaggtaaaggggttcaatgaagtttcataaaatacataacaaaaccatattctcacatttttttgttacgaattctaaaaagaaaatttactcaagtttaaaaaacaaaatcaaaacctttaaatcaataagcaacttactaggccacgtagtaggcagagttagaaagcagtaacagcacatccacgtctctgtgagtagcatcaatgaggctaaacaaatatgacacaggagattaagtattttcatttccatctgcattttttgccaagcatatttctacagcagagctacttaggacaaaaaattggccagggggagggaaaagaagaaggtaatcaatgagttctactgcagttagatgtaatacaatctatccatttggacagtctttaaaaaacaaggaaaagcagatgtgggaagtgagggatggagcgtagagaaaggcagccaaaggaggaaggagtccctcaggaaatgggataatttgaggtgggggactggtggtattggaggatgatagagaagcagttaagggaagaagaaagaaatacgtgagagtgagaagggagaaatcatctaaactatctcacattatctaatcttcaaaataacacactatacattcaggatatctttacattcatgtggaaggcatcttttgaaagacttttacattaatacagtatttatgtgcaaaaatggaacaagtccaagctacttttgcatttttgtcattatagattatttggctttcaataaacaaacacttccttattccattttgccatatttatacccattctaaaatcaatgatgaaaacaagaattagaatccaggtagtgttcatgaaccatgaaaccaaaactacagtaaaatgtacatccttgtaaaattaccaataagaaaattcttaaagtataaaatctacaaataattaacaacacaggcagaatctgaattaaggtgaaacttttagtctaatattaatctaacaataatagcctttccagcaaaagagagatgtttctgcattcttatgctggtctccaaattccactgtaagaaagccgacatttctcccttgggatttcatacctattccctagaccttatcaaaatgctactaataacaagcagaaaataatagtggaaaaaaaatttattaaatctgcgtaagaatgaggtcattgtttaacaggtactgcagggaaggatttaccataatcttaaactgcagttttttacatcagagacacctcgttgtagcttgagtccaacagtcttaatctaaaacaacaaattcacctcaatttgcacgtacaataatatatcaaaaaatacagcaaatgacataatgagatgccaagaccgggaacacacagatcgattctaggagccaaaatctgagcattaaccaattaaccaatgggaaaaggagaccgatccagacagcttcatagagaataataccaaataacactgtaaaatgttaagttttacgcgttgatacttacgtgcactctgaaaattgttgcttgagccaagccataaaaattacgtcatgacacattttaatatgaaataaattctactactaattacagtgttactttcatcctagctcctattttggcattaatatttacatcagccaaacatgatccccagtcaaaaacattatgtccttaacaaaaagcacttggcacgtaacaggcagtcggaaaatgtcaaccctccccccacccccaattttactgaagtcttagctgcagtaaatatttaattccctccccacccacccttcccctttaaaaaaaaaaaaaaaaaaaaaaaaagcacgttcaatacgaacaagaaacaagacaaaaaccctttaggtatttccccaccccccacgtctgcagctctgaagaagctgctctattcgtttttgttttcccgccactggggcaagccctccttccacactatgaagacgaaaattgccagcaccacatgaagcccgaccactgcaacaatggtcgcataaaagccgctgtcttcaggggacatcaacatcagactttggaaaagaagtaatttgcaggaaaaatataaccccacaggaactttaaccataagccctgcaaaaaggagaaaaatcttgaaagtcatagccacaacgccctcagacttgggctcggctgctgcggcagtggcagcccgctgcgcggtaggcggaggcctgtgagagcgcggcatcgtcagtcagtccgtccgtctgtccgtccgtcgatgcctcgaggctcaaacagctgcctgcacccaacctcgcgcctgcagcgaatgcggcgaatgcggcaactgcgacgcggcagtgccaagtcacgcccaggggacacgtctagcttccggacgcccacttccgtcctcggctggcggccagtgcgcatgcgcgctccatcctgcgcatcctacgcctaccaacgagggcacagaccccggcccggcgggggaggggcgccagggtggccactcccgcgagagttcgctggcgccttcgccttcgtcagggacagtgcctgcggctggaggggggcgctggcgggccgggcgagggtactgcaccgagcgtctggcccctaggccatcgcatgcctaagagacagtggctgccgcgtgcctggccactccattaccactgctggaccgggcaggcgacctgagcgcacggaagcaagtcgaagcaagttgggaacaccacttggcttagcggagaggcgaggcgggccctgcaggtccgtggtttcctctccagtctcagagcctctttcccgctgtcgatagagtcgggggtttcctgcgataacgggcgggaaaggacaagaaaggcagagaggtcggccctggccacgatggagtctgtctaaggtagcccggacagagctgcgctcagccttgcatgggagaagggccaggacaggcacgggcgtgctggacagttcccggtttctagttctctgtatccggcgaccaatgccctaggccgcgaccccgcagccaggcctacttccctgctgggactgcgcatttccagaatgcttgcctgtttttccaccagatatttaaacgcagctgggactgcagtgaggtgagtgaggtactggtctctggtacagattttaaagggtgtcattaattttgtcaacaagacaattggtgcaatattttttaaaatcaaaattaatgcaaaaatatgataaatatgatggacaaagcatcaaacatttaagatagaatacatccctgtagttgcataatcgtacctcactcacttgaccctaatcccaaccctgttcccaacaaaactttatttacaaatcaacaacccaattaaaaacttggcaaagcgtttgaatacatgtttttccaactaagacacagaaatagccaacaagtacaaaaaaaaaatccttaacatcgtttgtcatcagggaaatgcaaatcaaaaccacaatgagataccacttcacactaagtaggatgactgcatttagaaaaaaaggaaaataagtgttggcaaagattggagatattggaaccctccaaactggaatgtactgaaatacattgctggtggaaacgtaaaacggcgtggccactgtagaaaatagtttggcagtttctcaaaagttaaacaggattatcagataatctggccatttccacccaaaagaactatttaatagagacaggtgttcaaatgaaaacctgtacacaaatgttcatagcagcactacttacaatggttaaaatgt

SEQ ID NO: 913758 - DNA, 4001 bp, Homo sapiens
ggcgcaggttagcctttatagttcaagaaactggggtgtagaaaagtttgttgtcagatgagttggagacgatcttaagtcccatccagttctaatagtctaagcttttagaatccaaggagttgactcttttgacaacctaggaattttgaaatctgctttacttcaagctgtactgaagccttacccaaatttgggggagtgaaaggagggaaggggagaaagccagacaaatggtcaaatcagagaagagaatgacagaagactggccaaaattagcctatccataataactctatcccgagatcatcaagaactttatctgggccaaggagtttatcctccattctgaaaagaggaaatacaacgtaatagcaagaaaatatagacagagcctgaggaaaaaaataagttatccttcactgctctggcaaagcaactagtaggccttcctaagaaagcagtggggcctgcccaaaagtgttctggaggtcacagaactgccctgtgtcagtgtctcaactctaggctgtgaccccgaacgagttactaataacctctcactcctttctcctcacctgaaaaagaggatcccacacgtgtcctgtaaggttgctgtggggattggaaataatatgttaaagggcctgtccttaaaaaccatcctataagtgataccacgctgtgatctgaaaagctcatctgaaccttttatccttttcaattcatatcatgtaatccttctgtctagactgcacataagaattacaagtaagtctgaaaagctctggctccttccttaaagaactctatcctctcgctttccctaaagtggaagaatctctgagtgatatgaggaaaggattagcaagccaaaaggggcaggtgccacccagccccatcttacaagaaactggactgtcagcgctctgagggcagggactgctctgtttaaaccacgactgcacacacattttcctaaagcaagctaattgcagacttaagcctctccgaacagcttacatgacacccaaacatggacccacaatacattttgtgtcgcacaacatcaagtcacacaaaaatctcaaaattatacattacaatacaatttaattgtgctgtggtattaaagtcaaagacaaaggctttaaaccgagtgcctatgaggtaaccacagtaaagtcacacctttaataataagggaccaagaacacacgggatggcaacagggagtgagtgtccagcagagccctagacggaactggcgcaaccgctccagatcggaattcgaacccagaacttctggcgaaggccatgtaagaactactccaaggaggaagaggcctttacggccaggtgcaccttgctggaactttctgccggaggggaccccctcccctcggcctgggccccaagccccaagggcggccgcgtgacgcggtgggaaggacgagggtcgccagccccttctgctccgcactggggtaggggctcggcgctgtctcggagaaaggccaggctccttccagtcagggaataatgacagctcgcgcgctcgcagcccgccccgccccgcctcaccaggcccgcaggcggctcctcccgcccggctgaggggtccggccgcgccccctcctctccccgccctggcccggggtgccccccgcccgcaccgccagcctcaccgggtcggagctggaggccgccgtcgcggcggctgcaccacagcgcgcgctcgccctgctgcaggatgtagtggtccttggcttggaagagctccatgctggccccgcgcgcccagggaggcggcggcccgcgggcggcgcacggggcgtcctagtcggtcgaggccgccagagcccgcgcctcggggagcggccgggtaggaaccgcgccgagaagcagcggcagagggaacgccccggggcacccgaccggtaggaggagaacgcgccccggcagcggcggcggcagcggcggccgtagaggcctctcccccccgctcctccccttccctggctccgccccaggcccggctccaccccctctgctggctactctccccgagcgcccggctccgcccctcagcctcctcctcctttcagctccctcccgcttcctgccctttcctccgccttctcccgggtgtctcctcccagctcctccccgcgggtctttcctcctccctctcgtccttccgcccgcccctcccgctcttgcccaggcccctcccccggcgcgccagccttcctgtcgtggtcaccggtggcagctcgggagctcggccgagtcggtctggactgaccgcctccctccgcgcggccttggggacaggcgcccaccgctggggcctcccctccgtgcagggaggcgctcacgcttcgccaggccgagacctgaatccaaccccacacccgctctcccggagcggtgcggggtacgttccccgcgggcctgcgctgcctgcccgtaccgaaaccaggcgagaccccggggcctggctacaggggttcatccccagccaggcccacagccaagcggaggcgtcttctgttttcgtattccctattagaagtttgacaacaggaggcattcaataaatgcacatcaacgagggaaagcatgtaacaatagaaaacacacaagcattagcagcacgcggctaaagagcgaggaggaagggaggaatgtacaggtgctgctgtgtcccgaattaagcagggcggtttggagaagacttcacaaatggagccagttaatgaagcaagcggaaggaatatcgtttggcgaggataagatgaatggagaccctctcggggaaggaggagtctcccccaaacatccttgagctcagtctgtcttgaaaaaccagttgatatcctgaacagaatgggtctggagaatgaggcccccacttccggggccagttcgaggactatctagctgtgtgatcttggggaagtctcttggtctcagatggtggttgaactaatgaccttttatgacacccccagttctataaatcattgagtcttcctactcctaactccttgccttctctaatgcctgaatcggaaacaagagaaaaagacaagaagtaggagatgagaaaaataaggcaatactttttttttttttttttttagtttaggagcggaagtttataggcaaaagaaaagggagaacagctgtctctcttgcgagagagaggagtgaccgaatgggacttctcagaaagcaatacttttaaccttctgctcaagtaaaagtgagagggtacaaaagcaggaaggagttccacatgactagttattccagcccacagtgttgaatttccatagcacagaaagtccaatgataacaaagcgtcctggaatcttttctaagtaccatgcctctgtgctgtccagacacctcaacataaaggtcgagggaggtggttactctatcaaatctttgtgatgtgatttggagaaagaaggtaatgaagctataagaagcttcagtggaaccatcggtttcagattgattgtttaattcagccatgtgttgacttagcaaaaatgagaatgagaaaatcctatgaagacattgtatcctgcaaattatttcattattgttttatgaattacattgccagatgtgaagaaaacaatgctgttgtaactgttttaaaacaattaattagttcattgaaacttttcctgatgttttagatccatggttccaaccctggctgcctattagaatcacctggggaatttttcaaacatatcaatgcttggaccttagaccaattaaatcagaatttaattggggtggggctctggcatcagtttgtttattttttctaagctccccagatgactttactatgcagtcaggcttgaacaccactattttaagtgaaattaattagtaaaatctgcctgacagcagcttggaaaaaaacagcagtcagtcattaactaatgccatcatatgggcttggttacctg

SEQ ID NO: 913759 - DNA, 4001 bp, Homo sapiens
  modified_base (2009)..(2009): a, c, t, g, unknown or other
aaacatttactttttcaggcatctagaatattattaggaatagtaaaatcacaatgtattaatataaatcaataggcattcctctattaacagaaaccccatgagtactctcaaattctcattacaagacactggcacacaggaggaaatgtctatgctgagcaacttgaggacgttgtttctttacctcggtatactaaaacaactgtcaattttcactattcaatatttcctgagtgttactgattcccagtccgtgcacaaggctatgagagaatacagattctctctctaacatctaggaattcacaattcagtggggagaaaggcacacaaacaaagtaggtaaaaataaaagtagtggaaaatgtcgctttgagaaatagcatatactcaaattaatacttatccattttctaaaagccttgagttgtttcagcaaacacaatacatggtgaaaaaatacagtactcaaaggaagaactcttggtttcacaattcttaacatattgtaacgtgacttcaggcacgtcattcttaaccagggttggccttagtcacctcgtctaaaaatgtcagtattagcaacctaaacccgaatcgttttaccggcataaactaaattgtctctagtggctcttccgggtcaaagatccacaatactcacatactcatccatcagattaccccagtaatcatggcccagggaaccactacgggtaaactagatgaattagagttcctaaactgagataggctttaaacttgtgaactcagaaaatgtattacagtggccatgatacagccttataaaatgaacaagaatagctgaacattttgtgtatcattctggtacaatatgcgtgtgaatttcccaccaggaatccgagtttctgcactactggaaccacgcctcccagagaaatcaaggagacaccagaaaaacctcctcaagggacagggaaaaatcacggacaagctttcttcccttctcacctccccctaaaaaagcccagtgtttttcttcccctccagctatgcagctgcacccagcagagaagtactagattagcatcatctgcatttcattccttttcttttgcaatagctactcgcctataataaacagaccttgtgctcaagggagaatttacttccccgtccagtaaaaatgaagttccttattttcactaacaacgccgtctccaatcaacacccaacctccctggggggtgggtgagaccagacacgcctctccctgccacccgtgctgcaagcctgacgacccacaccctaggaattgtcccactttccgagccccttctgctcgagtggcgaggcttcgggggacagcggaagaggccagggatttggcgtgcacaccaggggggcgtccaggcaggcccgagagcgctaggctgcctccgctgacagggggctcgcacaggcggaaggggagcggcgagacctatgccacccccacttacccactttgtccttcccgtacatgtgcccggccacctgatgcgagaggggcacgcagccgttgaggaagcggagtctgccgcccgccggctgcggggtgccctcaggggtggactcgatcgccggtgaggtccgcatttctggggggcccggcgcctcgacccggaggggggatggtggctctgttgccataacggagagcagaagcggtaacggcagcgagagtaggaaaaaaaatagggcgagggagggggcgccggagaacccgagggtcgctcaggctcgggcgcgaggaggcccgggggttcccgcggctggtgccctctgaagcgcggggagggggcccatgacgccgccggggcgcgggcgctcctctgcccaactctcggcggaacgcggctcccggctcctgttcctctgccgccgcagccgccggccccggcgctgcccggtagacagaaccgagccgaagaacagcagcagcggcgccccgcgctccctggggccctgacggcgacggcggncccacctcctgcgcccccgccccctcccgccgtcctccagtcccctcagctgccgcgcgcgcgtcaccgccgcccgcaccgccgctgccgccgctactgagcatgcccagaggccgtccaacgggattccggccccccaagtcagcggggcgggcgcgccgtgctgccaggacctggcgacggcgacagggatagggcgagcgcacccctgtttcttctcacccccaccccgcgggcatttcgaagtcacgcgtgctgctgtggcctcattcattcaacacgcttctcagcgcgtcagctcagagaagccagggacttctaagtgtgcggagcagtccggcaagaattggaaggcactagcattgccaagggtggctctaaaggccacccctaactgcactcaactccctccaactcccaccccgcacgaaaacaacagaagtaaaagcaggcagcttattagagatgcgccttcaaaatacccttcgagttaatctcagcccccctccccggattgctgtctctaaaccgctcttaccaaaaagtaaaacacataaaaataaaataaaattggaaccgacacgaatttcagactgtagaagacagagaaaacttctaatttttttaagtgaacatgttttttaaagaaaggagcaagttttttctctcccactcgacctttaagatagtgcaggttccaaggtcctgagtagataattatatcaaaagcagaaagggatggacaccggtagctacgcgaggttctggaatgggactcagtcattgattcctgtatgtccgccgctggcatgttatataaaagctggacctggccttgaaggtaaatcgtcacaagccccgagcaagaaaaactggggtcaaatcttaggtatctgattaaagtaagtgtcctattaacacctgtttctgcccccagaagcccacacacctggaagagacgtaaaatctggcctggattccctaatcccagggccctgcccctcggcttcagggccccgcccctcggcttcagggccccgcccctcggcgttgcgcaaactctgttgctacctaagtcttttcctcctcccacctcccgtagctgtcaaaatccggagtccagacttccttatggccaggacagctccacgcatgctcagcacctaccagggtcgagctcacacacgtgcctacgacccgccgcggcgcctgcgcggtagcatcgcggagtcggtgctttagtacgccgctggcacctttactctcgccggccgcgcgaacccgtttgagctcggtatcctagtgcacacgccttgcaagcgacggcgccatgagtctgacttccagttccagcgtacgaggtgaagtggggcctgggagcgggtgaggctggtgaggctcagcggttgccgcgcccgcagttcgactgggttgttttaccactgccctacgcgcccgccggtcctataaccttgagatgcagaagggcaagcgctcggcccggctgcgggctccgggccggacagcgaaagggggcgaggtcagggatggattgatggtttggggccatgccggaccagagtccacgtttaccccagctagccaaaccctaacacctaatgaccgcgccgctagcttttcttgttcacccctaagacgctttcatgtccttaagtcacatagcctggaaaagaaggaaaggtgggagaaaacaacagcaaacctgtttgcccttctcatgtttcagtcagcgtcgggccacaacgtcgatttcctgcaatcctgaagcattgcgtgactaatcacatcttagttttgcagatttttttttaagggatgaaacgcaatccgaggttttcagttttcccggttttttattattcctctggcatctgacactcggtggcagtagtccaggataaaggattgaaaactgcgttcgttgaaccttcagctttctgagtcttctttcccctgtgctagtacctagcg

SEQ ID NO: 913760 - DNA, 4001 bp, Homo sapiens
gcagctaagtcctgcctcccgagcttgggcactggaaacgctaaggatctctctttttccagatctgtccttgagaagcaaccaaattctctccacagtcaaagttaggacatagtttttgtatttctccaaaacatccactcaccctgaaaatgctcatctcagaaaggtaaagaaacaggagttgccaggatgcatccgaacactcagggtcaaaatagtgtcctttctctagggttcactaaacgtcttccttcagttaactgagagttgaaaaaactgatttctctagagacccacatagcccacaatacggacatatcagacaagctaaacgagcagcacaccaagacagcgggaagtcgcctctgggatggccctggttcttccaaacccaggcccacagcttagaaggacaaatctcacttactggtggtgtcaaacggtatctgcctgcactgcgcagacccctccgcgggccaaggacagtaatagacggctcccccttccacgatatcgggctggctggtgttggctttgggcgcccccaccaagacactcgctctgcaaaagagttggagaaagtcactctttgggcgccacaaaaccgtgcgcatgcaatgcagtctctgtaacctcctgcccggggacactggggcaggcgtggagggcatgaacgtatttatgatgaggaccgactgtcaaacttgatttcctcttggaaacgggggtccgcaacctggtttgcaagaatgcaaacggtcctgcttctctaggtggagctctgtgggtacagtgagatgagagaagggggtggggtaggaggaagccaaggacagagcccagctgctggtagccgacagctcttgcgcccagacgcaatggttacagactctgcataaacagacctcgctgtggtggcggttttaactggcttgggtcttctgggtcctgttctctcctttgtaggatgcgtgcgtcttggtacctggaacacccaggacttgcgtgttctatgcaagtggcatgtctctagctcaaaattcacaaggcacatctagcatggcaggggagagaaggggctggtggcggggagagggacgggaccccgggcaggcggcaggacggggatcccaggctgcggggggactccgcggcagagccgctgggacctgacccgggagcgccttcgtccccgcgcgcacctccccgggtcgggcgacttacgtgcgggcgtcgggtatgtggaagtccacggcgtagccgaagtagctgcccttggggccgctgtacactgtgagcttttccacgtccaggttgaacgcctgacaggcgggggaccacagcaacatccccagcgcggccgcggcgcagcagaggggcgcgatcagcggcgcctggcttccccggggaccgcggctggccccgggcgacatctccctccgccccggtgggtggctgctacccaggagcgcgagccgaggacccctgcggggcaaggggggctggtggaatctggcggtccccagctgcccgtgtcccgggtcggtgcgctcggcgcacccgtggtgacagtgcccggcgtctgctcccacccgcccgcccgcccagccggctcggggggctggcccaggggctctagccctcctccggccgcgggcagggaccagctctctcgcggcgcctcctcgcggctggtctagagccagggactcccgggcggcccagctggtggctggagcgctgggtgcctcttcgggctgcccggatttctattgcagtcccatctcaaggacaatcagtttcgtctctgtcacctcaagctatttattgctttagaagcaatgccccaggtggagcgagagcttgctccagttgtgtcaaaggcgcagcttggatggagaatgtgaaaaccaaccccaccaccaggaggggcaaagcaattatctcttcatcacctctgcagcctgacctcagcgttcacggctttgcacgtctgtgatgagagttaaagttgaaatgcaacaaccctctcctcccctaagtccaccccacctcctggcagagctaactcatatacaagaaagcctcgagggtttttttttgtttttgttgttgggtgtctgtgtgtgtgtgtgtgtgtgcgcgcgcgcctgtgtgtgtgcatgtgtgaattttttgtttttgtttgtttggttggtttgctttgttttatttattttttttttctttttagagatagggtctctctctcgcccaagctggagtgcaatggtgctatcatagatcaatgaaatctcaaactcctgggctcgagcgatcctcctgcctcagcctcctgattagctggtactgcagatgacacatcacacctggttaattttctaatttttttttgttgacactgagtctgctcatgtggcctaggctggtctcgatctcctggcctcaagccgtcctgccacctcgagttgacttttaaaatttcttttctttctttgtttctctttctttctccttcttcttcttcttctttttttttttttttttttttttaaggagatgggggtctcaccatgttgttcaacatggtcttgaactcctggactcaagcgatcctcccacctaagcctcccacagtgctgggatttcagggtaagccgccttgcccagcccttgagattttatttaaatctttcttaaaggcatcttgggcatattaaatgacttagtagtaaatctccatcctgtgtaattgtgatgaagtttggcgcagttaagaatgttggaatttacagtttactttctgcgggggtagaaggtgtagttcacagtctacaggagttcagatttcggttctgatccgtgggtgttgtcaatctcttcccatgtctcctgtgtcggagaggacgtgaggcttgagtaggggaggacagagaagagaaaggagtatagatccctttacataacatatggtcattcgttaacattaaacaaaacaggtcagcatgaaaccggaaggagccgaggttaaacagatatgaagtttagagacagaagagctaagttttttctgaagcatgtaagaggatttggtggcagatgtacatttacgtaggattttgaatacggggcttacatttgggcactgtggggggagaagttgagggaaggtattaatacttagaaaagacagagattaaatggttgtgcatgggattggaataaaaggggtgggttaggaagtggtgggaaatagggttgactggatcttcaggaagaggatcttaataacaataacatttattgaggcaaagggagccagttctagagcagagacgggacataccttctggggctccaaaagtttaggggtggggagtggggggtagttgttggaaggaagggaaagcaaagtaggtgttgcctagatgcactgggaggcgaggacctcaagctggttaacagaagggaggggagggccacaaatgctaaagaaaagggacaggctgggcacagtggctcacgcctgtaatcccagcactttgggagcccgaggcgggagaatcacagggtcaggagttgagaccagcctgaccaacatggtgaaactccgtctctactaaaaaaaaaaaaaaaaaaaaaaaaaaaaagctgggtgtggttgcatgtgcctgtaatcccagctactcaggtactcaggaggctgagggaggagaatcccttgaacccaggaagcggagcttgcagtcagccgagattgcagtcagccgagactgcaccactgcactccagtctgggcaacagagcgagactccatctcaaaaaaaattcaaggtgtctcaaggtattaacctagaaaagaagaatagcgaacggtagcagtgggctaggacagcagattggggaagtagaaggtgagttaggtgctgggctcactgatttgagttactagcctgcgattagcaatgtagatggcagtttcgggagtggtcagtctg

SEQ ID NO: 913761 - DNA, 4001 bp, Homo sapiens
gcatgttatttttgtagcattaaaactacaattaaaaaaaaaaaaataaaaaaacctaagggccaggttcaggggctcacgcctgtaatcccagcactttgggagctcggtgagagaggacagcttgagcccaggagtttgaggccagcctgggcagcatagtgaaatcctgtctctacaaaaaataaaaaaattagccgggcacggtggcaggcgcctgtagtcccagctactcaagaggctgaggtggaaaagtaacttaagcctcggaggttgaggctgcagtgagctgtgatggctcttctgcactccagcctgggcaacagagaccctgtctcaaaacaaaacgaaataacctagtaattctacccacctaagttaaccatgtggcatgttggcccaaagaaaccttaccaatgatgttaccaattatcttccgagatatttttaacatctttttactataaaagaagggctgaaaaggagtcaatactcattgagcatctactctcaagctaagttttttacattttgcatttgattttcagaactatagttaggaaggttacttgtggtttaaacgcggactctggaactagaccccatgccttctccaggagctcctgatgaccacaggcaacttacttttgctccctgtgcctcagtttcttcactcggaaaatgggaatcgaaacagtaccaatctcattagagcggttccagaattaaataatacatgtaaaatgcctagagctaaacttggccctcactgtcattattataaaaatgaattattaatgtagatattactgttcctatttcacagatgaggaaacggaagcttagagaatgcaacttactaatgatcataccaatgagtgcaaagttttggactcaaaagcacgaatttgattaaataaaagttacttagagagtaggagtctcataaatccaatttatgaagcctaagaaatgacacgcggtaaaatgatactagacacaggccgggctctcaggctcgcggaccgggtctgagcacaagctggccatggccatgcgtcctggtcccggggtgcccggcagggaccggcgactcttgacgtttataaacacggggaagtggactgcactgccgccaccgcacccccggtccccagcggctccactaagccaacttctacccggctcccgccgcccccgcccgcggcgctggccccagggccgcctcctggcagccggaggagaccagtccccgtcgcgggcgccgacggctggctcgacgctgctccaaggacagcagctcgcgagggagcgagagacaaaggcaccggacccgtccaggggagcgccgagtcccaaacgccgagccccgggtggcctcgctggctcccacctgcgcttgcccagcccggcgggagaccgcaggtgtcaggggccgttcgggcccggtcccccgcagctccggcagccccgacgtgacagcgcccaggccggcgaccctcacgttcggaacgcggctgggctggctctgcgcccgggggctgccagcgccggggacccgaggcgggtggcggcgtgcggacttcctcctggactagcctggaatcctgccccagcccccaaccgctggcggccgcccccgcccccgcccccgcccccacccccacgcccggcacaaaggtcccggcgcggcccggccggcggctttaagtgctgccgcgcacaggagaccggaggccgcggcccgcgctcccacacccgaggcccgccggcccctaccttttccgcgcggcgtccggggcccggcgcggtgggctcgggcctgctgttccgcgactcccgctgggcctctcccgcgggctggcggggcctcccgggtgtcgggcgcggcgggtggcggcggctcctcctcctcaggggcgggaggaggggactcggcggcccagagccgccccccggcaggaaaccagccgcggccccgcctcctctgcgcgtctgatcccgctcccgaggccgccgccgccctctccctccggaaacgcattcctctcccgccgcgtcagcccggcccggggctaggaggaggcggaggatggggcaggaagtgcgaccgggacaaaggaaccggctgcgcgggagcgcgcctgagggaggccgcggggggcagggccgggactgcgttgagacagtcgccgtgcctcagtttcctcctctgcgaagggcgggaggagtcggacgcgccctagagccccgcgcgttcctggtgtagcctgctgggcccgtgttctttaagttcctcttcctcggagccgcgcgttcgaccctcgctcccgtttgtccactgatgtcccgtttcgagcccgggagatcctgcatctcggaagccccctgagtcccgaggcaaatcgggaccgtgagcccccctaccctgcagggctccatggggccaaaaaccacgtggtccttctggaagggaactggctaagccaggactgcttttctggagtgataatgtgcttgcctgtgtctaagagaaaggtgaagaattgggaaacccatgggtgtcacgaagggtggtgagactggggaacgttttagaaaacctggtgagttgcgtcctgcttttgatagatttatctggaggtacctttatggggaacagggatgagaaggaaaagtttcttcctaaggagtacagtttctgtttcacctcttaaaaaaaaaaaatttggagattggggctggaaacaacgtttgaaagagaaggaaacattcattatgagaatggctgaacgcatgtcgattcgatgattgaagtctgtaccagccaaaatcatactgaaacccagtaatttagtatatgctactggcaagctgctatcctggtagcagaaaatgctgtgggttccgcttggtgagctgcagcaccctgttgggaaaagagctcaaaaattaccagatttatgaaatagaagtgtttctcttgcaggagattagggactggaatgcccatttggctgctgccaatcaatataagagaaaatgaagcgatcacatctaagaaaatttgctcattacttaccagcaaaatcaaaacttgattagccaatctgaagacctctaggaaatgagcactatttttcccacttaatggatgttcaagcttaagaggctaaatgatgttcctatattaatatctcaatggtcaaactgccattagaactcaacattcttgaattttaaaggtatcggttttaccattgttcagaattcatcagaattggcccagtctcagcacagaaaactgtatagttcaaaagcataattggtccgtgcctgatttgcactacaatttccagaatttttttccctgtacgtgactggtggaggcactagctagtctttgctacaagaacattatgagatttacatatgcacaactctaaactaaattagttcctccaggacaatttactgagctttttaacaccaccgtcaagcactgttgcaaggacagataataggggctcagataatatctgataaatgaataaatgggtccttttgctctcccaggactgggctagagcacttgactaaactgatgtgtgaggtagcaatttgtgtacagaagtcatgagttttgaggaaaaagaaattaaagaaacatgttctctaaaaactgcagtcattggtcaagaatacgagtctacttgtgatttcatacaaataatgggtggacagtgagctatgaaatttatgaatactctaagcaaaggttggtcagcatacgtgctaaacaggaaatcctgataagtaggaatagtgcaagccacactgcaacttttatcatattaggttggtgcaaggtctaccagatgtgtcttgccttcccatgtgtaaggtcaaccagatagctctcacctttccatgtctaaggtcaaccagggggtgcttgccttcccgtgtctaaggtcgaccagatggctgtgtgcaccaac

SEQ ID NO: 913762 - DNA, 4001 bp, Homo sapiens
ccagcatatgcttcttatagaaaatctggaaaacacacaagagcataaagaaccaactcactgaatctgttaactgagagaggactgttgctaacatttttgcctatttctttccagtctttttcctatgcagataaatagcaaggggaagcaagcatatatatattaatacatgtattatttacatgaaactgaggatgcactttatatatacagttgtacagttttgtatactgttttttataccttatcctaagtgttttattcttatcatcacaaattctttttaaaaagaattaaaaagcttttaatgattatgtatttcaatataagtgtactctatttaatgctggacaaatttagattgtttccaaatgtatgtgtgcacagttcacacatgcttgctcacatgcacatataaacaccccaagtacacatatacacatactgtactacatgcacatacacatgctgatgatcttatatataaaccttagtacacatctgattatttccttataataaaacctaaaagaataattaactactaagttgaagagcatattaacatttctaaaattctctatacacactaatttctatccaaaagtaatatacagttgaccctctgtgtctgtggtttccaaatcagtggattcaagcaaccacggatcaaaaatgggggaaaaaagtgtctgtactgaacatgtacatacttttcttcctgtcattattccctaaacaatacagtgtaaaagctatttacctagcatttacattgtattaagtattacaggtaatctagagaagatttaaagtatacaggaggatatgtgtaggttatatgcaaatatcatgccattttatatcagggacttgagtatttgtggattttggtatctgaaggaggtcctggaaccaattccccatggataccatagggcaacactactaatataagctcccacaaaacggcagtgtacaaataccattttaccacatttccaaccgaagtgctttaatgttaaaaaactgttgctcatttcataagtgtaaattagaatatcaattcattggtgaagcctatcaatttcaggttttacattgtttcatatttttactaaccatttcttttataattttgttatgtcttttgcaaatttttttgttatgttcctcagtttttattggatttctatacacattaatgaagtggaacctttgtttagtttctcatcttgtttacggtgttctgacacagaatgtttttgttattactgattttatgtaactaacttatcaatactttcttttacggtctcctgcttcatttttactacttgtagtaagtccttccaatcctgatatcgaactgctctatgcagtgtagtttttcaagattcagaggacagaactgcgtatccattattccagatgtggagccacatctttatagaagggttaaatacattttcagctttattttcactgctttcctagatgatgccaacattttgtgagacttttttatcaaagagtgagaatgtcttctagaaagtctttgcagataataatggacagttcataatcctccattctacacatttatttcatttgcttctaaatatacttgcttttgccttctgttcacttacacactctcatgttctcaaaagatcttcttgcagtgtgttcaatccctagcattttagtacttcaccagccaacttgcctcccatcatcccaggtggcaggggtgaggggagcctgaccatgaaggaacttgacctttctctgagtaagaggaacaattgcagggcttccagaaggagcagcatgattatgacttaggttctcatatgaacctaactggtcaaagcgcaatacaagatacggaaatgaaaagacaactaagaaaattttttgtttttacctgtttgagcaaacacacagcaaactgaactgatcagtccaatccagaaaattggttgtaaattcatctgaaatgtaaaatgtgccttatattagttataaagaaataaaatgaaaaatgcattaaatagaaagtattaccccaccgtaccttctattgcttttataaacatgatggctctcaaaccatttcactccagcccctctccacagaccctcgcccatctcccctccctatctggttccctcaccttgcacctacactgcgaaaataacttccataccagagccccagaatccattcgtgcctttctctaaagcaaaccgattatattttaacatttaattaacagcgctcaaaaaaaaaatcagtgttaagtattcctcaacaccataaaacctaccaatggtctcagcccatagaatctctatctccattatctcctgcggctcccaggggcccagaccagcatatccagatgcctcagttacctcaatgctgaacattcgttttcaaaaacctgatcaagtcatccctctgctaacaatgcgcttcatcagtttttatttcttcaggctaaggccaacatcctgcataaggccccaaatagatttttgagcttgttttcctattatctctcttttttaagaaaatcaacttctgccaggagcgctggctcacgcctggaatctcagcactttgggaggctgaggcaggcagatcacctgaggtcaggagtttgagaccaacccagccaacatggagaaaccccagctctactaaaaattagccaggcatcgtcgtgggtgcctgtagtcccagctactccggaggctgaggcaggagaactgcttgaacctgggaggcaaaggtttcactgagccaagattatgccactgcactccagcctgggcaacagagcaggactccatctcaaaaaaaaagaaagaaaagaaaagaaaatcaacttctatgcatgcaataagtaaaatactcagttttaatttcctagagtgtccagaccccccacctctcccccaacaaaaaaaaagagggcataagacaaactgaaaaagtcttgtcttctagaacctctaaccaaaaaattaggtaatattctatatactaaatacaactaccccaatttcctaccattaggtacatatataactattttctctgaatcaaagctttcacgatgatatgaatctatatctttgattggtcaaagatggctacggccactggttgctgacttgatcccttaactacttactgctcttggactagcagccaatctaataattatatataagtatctgtccctccacaagaagaaatactcaaaaaagcaaatttatacaaaaaaagtttaggtttaatcgttattggaaaatgtaaattaaagcaacataagatgaactagcaaaaatagaaagttttttaacccaacaaaactatagcagatggctgcgagaaaccaactggtagctctgtgaactgatacaactttttgggaaataatttgacaatttatatcaaaaaccataaaaaaatttctaccctctaataatccagctactgggaatttaccctaaggaaatacttaaatatataaaaggtgacacacatatacacacacattcagtatagtactctagtatattcacaagagcaaaaatgtaaatatcctatatccaataacagggaaatctaactgcatcaagtttagggacttattagtcattgcaataataaaatgcagcaacatttagagttatagagggccaagtgcagtggctcacgcctgtaatccagcactttgggagaccaaggcgggtggatcacgaggtcaggagatcgagaccatcctggacaacatagtgaaaccccgtctctactaaaaatgcaaaaattagctgggtgtggtggcatactcctgtaatcccagcttctcaggaggctgaggcaggagaatcgcttgaacccgggaggcggaggttgcagtgagccaagatcgcgccactgtactctagcctggcgaaagagcgagactccgtctcaaaaa

SEQ ID NO: 913763 - DNA, 4001 bp, Homo sapiens
aactttacattaagaaaatcacaaacacttaaaattgtaggtttaggtctgaagtcaacacagacgagttaaacaatctatttgcttcctgtttacagaattaaagtattaaccacattctttgtccttttaactagcattctaataacatcttccaccttcatactcaattttgggataagtaaaatgactttctccccaaatgcctgtaatgaaaataccaatgttttttatttaacacttcaccatcttcagtcacttatataatattgatcaatgagtcaacattatttaaaaatatgagaattatagtgagactctaagtcctaacccctctgggccttgatgtccacaaatgaacaggtaactgccaactgaagttccttaatcatttctaaaattggtctactgtataacctatcgtaaaggacgtatgtggtttaagaaaggtgtctaatctaaattcctctagcatgttatttttgtagcattaaaactacaattaaaaaaaaaaaaataaaaaaacctaagggccaggttcaggggctcacgcctgtaatcccagcactttgggagctcggtgagagaggacagcttgagcccaggagtttgaggccagcctgggcagcatagtgaaatcctgtctctacaaaaaataaaaaaattagccgggcacggtggcaggcgcctgtagtcccagctactcaagaggctgaggtggaaaagtaacttaagcctcggaggttgaggctgcagtgagctgtgatggctcttctgcactccagcctgggcaacagagaccctgtctcaaaacaaaacgaaataacctagtaattctacccacctaagttaaccatgtggcatgttggcccaaagaaaccttaccaatgatgttaccaattatcttccgagatatttttaacatctttttactataaaagaagggctgaaaaggagtcaatactcattgagcatctactctcaagctaagttttttacattttgcatttgattttcagaactatagttaggaaggttacttgtggtttaaacgcggactctggaactagaccccatgccttctccaggagctcctgatgaccacaggcaacttacttttgctccctgtgcctcagtttcttcactcggaaaatgggaatcgaaacagtaccaatctcattagagcggttccagaattaaataatacatgtaaaatgcctagagctaaacttggccctcactgtcattattataaaaatgaattattaatgtagatattactgttcctatttcacagatgaggaaacggaagcttagagaatgcaacttactaatgatcataccaatgagtgcaaagttttggactcaaaagcacgaatttgattaaataaaagttacttagagagtaggagtctcataaatccaatttatgaagcctaagaaatgacacgcggtaaaatgatactagacacaggccgggctctcaggctcgcggaccgggtctgagcacaagctggccatggccatgcgtcctggtcccggggtgcccggcagggaccggcgactcttgacgtttataaacacggggaagtggactgcactgccgccaccgcacccccggtccccagcggctccactaagccaacttctacccggctcccgccgcccccgcccgcggcgctggccccagggccgcctcctggcagccggaggagaccagtccccgtcgcgggcgccgacggctggctcgacgctgctccaaggacagcagctcgcgagggagcgagagacaaaggcaccggacccgtccaggggagcgccgagtcccaaacgccgagccccgggtggcctcgctggctcccacctgcgcttgcccagcccggcgggagaccgcaggtgtcaggggccgttcgggcccggtcccccgcagctccggcagccccgacgtgacagcgcccaggccggcgaccctcacgttcggaacgcggctgggctggctctgcgcccgggggctgccagcgccggggacccgaggcgggtggcggcgtgcggacttcctcctggactagcctggaatcctgccccagcccccaaccgctggcggccgcccccgcccccgcccccgcccccacccccacgcccggcacaaaggtcccggcgcggcccggccggcggctttaagtgctgccgcgcacaggagaccggaggccgcggcccgcgctcccacacccgaggcccgccggcccctaccttttccgcgcggcgtccggggcccggcgcggtgggctcgggcctgctgttccgcgactcccgctgggcctctcccgcgggctggcggggcctcccgggtgtcgggcgcggcgggtggcggcggctcctcctcctcaggggcgggaggaggggactcggcggcccagagccgccccccggcaggaaaccagccgcggccccgcctcctctgcgcgtctgatcccgctcccgaggccgccgccgccctctccctccggaaacgcattcctctcccgccgcgtcagcccggcccggggctaggaggaggcggaggatggggcaggaagtgcgaccgggacaaaggaaccggctgcgcgggagcgcgcctgagggaggccgcggggggcagggccgggactgcgttgagacagtcgccgtgcctcagtttcctcctctgcgaagggcgggaggagtcggacgcgccctagagccccgcgcgttcctggtgtagcctgctgggcccgtgttctttaagttcctcttcctcggagccgcgcgttcgaccctcgctcccgtttgtccactgatgtcccgtttcgagcccgggagatcctgcatctcggaagccccctgagtcccgaggcaaatcgggaccgtgagcccccctaccctgcagggctccatggggccaaaaaccacgtggtccttctggaagggaactggctaagccaggactgcttttctggagtgataatgtgcttgcctgtgtctaagagaaaggtgaagaattgggaaacccatgggtgtcacgaagggtggtgagactggggaacgttttagaaaacctggtgagttgcgtcctgcttttgatagatttatctggaggtacctttatggggaacagggatgagaaggaaaagtttcttcctaaggagtacagtttctgtttcacctcttaaaaaaaaaaaatttggagattggggctggaaacaacgtttgaaagagaaggaaacattcattatgagaatggctgaacgcatgtcgattcgatgattgaagtctgtaccagccaaaatcatactgaaacccagtaatttagtatatgctactggcaagctgctatcctggtagcagaaaatgctgtgggttccgcttggtgagctgcagcaccctgttgggaaaagagctcaaaaattaccagatttatgaaatagaagtgtttctcttgcaggagattagggactggaatgcccatttggctgctgccaatcaatataagagaaaatgaagcgatcacatctaagaaaatttgctcattacttaccagcaaaatcaaaacttgattagccaatctgaagacctctaggaaatgagcactatttttcccacttaatggatgttcaagcttaagaggctaaatgatgttcctatattaatatctcaatggtcaaactgccattagaactcaacattcttgaattttaaaggtatcggttttaccattgttcagaattcatcagaattggcccagtctcagcacagaaaactgtatagttcaaaagcataattggtccgtgcctgatttgcactacaatttccagaatttttttccctgtacgtgactggtggaggcactagctagtctttgctacaagaacattatgagatttacatatgcacaactctaaactaaattagttcctccaggacaatttactgagctttttaacaccaccgtcaagcactgttgcaaggacagataataggggctc

SEQ ID NO: 913764 - DNA, 4001 bp, Homo sapiens
aaatctagcagaaggcatcttaacacttgtcttcttctgccataatctctttcactttttttcccccttttgggagtaaaccttactatacctgatatctccggttctctgccaccaattgaaatttgcctggggccagttccacaagatcttcatagtctacaaacttaaaaaaaattaggattttaacttttttttttttaattatactgtaagttctggggtacatgtgcacaacgtgcagatttgttacataggtatacatgtgccatgttggtttgctacacccattaactcatcatttacgtcaggtatttctcctaatgctatccctcccctagccccccaccccctgacaggccccagtgtgtgatgttccccttcctgtgtccatgtgttctcgttgttcgactcccacttatgagtgagaacatgcggtgttgggttttcccttcttgtgttactttgctgagaatgatgatttccaaaagatctagagccaaagagatagctgttggtattcattattttatattctttcctctacctctgggcaatcacaattttgtataaaatgatttctttagtatatttctatttgctggttacgtctcagaggtgtccaaatggagggtaacaacaccttcgcatttgttggacatgggaattcatttttgagtttgccagcaggtggtaagacagagatcaaaacaacccagtgattaggtgggtgtctggggaagtatctgggtagaccctggaggcatttgcagtgtctgactggacagacatgaaccatacatctccccaagttaaaaatgtaggtattttctaaaaggaaatgccagttagaaatgactgaaaaagcacaaacacatttggatgtcttggcttcaatttgagatttctaacacactctggtggcttttaagtgttggaaaatatgatagtttcaaagcagacagagtgatattttccctttgtaaatatgccgtcatattctctggcatttttataggtaatccactctgcaagtattataagcctttgcatttgctgggatgttcccataacatgcttcgcttttctggcataaaaatagctcttgtatgactttcagaaacagactttcagtccaagactttccttacattggagatggctaagggacaaaagtggagacctgtactccatgggaattattcttgtacttttccaccctgcctgctatcttccgctttaataggaatacttaaagtgctcttattacaaatatcactgttcacttagatatgaaaaacagtgtgctttgataatgacttttcttatactcttagtaaaagagtgataatatttcttcatcatcataacagctagtaattattaagcacttactagtccaggcgctctgctagaagagtttacactgtgtcatttaattctcaaagcaaaccattgggttaggtctattcttacccccaattttttaggtgaggagtgagcagctctgctccataaatgctacgctctgatgcctgcccattgatcttgacttaattttcatgcaaaacctgttaatgctttaaaaggtaaatatacattccagtaattataacagtaaacacttgcactcagatgaattttatcttaagtttccattacacacagaataaggccattgaatagcgattccaatagatgatttactgagctcatgaacaagccaacagcaaggagtgatctgtaagtacttacttcagaaagtccatttatggggatttcgaagcctgatacttcagaaagaaagaagcagatgaaaaagcacgtgagtcttttcattttgctggacagttttgccaagctccccaaagcagatggtctggggaggatatcacttcttcctactgaaccaagttcaaaggaacagcagaggagtacagttcgctttaagaaagaagaaaaaagaagaaaaaactctctaactttgttcaaaattgggacaaatatttgttctggagctcaaacttgagctgtgtgggtggatcgaacacccagaggttattcaaacagcaaagtcagaagcagttgcttactgtgaggacaagtcaggggcagatggatgtgcttgaatgtgcttgtgtgcttttattttatttttattttttattttttggcttttgctgatttctattgatcttaaaatcagagagacctacagataattgtcatcctttctaaaggaccaagtgcagaactattccaagaaacaaaatcctttgatctaaatgaaagcaggaaaaatttagaaaaagtgggagaagacacagaagggtttttctgagcaaagaattcattgtgcatgttttcccctatctctttgatgactgtctacctgttacctataaagacccaggcaagtggctgtgcaggatactagggcagatcttcagtgagaatgcttcgtgaatgtctttgattaaggtaacagtgtctgtcctgctgcccctatcagccgggctcaggtcagtggcaaatcaatactccccagtctcagaattggagtgcagtggtgagatcaaagctcattgcagcctcaacttcccccggctcaagcaatctgcccacctcagcctccagagtagctggactacaggtgtgcactacactgcctggctattttttgtagagatgggatttcatcatgttgctcatcctggtcttgaacacctgggctcaagctatctgcttgcctcagcctccgaaactgctgggattccagatgtgagcccccatgcctagcctccatcctggtcagattctatttttcttgcaacaaacaggaaatgtaacttcttggatgcaacactgaaataggaagctccagctgtgggcagaattacaatacaagggaggttgtcttatcctcaggaccaagcaccccaggccaacttctgggatcctggagctccttgctacatttaaagcccaattcacagggcatgcaacagagagttttctgcattttcctccctagtttcccctcagtcttcgaaattgcacagccgtgtgtctgctggagaaacataacttctgaaataatggaagggagaaaacagattctcccctcccttgcctaggttggactagttgagcgcccaccttggccagtgagtgcctcagtggacccctcatggaaaaatcctgccacagctttgcattcttgactgagatactgtttctggagaattaagacccaatggcagctgggcgcggtggctcacacttgtaatcccagcactttgggagactgaggcgggtggatgacctgaggtcaggagtttgagaccagcctggccaacatagtgcaaccccgtctctactaaaaatacaaaaattagccaggtgtggtggcatgcgcctgtaatcccagctacttgggaggctgaggcatgagaattgcttgaactggggaggcggaggttagagtgagctgagatcacgccactgcattccacctgggcaacagggcaagacttggtctcaaaagaaaaaaataaataaataataaaaaacccaatggcatgttctcccaaaaacagcagtgactttcaaaatcatacctccttccattgatcatttcctttctgattattttaatctgatattcagaattatctcagaataaaccaaaccaaaagcaggctggacttttttccatgctgatactctgtcttcagatcccaaagtccttttttttttttttttttgagagggagcgtcactctgtggctcagactcaagcgcaatggcatgatcttggcttactgcaacctccacctcccaggttcacgcgattcccctgcctgaacctcccaagtagctggaattacgggcgtgcaccaccacaactaactttgtattattttttttaaagtaaagatggggtttcaccatattggtcaggctggtctcaaactcctgacctcgagtaatccacctgc

SEQ ID NO: 913765 - DNA, 4001 bp, Homo sapiens
ctctcaaaccctatatcacaaaaactaaatataaaaaagaacggattagggataaaaggtaaaattgcaagttcatagaactttataccttggattttttttcctgatttagtcattttcaagataaataaatattgtgctgggttgaagacagcatgaaatcactaaaagaggtcaagccatgtttttttatgacagcaagtccatagactgtgaagcctacttgaacttggtatatgctagagtttaaacagccttcctagttcagacacagaatctttgtttcagtccatcccacactgtcctgtctccacacccccaaaaaagtttcaagatctttaccctaaattccttcactcagcatgtcagcagcatgagtctaagaccatggccagcattaagtgctgacagtgttttaagcacttgggtgtcataatgcattcagtcctcacaaccctatcatttctccacatttcacagaagaggaatataaggccgaaaggcacttgatcagggtcccagagctgataagtgacagaatcaagaatcaagtggtcccagacatcctggtaccaagcccatgccttcagccatctactaaaacatctcccagttattgagcgtccactgtataccaggtgcttaacacaaattagctgagtccttgcaagtttgctcaaaaagagccgcattccctgccctgaccaacgaggacatgaaggctctgagagattaaagggcttgcccggaacacacaactaaagcccagcctgtctctgcatccaaagcctgcacttttccaacatcactacgatgcctcctgggattttattagctactccccccctagaaggaagtatcattactaccactttactgttaagcacattcacaggacagagaacatgaagataactgtcttcatatttaggcagttgggcttcaaaactgctcttcaaaacaggggctggaaaagggagaaaaggtccgcctacttgtatcttcctcccaccgtgcacaaacacgctggaagctaaacggcttaaatatttaaatggcatgtgtgtgaaagcacttctactttgtgacagggccatgttgcacattagctctcaatgctatttgtgtgaacccgcttcatactttttaaagacaaaaatgctctattcatcattttattgacatttcatatttgcaggttttattcgcctgcgaggttaagacatttgaaacacaaatcctgacaaacgcacagaccagcaactcgaggaactcagacgctttggctctcggtgccacctttaaatgctaaaccaccggtaggtagtcgctaaatgggaaagtcgtgttctcccggttttcaggtgggaaaagctgaggctcccaggagtctagaactcctctcatattgcctttctccctggatcaactgggaatgatgataacagcagactgccccccacgcgtgataaggaaaaaaccttgtaattataataacttttggagctacctcagaaattaacaacgacgaacagaaatctgcgcaatcaacaggagccaagaagaaaaactcggctccgcaggacaagtcccgggcacagttctgcaggaagcctcaggccagatcaggcaccgcggctcacacagaggtgacgcacgagtgacccacagagagggacccctgggcctctggtgggggcctgggagacggtcgaagggggcccgggcagaagctccgcggccgggccggcggagggaagggggcggccgcgcccgggacccggctcccctcggctccacttacctgctccgaagagtggccccagctctgcgcctcttcctgcgaccccacacacagggacagccccaggcacagccccagcagcaggagcatggcggggcgagggcgcgggacgctcggggacccggcgggacacgctttgcagcgcccagggctccagccactgcgggacgctctcggggccgcccaccccgcggtcccagcccggaccccgcccaccccacggacccagcccggaccccgcccaccccgcggtcccagcccggaccccgcccaccccacggacccagcccggaccccgcccaccccacggacccagcccggaccccgcccaccctgcggtcccctcctggactccgcccaccccacggacccagcccggaccccgcccaccccacggacccagcccggaccccgcccaccccgcgtcccagcccggaccccgcccaccccacggacccagcccggaccccgcccaccctgcgtcccctcctggactccgcctaccccggtcccagcccggaccccttccaccccgcggtccccttctggactccaactctcccaccccagcccagaccccacttccccgccccagaccttcccacaccctgcctccctggacaccccccaagcccggcctcgcctccctgtccccagtcaggacccagcttccccaggtccccaaccccaagctccgtttctccacgcccccatttccccccacctccccagtcccggccccacctctcctgtccctgtccccaccgaggccaacttcccagaccccacctacagccacccccttaaacccggcccgcctccctgtggcccccacaccagccccgcctcctccccagtccccaccccgcccggcgccgcttcccggcctcagtcccaccagagccgcgcctccagcccccagtgctgggctagctctgttcggggagaaggcattccaagcctgcctcgccgcgcacagcaggggccacctgtgttggccccacggacccctcccacaccctcccatcctgcggctgtgacacttaaccaaggaccagtctcctctgtagagcctcctactccgtttcttgccaacacccactgcctcccgggccctaccccacgcgcccccgcaactctttcttcctctccctcaaggtgcaatatgcttctttgcggacttgcttaatttctgtcgccagaggacgcgagaaggccagcctggtcctcagcacacagcccaccccgcacctgccagcctgaagccggcagatcgtcccctctgcattggccagggacgcttaataggcaggacaaaggatactacctgcagtctagcgcaggagggactagcaaggctgccagcctttatgttctaaggaaacagaggagacgagggaagtatcttggtagcgtgtagtatttctgagtttctggttattaatcatgtaagtgagtgccagtatgtatcttagttacaaactattggtgatacttccatcctgccattggaagaattcttacccaccagccgtccacacctggccttctacaggctgagtgcgtcttttttatctggtgatacacattgcagttggggctacttgtttatttcatgttgcaaaggatgttttttatgtctctgtgataatttcatctaaataggtgaggtgagtgacagaccctttaaggaccaagaacagggaaggggctaacttcggaccatggaatagagaatactattccatgcaggttactatggggccattaaataatcgtgcgacgtctccagaaacatggagaatgttgacagtgtaatctaaagagaaaatcacatcaccaaatcgtatcaacagtatgattgcaattaggtagaaatacatatggagggacataactagaaaaaaaaaacatgaaaaataaaagcagtgggtaggttagtttgtggtgagatcctcgaaaatatctattcttgttgaaatgctctttgtttaatgaattaggagaggttaaaaacaaacaccttgctactgtgaaataaatgaaaggaaaattattgtcatcagcagttaatcctttaatagcctaaccactagtcagcatgcaaccaataagaaacaactgtagccggttatttttccctccagaggaaagtaactatttgtgaaccagaagttgaattggacaaagccagttt

SEQ ID NO: 913766 - DNA, 4001 bp, Homo sapiens
gtatgtctttacctgtaagaactcttttactaacataaccacaaaaccattatcacaagtaacaaaattaatgctcaatgccctattattatctaattctcagtttgtatttaaatttatctgattccctaaagaaagggtcttggtatggttgatttgcttgaatgaagattagaagagtccccaatcacattccatttttatttcttgcttcttttaatctccagtgtctgcctccacctcttttgtgatgctgcatatatgtgataaatcgctggtcatttgtcctatgggatttctctttttctgtattcctttttttttttgagacagcgtctcaatctgtcacccagagcgcaatggtgcaatcacagctcacttttggactcaagtgattctctcacctcagcctgccaagtagctgggactacaggcacacaccagcatacctggatcattttttgttgttgttttttgtagagacagggtcttgctatgttgctcagactggtcttgaactcctaggctcaagccatcctcctgcctcggactcccaaagttctaggagtacaggcgtgagccaccatgcccggcttacggctcattaaaaaaaaaaaaattctcaaagctttttcacatgaaatttaggatataaattagaattacagaaagataaacagataaatggatattatgtaatttatgaaaacctagtgtgatgacagattaagcaaagagcatcccatcttttagtcctgaccttcatttcctgttagaacacagagaattatttagcaaactactcacgtttataaacccaaacaacaccatatctatgtacttagcaataaaaccccaaaagatgaggtctgcatgcaccctggagaacatgaaaacataaacaagaattcttaatcataagggcatgtggaggctttttatccagatattgaatcaaagccagacttaaaactgctgcaaagcctctgattatctttttaaatgtactcaagttgatagcatgaaataggctgaccagccatttcccatctccaattagcagaatgaaaaaggaaatgaggcgttaagtggccacagtaatttgtatttaaaaataaacttccttctgctgagggtttattagacacacaagtcaaaggaagtttaaacatttcctttaacaaaataggcaattatttttcagagacaatttaggtgtaaccttaacaggaaccacaaggtagaacagattcttctattatttgcacttatcaaggacagggattttggaagtgatcagagagccagcaaagagaaaaggttatttttgtagggagacagttacataagagagaacacgagtccacagatctgctcatctgaaggagttgggaaaatccagacagtgcatggacaggtggcacagcccaggtcactaccagcatggttgaagatgccttagacccattagacaggacaaagaaacgggtgctgaaaaaggaaaagtccttgaaattaaaggaaactgcatgctgtccagggtcaatctctcattggtggtcattgttaaagcacccagagtgacaggcatcataatatatcagctaagaacgcacgatcatggtcagaaacctgcattcaaatattggtttcacttcttaacagctgtgagactttgagcaagttactcggccttggttatctcatctgtaaaatggattaatgatagtaccaatctcacagtattgaaaagatcaagtgatgtcacgtacttagcaccattttccagttcacagtcagcagtcatgctagcttatatcattactgtatcagtccattttcacactgttatcaagaagtacctgagactgggtagtttatacagaaaagaggtttaattgactcacagttccgcatggctggggaagcctcgggaaacttacaatcacgcagaaggcaaacgcaaagcgaacacgtctacaaggcggcaggagcgagagacagaactgggaagcgccggacttttaaaccatgagatctcgtgagaactcactcactatcacgagaacagcaagggggaaattcacctccatggtccaatcacctcccaccaggccactcctccgacacatggggattacaattcgaaatgctatttccgtggggacacagagccaaaccatatcaatttccaaccttaactatataaaatagaaggaggggccaggcccggtggctcacgcctgtaatcccagcactttgggaggctgaggcgggtggatcacctgaggtcaggagtttgagatcagcctggccaacatggagaaacctcgtctctactaaaaatacaaaaaattaggtgggtgtggtggctgtaatcccagctactcaggaggctgaggcaggagaatatcgcttgaaccagggaggcggaggttgcagtgagctgagatagtgccattggactccagcctgggcaacaagagcaaaattccatcccaccaccccctacccccgcaaaaaaaaaaatagaaggagcaattacatatacaactataaacacaagtcaaacttgggataccacaaggcaataaaaacaaaagaactaatattgctatttagaacatggttgaacctcacagtcttcttgagtgaaaatatcagatacaaaagcgcatgttctctctgcttccatctgcataaagttcaagaggagcatgaaatacccatggcaactggagtagaacactgctgacctttgaaggcctgctcaggaccaggaaagagcacgtggtaattttgaggaagggtgaaaatattccatgtcttgaggtggaaggcagttgaatgagggtatacctatgtaaaattttatcaagctgtacacatgacatttgtaccgtttatggtgtatgtacaccccagttattaacatttaaatttattgttagcaaagtagattaaacaggcattccccggcatggaacataacaatgttatttgccaaacagacccctctctgtccttctccttaggatgaatgtgcatgggcatttattaaatgaggattaggtgtgtccagagcaattccagccggcagaattaggaccagggagagagtttccgggaggcacttttcagcgcagtgtcggtgaaccctaagaaagctgtcctgttgggatcggccgccttcacaacccatcccattagaagggctcaagtgaaccctggaataatcccccccacgagggtgtagagcagttctcacagtgtgatcttgaaccagcagcatcagcagctcctgggaacttgctagaaatgccaattctcaggcccaccccagaaactcggagtcagaaactctggggatgggactccgccatttgtgttttaacgagccctctgggtgattccggtttttgcccatagaaaataggcatgtagcttacacatggtctgtgtgccttacacatagaaaagtgtcaataaaatgtgttgtatgcaattaggcagcacttagattatctctaagattctacaataattagattagactctctttatgctgccagcatgtacctacttagtcttgcttccaatctcgtgaaaatgctttttacaagctccctgaattaataccattcatggctgagtaaaagcactggggattagaaagtataatttctctgtccatcattcactcgactaggctctttgatatggaccatgaggaaggatactgtatgattattttggcttcctagtgacctctggttttactagctcatgatgaaaattcatgagattcaactaaatgggattattttacacacccaaagaatgggttgattctcagtttggttactcaccaaggagcctggttcctgaggccaaccaccacccaggaagaagcagacagtaaatgtgacccaataaatttttcactactttttttttaagtttactgggagcaattccagaggagcatctctagaaaatag

SEQ ID NO: 913767 - DNA, 4001 bp, Homo sapiens
cccactgtcttaagccctcctggtgtgtggcaacttgttatggccaccccaggagactactgcagtctcaaagcgcaatgcaccctcctctctcccagccagctcccctcgctgaccttcctcttgttggggtatctccagtctccccagccacctctgacctggcctttgctctgcaccgaagcctggggattccacgtgagatggaatctctctcgtgtgctggccagcgtaggcctttggggtcagctcatctgagctctccctaacactccaaacccccagttagctccccaaccctgcacgtctcccctccccatttcaagggagtcttgtttccatgggacacaagtcagcgctttaagaatgttcaaggcctggcccaaccagcctcagaggacctcttggttccctctctgcctggcccggccacttcagatcatctcctgtcccccagatagctcctgcacctccccaccattcctggaaacatccatgcttcacccctctgctggccaaaaccctacccaactgacctcacagcaagcccatctcagactccacctccaaggagccttccaggatcccaagacaaatccctctttcttccaagggataggagaacaggggagggagagggacatatgaattaggccccactgagtgcaccaggtacctcatgtaggtcaggtggctctgtagatgcaccggcacacagcaggcacccaactgaggctggtcccatgtgtctctatccttgaattattgcatttaacccacgcagcaaccccgggggagggggccatcagcctcatgtccctggcaggagcccaaggtgctgagaggtggggcaatgtgctcaaggtcacacaacagcctggctccaggccccgtgtcgccctggtgtgcccgacagctgcctctgtctttgtcttgccccatcaccttcctcactgtgagctcctccagggcaagggcagggtcctgtttgtctttgcattccccagagcaactggcatagacctgcgctccgtgctaaggacacacactatcctgggggcccacagctcacaccatgcactggaggcaccactttcacaagacagttccccacaaatgcccaccacttgcaggaaggatgcctctcccacagccagcctgcaggggaaggtctccctcagcctccaggattcccatctccggtttctatgcgtgaatcacagtgacagcaatgcgccctcaccacttcccgttgtcctacattggcttggtctgggctcgtattcctccgaatttcccctagccctgtggccgcatctcacccacaagggtgctggtttggagagagcatgaatacccaccttggggcaggacatgccagagttcccaagagtcgtcccctttctctctctccaccccatgatctacacaccccctgcctccaagcagagccacaaacgttcaggcaaaaccacactttctcagtgggacagggaggggaggctgcacgcttagacgcaggctctgcacaatagcagacacactgactcaatggaaaggggaagggactggaacagaaccgggagtaaacacaaaggaaaacaaggagggaacaaagccctcccttggccactccccgcccccttccactttccccctttcactgagaaactaggatggatggaattaaataaagggccagcacccagcagccaccttctgtttgacccctggatgggaacaaagagagcccagcttagaaagacactctgcctctaggagatgggggaggatgaaccccccaaggccttgtccacgacctcggaaaggcttgttccccacctcagcctccccaccccactggtctcttacccacgtcctggcttcctgagattctaggccccacacagtgaaagaaatcccagactgttcttctacccgagtccccctgcggcttaggcggtacctgacacaaagcctgggccccagctgggctggggagagcggggaggggagaggaagagaagcgctgtgggcctcctgcacgcatgcacacacacacacacacacacacatacacacatgcacgcacacacacactctccctgcaaagatctaaaaacccctttcatctcaataaaggggaacagtaacagacacaaagacaaaggggaggccagcccagctgtaaaaaaaattaagagcgtctttgcttgtgctctgctgcaaggatctgggctgaacaatagagccgggcctctgccagccctcccacaccagttagtcagagcaaaccagtcctcctcctctctggagagcagagggcccacatggtaaggctaggaacagttagcaaaattgctcccagaagtacctatgactactcagagtcacactctctacggattgcacaaaacaaccctactatgacatcattttctagtcacagggacggagcaataaggtgtgatgcgggtgctccaccgaggctgtgctggcacccagtaggtgtccaaataatgcctgctgaatgcatggacccatgactcatatgtgcgtcagtcagactgaggtgggcagcaagcagccactgatagtgtcaagttcacacaggctcatttccactcctactgtcaccgagaaagaaacagcccaaagctcatcagctaagaagagcttaacagtttgcagaggcttagagaaccattgctaaggagtcaaactctggaatcagaaggcctgggtttgaatcttggctctacaacttgctatggcaatagtgtccaatttatggccttgtggaccatctcacagtcactcggcagtgcttggtaaatgatactgctgttggcactggtactggtgctgcggtcatgtctcctttttgatttgttaaatcgtcatggttgcatgttaaggagtcctctgggaagaagtgggtgaacaacatccctgcagctcctccagaagcctggggagtatgactaagttgtctcctccacctccttgtcttcttctaaaggccccaggggctgacacagaggaagaggaggaagtttggagacctaggaaggtcagcagcaccctcccttactccctccaatctggcatcattgacactgacagctcttccattaggttctgagtacccagctttggaagagggtagttgctataatgaatgcttgctgaatacatgaatggagttaggattgggaaaagaacctcactgcctttactcccaggagcaggaatttgaaattcctggagtgaagtggaaagctctggataaagtaacttctacattctttcttcctgggaggggcactgcagtcagaaaaacaaagtgctaacagtgtaagtgccttggaaaatcccttccagcaaaatcccttccagacgtagccctggagacagagacggttgcagccccgtttggtctggactggccttcatgtaactgcaggcagactcactgccaacgtttagaaaatggcccaggaatgaaccctgacacgttttctgaccctcagctgccttgccgtggacacctcccttcttgctcaagcttcttgtagaaataaacagaggattacagagtaagagaaggagcagagaagtaattcttctttcaggaaaaaactggacaagcctcagggccctgacacaccatgggagggtttaatgaattacaaccactgcatcccatttattgaggcttaagcattgcacaataaagctttacatgtatcattctcacatcaaacctctgaggcaggcacttatctccattttacagataaggcaactgaggcacagaggtgaggccactcaccaacatcatagagccaggatctgaatccaaacctatctgactttcaagcctatactcttcccatgaagccacgagctgtgctgctcagtgacctggtatctgtgaaacattagacatgtacctatggactttcctcacccggactgtttagggaagggtaggtgac

SEQ ID NO: 913768 - DNA, 4001 bp, Homo sapiens
tgggggggggggggcagcggggcattggggggtaggttaaagacagggtctgaactctgtcacccggatggagtgcagtggcacgatcctagctccaaccaagtgatcccaaccaagtgatcccagctctaagcctggaactcctgggttcaagcaatcctcccacctcagcctcccaaagctctgggaagacaggcagccacccagcccagactctttcctaactgttgatggctacctgtctctgctgatagctgtgaaaggaaaatacaaccttaggaccccaagctcaggatgccaaagggaaaagttaagcttgggaactcagtcatgcaaaaaacaaaaccgaaaacaaaactgcattccttttgttgccaaacagatagctataatttcacatgcttactttatcttacgtaaaatgtagatttactgagcatgagaagaatgcacccagggagagcagagagtcagtataactacttcatggttacccacaagtggagaaaatccgaaggcagaatggcccagagcagccgcaacatacagggaattagcaaacaatgaaagccacttaggcacgagggctggagggaggactcaaaaacacagcctattctgttttcgtaaggaggaaagacagtaatccacttttctgatactctattttcagggctcacctgggcctaaaactgcaccaaccacagatgaactttagctggcagtcagatagactcggtttgtaaaaggcaagagcactgggtcatatccaaaaaaagaacaagaaaatagaccgcgaccccgatttagatccaaaagaccagagtccagattgcgaccaatatctggtactctactgtttgtgaaatgagaccagtatctggtactctactagttgtgaaagggtgcttttctcataccagcagaggggcaaaaggcaaaatgaggcccctgcctggttccgtaaaatattttaccttcctggtcggtggctttttttttctttttctttttctttttttaagagaaagcgttttggatggggagtcccgccccgggagtcttcaccaggcggccagaatggcaaagtcacagggatggggttgagggtggggttaggggtgaaggggcagagagttatttgcagcccaagagcaagtctgcacagcgtgaggtctggcccactaatagtcccgaaagaggaagcggcggggattttatccggcctgaagcagccccataacttcactaccatgaaccgagaaaaaaaaacttcacgcctattcctcccttacaggaagggagggaaggggaaggggaaaagggggcagcaaatgagcagggcgaaccggcttttctttcttcggtagcgctctgctcagatgtgagaagtaacgggtcacctggccactaggaacaaaaatgtggtcccgctctgggctccgaggctgcgcgcgcctcgaggaggagctgcccgcagccctggctggagcgagcgcccgggacgcatcccccgacgcggcgggaacaggatgcgggaccgcgaggagacaatacgcccgcctgggcacgcgcgctttaagggaagggggtctccaaagtcagcccccacccgggaggagcaggcgcccgcgctccccacaccctcctgcgccccctctgtcggcagccatctccgacacagctcctccgagctcgcgctctccatcgcgcccttcttccttcagcacactaggctgccctgggacttacgattggcttgggtccccggtcccggtccccgccgcgggaggacggctccagcacaggctttgcgcgcaggtcgagggccgaggcgccgctgcttgcaggcggctgcggtggagcttgcggcccggcacttagaggggcgcgggcggcgatgcccccgctggctcccaccttctggcctgcagcggccggctctactgaacttcagagttactcatttcctggatgtcacaaaaactttttcctccttataagaacaaaacacccgcctctacccgcggccccggaagctccttaaggaggaccgtgtgggtttcggtggttgggcccaggatccgccgggaagaccttcccagtgagcccccagaaacttccccggcacggcagaactggagagtgactgggagagacggaatcaggccagtggagtaaactggagcgagtggacaggggcgcggggaggacgcccttaaaagtcgtcctaagccgcggagcggaaggggttaagtccttaccagtcggggagagttttctgcggcgcgttttacaagtggcggaattcctggggccacctatttagtctcttggaggaaaatataactctagacaaaacgccagcctttttctcttttgcagcttgaaaggattaaaatagcttactaccgtttttttttttttttgagaaggagtttcgctcttgttgcccaggctggagtgcaatggtggcgctatctcggctcaccgcaacctccgcctcccgggttcgagcgattctcctgcctcagcctcccgagtagctgggattacaggcatgtgccaccacgcccggctaattttgtatttttagtagagaaggtgtttctccatgttggtcaggctggtctcgaactcccttctcggccttccgaagcgcctgggattacaggcgtgagccaccgcgcccgacttttatgataatcaaatgcatggttgcttttctccgggattaaccgggcacaaaggagaacagtgaccggatactgtacgggacaggcgcggtagtttctggttactgttgtgacggtagatcaagtgttactacccctatgttagaaacgagagaactgaggcctggaggagcagcagcagcgttctggtcgagcttaatagtttatgaaatccataacttctattgtcttccctttgacctgcccaaatcctaccatcagtacaaaaggcagagcagggtttgaatgaattctccattaagcggctttgggggcaccaaatgccagtgaaggcacattggggaaattggaacacagtgtccaaaatgatcaccattgctactgctatttggtcttagatcacctttttttcgtcttttcctttaacactcgcctggaagactttttggctgagtctgaaagataaacaggcaatgagaaaatgttctaaaaatagactccctggcccttggcccagggtacttttgttttcaagtttctactgctgctcaaattctttccttacgtaagaggttatggcagaattttgggggccagtatgtgtgttggaggtggtgggggcgatctggggaaacggtcttgaaagagctgtatttccaaaatgtctagaagttggtccggtgggttactcacaccctccgcaaagcaggtgggggaaatttctgtgaagtaagagcgctgggctgagctttgtcatccttgggctaagagttcagcgttgtgctggaatgccaaggttagtgcttgaatgccctctgggattgtcatcccgtctgcaaagttgtttcagcaatttctaaccagccatgtatatttatataaggaatatttattatatttgttttgcttttaacctgatgatttcaccttctgtgttctgattggttcctgtctgttctaaggtccacccttctacctggcttgtaagtcgttcatgaactggcctctgcttatctcaccagcctcatatctcactctgtgtcccacacaaaactccttgcagttcttggaacctgtgcttcccagaacgtgatatgctctttgatatgctgtttgcatgatatgctttttctctccccttggatattcatatgtactctactttctgcctgccacagccaccccacctcctcctccaaactgtcaccccagtgcacatgcatgttattttgcccgactaattgtatgctcagtcttcctgtctcagaacaggcagttactccttcaggaagtcttcctggaacc

SEQ ID NO: 913769 - DNA, 4001 bp, Homo sapiens
gttggtggtctgcttgctgttttctcagtattgacacttaaaactttgtgggattctttatgccatctgtatgtgttctgggctacagtgtccagacagacgcctgaggtggcagaaagagtccaaggccctgggagagagcaaatctaaattcgaatctcttctctgttgttgtccgtttggggcaagtccctctgagtctgttctttcacctgtaaaactaggataacacccaccttgaagggccattgtgaggaggagaaataaatatgtgtaaacccctagaatggggctttgctcagtaaatgaagccactatttttttttaataaggccattctacttatatgaacaatgtcatatccataacggtggattctgcagattaatgatactctaatttttatttataaacctgaaaaagctaggtgcatacaagaattagggcaatgactttagccaccgaaatgctggacatcagaaaagcacctgaagttatgcctagttgcacaaaacaaaaactttaatcaggtgccttcaagtggaaggacaaggcgattcctgaaacctctacagagacacctactatatcatctagtttttcatctttcttcagggcagggagtcctccctttcctgcctctttcgtctcctgtgctgacatttggcagcccttgcttaggagaagcagcaggcatcacctgataagatgtggcggaaacacaggtcaccaagttaagagcatcagaactgctgagtgacctcagccttgtaaacagtgccatcccagggacaagatggacatccatggctgccccctctgactccactcccaaattagcaagtgtatctcaagcacacccaactgaaagcattccatgaatttagtttaacccatctagaattccacagggaatgctaagttgagtgaggtgaactgtgagacgggattcctatctccagttggtcctgcctcttggggcagtggattccatacactcttcctctccatgtgcatttcatcataacgctccacgaggccgctgaatccctggcacaggccatgcataacagatacacaatggctgctcgatcaatgaagcccccgtaataaggatgtgagcatcctatttctcactctcttttgtggggaggctgaagaatggaaagtcacttttctgatggccccatcactgctccagcctgcccttcccctaaccctccttacagatccaggctgcaggaggacccctaaggagtcccgttcagagaactgaaggagactgcagctgtcagcactgcgctctctgacccaaggcctaaagacccaccaccaactgacacagcccagatctgagactgcagcacctccctcttctattcaccctgccgctaactgggcccatcctctccccagcctctgagaaacacacctgtgaacgttacaccttctatgtcccttcccttcaacatgcgtctcacacttgaggccgatttttcacctccccgtccgccttagggtggaggcgttgccctgagcaacagtgatgtcacctgcagggtgcttccgtttcactgatgtcacggggtgggcctaacagatagaggggggatgtgctctctgtggggaaacgtcacaggtcctaaactgttgaggaggggtctacaggcctctggggcactcccaaatgacccctttcctcgcccagaagagctccttacccttccttcctctctggatgcctgttagagctcaggcctcaaatctgactttccctctgccagagtcagccaaaagatcaggatgagcagctccaaacaaactgctggaaagaccactgaggatagatgtcctccccgtctaggacagtctaggtccctacagccttgtcctttgtccagacctcagaggagggagcagtgacctgatggggaagttggggcccaagtcggcagagaatgcagacctccaaccgacctctgctgtcctgaagagcgcacactggccaggtttccagtctgcgccaggcacggtgctcagagccttctgtgcatcgtctgggtcaaccctccccacagccctgagggtcatccccattttactgatgatgttaccgagacttgaagaatcaaggcacctgcccaactactgagaacgcccaaccaccgagtggtggagccaggactcaactcaagtctgccccacttcaaagcccgtgcagtcacaccgccttggctctgggcacctggagatgtggctcattaaagatgagccatgaagggcctggacagagaccagaaagagccctttaaatctaaagaggccagctgagcagggcaggctgcctgaggcagccgaagcaggcactgctttaggaatgcttcaccccctggcctacgcaggggatgcaacaactggccagccttggcccagcctccatgctgattggggaccacgtgtctttgctctatgcttggctttctattgatccatccaggttaccggatcatcctcttgatttgcatatagcacttactctcatggcctggccctacaactctgagattgtacagtagttatcgaatttacgcaaatgcaaatctatgtctctgggagctaatgcttgcaaagcactaaacaaataggtaaataaaataaaaaattactacattatgagagaggaaagggagaaatgctaccaggatttctcagggaaatactgcccttgaggcactggccaaggagatgcccatagccaggctgacctgagtatccagtctacctggcagctatctttctgctggtgagagggccgcagaggtagacaaagccctgcactattggacatcactgtcccccaccctcaccccatgctgctcctgcctggttctgactccagctttgataagcgcagtccaccttctggtctttggtttcccatatggcttgtctaggacgcagggaagagacgacattcagtctgtgtgatgtttgcgaagtctccttgcaaattaataaaccagcattctgattcgtacaccctcttctgggagctttctcagggtgaatcagtagcttgagtccaaaccactctgaaaattatggaaattgggtttctgagcgggcacagctaagagccatgccctgggacaggtgacgtgatccaggtaaacaccaccctctgagcaatctgctgggcaccagctggcccctcccaggaggcatcttgacttcctcactgatgagaagcctattttgtttaaagtgcctatcgacagtacatagtgaaatgctcggttccagctaattaagcgctcagctgtacggtgtggaaactaagagatcatgtatatggaactgtgaaatggagtttcaggaagggttcttggacgaacttgagaagggcatttgtgggtgaatgggacttcaacaaggaagcaagagaccacagatggggattaggggtttggaaggtcaggacagttgtctcacctccttccactcgctctctgcctaggtcaggaccctgcgtgcagccaccgccgtttccctctgagccacacctgggggcacttactcatcaccctcatgccaggccccaaactggatctgccacctcacaccgcccagagattaaggaaagtcacttgattcttgggccaggctccccatcagccatcaaggcccggcttgcctcttttctttcctcctctgcctcctgccagatgaatttcccctccttcctccacctggactgagaatgggtatttcctcctttgacagagaaagaaaaaggcaactgttcttccccctttcccacgagggttcccaattaaactagctttttaagcttaagttgcttcttggtctatgaatgcccagtgattaagactcaccttccaggctctggaacacttaacatccctgtgcctcagtttcctcatctgtaaaatggagttaacaatacctaactcatacggctactgtgaggattaaatgag

SEQ ID NO: 913770 - DNA, 4001 bp, Homo sapiens
caaaatgcagagagggaagacgacagccatgtctgaggctcaccgtgcagcctggtctctccatttggggcaactccccattttttgacggggggcattagcaccctgaccttgtgctcctgcagcgagtcggggcctctgggccttgttgtttgggatttatgggcgcctggcacagagcaggtgctagacgcacatttactgatcgtgtccccatgccatcggccttctggtatccgagaagcgagactccccgagctgtgccccgaagcctcagcaacactcccccctccaggccacaggctgtgttcatccccattctacagaggagggactcatggcaggagggggaggaacgggggcggggccagatggtaaatattttaggttttgtgggtcaactccaaggacaatatgtaaatgagcaggtgcagctgtgggtttttttttttaaatcatttttatttctttagagacagggtctcgctctgtcatgcaggctagagtacagtggcacaatcacagcttactgtagcctcaacctcctagactcaagtaattgtcttgcctcagcctcccgagcagctgagcccacaggagcataccaccgcacctgcgtaatgtgtccatttttttttgtagagatgaggtctccctatgttgcccaggttggtctcgaactcctgggctcaagctatcctcccaccttggcctcctaatgtgctgggatgactcatgttctaatacaactttccttgtggtgtgggcaccaaaatctgaactacacatgatgatcacgtgtcacgaaacattcttcttcttttgatatgacaaggaggtgaaatcacaggagggtcaataagtcagaggttaagcaaccacccccaaataacccgactcccctccaccgccagaccatgcaggtcccaagagagatgcctttgatgggcaagaaacagggagggagagaactagggcctggagtggggacaccatccacgcgtgacccaggcccttccaagcccacggcaggcacctgccttcgttcccagccccttcctggagctgccttctctccagatgctctctccctcgccttctccttccaggaacctgggcacacttcttaatggctcctggggaccaggagatggaaaggagagggcaaaggtcatgctagaggtggaaagaggttcaggcgtgggtagcccaccccagggcttgtcttgtcttctggtcagcccctccccctgcttcagacccccacccccttggctgccagcacagctcagcacagcccaatctttcccgaggcttcaaaagccccaaagtgctgggcatccagccagaggccatcgtgggcctccccatcccccgggcttgcccctgcatctccacattcgctaacgggtgctgttcctccaaatctggaagctctaaaccgatggcccatccttttcctttattcccatgtgagagccatacctgcccactctgtttcaggtcagttccaccatggacactgcagtgggaaagtcagcgtcctttccaggtatggcaccactggacacagaccccaaggccctgcggcctcagatgggagggctgtccccatgcagcagaggataatttctgtgagctcagcgtggtttgcggtcaccaccacggcacctgtgcctacaggccctcaagtctcccactgcctgccgccccaccccccaccaagtggtctgtcccaagcagcctttaggactgggtgggggtttccacagggatctggccaaacccactccaggaagagcctctgggccccaggggaggcaggagggagggacattcaagggtggaggtctggggagcgcccaccttgctcttctcctgctgcagctcgatctggatgtctgtgagcttggctcgaagatcctcgttggccgcctgcagcgccgcgagggcctctgccttgtcccccttggcccggctgctcatgcccctcttggacatggtgaggctggatggccagggggatgcccaggggtagggtgctccggctgggctgggctgggggtggctggggtgtccacgccaagctcccagcaggtgtcacccgggctgctgtcacactacatcttctcattcacctggaggggaaagcacaccgcggtgagcagctccctccggagccgtggcctggagctcaggggcttgtgtgccggggcaggggcacgtggaccccccacctcattgcagtgctgaggatgctacctggacgacgcaggccagggaaccagccccagacctcagagcccatctgcccgccatatggtgcccccagacagggaccccacatctaagaggacatccccacgcccagcatgggatgaacactcagcacgggtgaattcttttccctcttaggaatcagagagtgagggagtgggcacccaacttcgaactcagaattctgtacatggctgtgaggccacatggcggcaatggcacatataaaccacgagctctcagacggcagagggaccccgtgaccgggctcctccacagagacccacaagctgcacccaggaaatgcccagaagtgcggaaagcagggactggaacagaagcgcacgcccagctcacagcagcacaatccaggtagctgccagtggaggcaacctgcatccatcgatggatgagtggctacacaaaatgcagaatatccacgtagcagaatattatccagctgtaaccaggagggagattcggacacacgctatgacaggaggatccctgaagacattaggctgggtgaaatgagccggtcacagaaggacaaatgccgcatgatttcacgtatatattcaggatctacagtcggcaaacccaggaactaagtagaatggtgggtgccaggggctggcaggagaggcaatgggagctactgtttaatggagatggattttctttctttttttggagatagggtctggctctgtgtccctcaaggggagtggccgtaaatacacaggaagcttccctccctcgcccactgcttgcctcctgctgtatggcccagcttctaacaggccacggacaggcaccaatccatggtcaggcactagggacctggtgtaggcaatcagtgatctccactggtcacagcaagtcctccaggttcaaccccagggaagctgctcattgtctaagaagaggtgattagacgaggctggtgagatcctcacactttccttctgtgctgccaggcacctcccctagctgttcctttccctcagaggctccccccaccaagctactcctctcccccaggtgctcttcccctccagctgctcctcccccccccagctgctcctctcccccaggtgctcctcccctccagctgctcctctcccccaggtgctcctccccgtctctgatgttcctctctccccctgatgttcctctccagcagctgcttctctaccccagctcctatgtcagatgctcctcttggctgcccagagggtcaaggacccccggtgctcctaacaggtccattgggctcctctgtggccctcctgctcctggggcctccttccatccccaccatgaccagctttccccgacagagggaaaaaagcacctttccctcttgtccttgtttaccttctgctcctgtcacctgttacagggcagtgaaggcagccaggatagaagggacaagcaggcagatcacacatgggaactttcccggtgaacacagcccccacccccacaactcctgctcccatttcctgatgaacacaggcccaccccacgcccccatctcctctcccggtgaacacttccccccaccccatgcccgcgtctcctctcctggtgaacacaggcccccatcactcctgcatctcctctccggcctggtgaacacagccctccccccctactcctgcatctgtctccagccccctatttatcagtccacaggaccatgggagggagacttggac

SEQ ID NO: 913771 - DNA, 4001 bp, Homo sapiens
aaatgagaaacagtgaatatgtgtgactgctctactttaaggaaaaatgaaaggcaaacaacatatgaagtgatattaaaatacaccccggtttttttaactggcaaaacaaccatgttaagtattgctaatttttgtattagtctagtacatttcaaaggaacattataagtttaaaaataataaaaaacatatttaaataaaaacaaatgggtcctacagctggtatgatgaaatttgtagtaaatagttcatgggtctaggtgcactggaatgtaaagaaactagaactcatgcataactaattcaacactctaaagatatatcattctatgagtaacttccacagcctaaagggaagcaatgagctaacatctgatgaaagtcacagtagaatatggccctaatcacaaaagactatcattcaaatgctctaaaaagcctttgaaaaccaaaatgaaaattactaacactaaatgttcagttgaaacaaaatgctttttcaattttattagagtgagagttttttttaaggtcatttatcagtgttaaacatactttttaaaaatagtctacggccaaaataaatatagttgagagcctgcatttctagtagggcctaccaaactataggaagaatgcttagaacaactgtatcctgtttggggctccatgctgcaccacattccattcacatgaggaagacgcgaacagatgagccctccccgaaaaacatttttaaaataaatcagctacagctcttaaacacaactcagctgctcaaacaaacgatgttaaagctcaccatttcacatttaacaggaaattcaaggagcttatgtctgcagtcttagtttctaacaatctccggttaacagttaacaattccaagttaaaaaaaaaaacaggcttattaactgcaaaaatactaatataaatctcaccaaaggtaaatactaaagcagaaaacaacctaagcaacattttagaagttaagatttagtctaccaaaaaaaaaaaaaaaaaggactggagtgacttgaaagaacaaagtccaaattcccacccaagcaggtctattgaaaaacacgatactgttagaaaacaagttgggggtggggaagggaataaccaaaaaaaaaccttacaaaacaaatacccccactttccttgaaacactagtctgaaaatcctaatttgaagcacttctgccataatactttaaacaattaaactcgttttttaacatttacagttattaaattactacaaacacaataaacctttttaaacaaatgaaagttaaaaattcttaaaactaaaaacattgaggccagatcttttataaaaggcagtgaccttaatttctcaggctgagaagaaaaaccaaatgtaaattaagacaaaagaaaaaggaagcagaaaaatacaaaccgtactttgttcttgagaattttaaagtatctttaaatctcagaaatccacaacaaggctttaaaggtcagtaagtatttgctgaaatttctattttgttctggaagagtatctagtgtaaatacttctttagtcttcaaaaatcacaggcaaatggctctcaaaccaagcatttctgagctcacttgcagcggcgtcattgtataggaagaaaagccaagaccacagaacgaagcaggagctgtaacctaacaagtctccaacgagcaaatgacgattttctgtctgctctggctcagccctggcagtgatgaggattacaactcgctctttgtcatcagcactgtggtgttaacgactaagaaatcctgcagctgaagcactactgcatcctccgatctgggtcaggataatttctctcgaggtcgcttacataaccagtaagatactccaaataaagagaacagccatccatcagctggagaaagcctttcccactgtactctgtctgcgtggaaacacagtgcagtagcttccaacagtgcagacacccaaatgagaacgagtacttggcttagggcacactgagagaagggaagaggcggtgctctgtaaactgtaactaatcccccgtcacaggtgctgatggagtcacttccagcacgagtcacattactagtgattactcatttggctgcggccatagagactggctcataattttaacaacagacaaagacagactagtggcgagactgaaagctcaagtttactgtctccttcataaagcaaatgcaaatactaagtttttgctttccagatttaccaaggtgagaaagtgcagaaaagaaataacatgtgactatctctcaagttggtaaaaataaagcatcaaatatactttgtatgtttttgggcacgatttatttattagtataaccattttgccttaaaaatattaaaaacttcaaaataaatcaatttaaaatatttttagacaatgatctcaacaatctcataggcattttactaaaaaaaaactggtaatatttattttggtagatttgaaaatattcctcaaccattttcactcattacaaaaaacaacttaacctagatagttctaagatacaatttgaaagcataaaatgcatttctcagatgtgttatataatatagtctcttaacatctatctaaattctagagttctgctgtctgatgttgtccaatatggtagttactaatcatatgtagcaactgagcacctgaaatgtagttaatctgaattgagatgtgtgatgtacaaaatacacattgaatataaaaaaaattaagaggtatctcatgaataattttattttgatatgctaatattttgacatattgggttaaataaaatactgtaaaattaatacacctatgttaaaattttgatgtaaagacaatttaaaatcacacatgtagctcacattttatttctactggacaagaatgctctaatagtaagttctctctctattttttggaggacgtagtcttgctctgttacccaggctggagcgcagtggcatgatctcaactcactgcaacctctgcctcctgggttcaagcgattctcctccctcagcctcccaagtagctggcattacagggacgcaccaccaagcccagctaatttttgtatttttagtagagacagggtctcaccacattggccaggcttgtctcaaaaactcctgacctcaggctatccacccgcctcggcctcccaaagtactgggattacaggtgtgagccactgtgtccagcctcttctttttttttttgagacaggattttgctctgttgcccaggctagagtgcagtggcgcgatcttggctcactgcaatctctggctcctgggctcgagcgatcctccgacctcagcctgccatgtagaagggactacaggtgggcatcaccatgcctagctaactctttgtattttttgtagagacagggtttcaccatgttgtccagaatggtctggaactcctgaacttaagcgatccacccacttcagtttcctaaagtgctgggatttcaggcatgagtcaccctgacaggccttatagtaatttctcgtttcatagtggagacttacgtgatgatatgagactgactttggctactcaataaatcaaagagcagagatggaatggaatataaatttgtggctctatgtaaaacatcaggttatgtctattaatttgtcagtataattaaattttaacctttagagcatccagcgaaaatttgtaagtttctgacttagagcaggaaagctggccatatacttaagtcaaccacgcttctgtattacaatttaattgaaatggtttcagttttattgtagaaattacatgatgaaagaggaattatatatggtaacatgcactgaaactttaaaaatacacttgtaggtgcaagaaatatttaatttattttaaaaagatgtatgtaaatagtcttttttttcttttctttttttttctgagacagaatctcactgttgcccaggctgga

SEQ ID NO: 913772 - DNA, 4001 bp, Homo sapiens
cagatgagggggtctcacctatgttgcccaggctggactcttaataagtcctgggctctagcaatcctcttacctcagccttttacacaaacaaaaatagttactgaattgaactgccataatttttagaaccactaacatcaccaatactttttaaggaagattatacatttctatacgaaaataaccagccaaaaccttcaaaactacctctattttctgttagaaatacctatcagcaaaacacacctattttgcgatatcgagtcaatattaatacatgccgcattaaccatatcattgactacagtgaggaaaacccgagtttacaaaaacacactcagaaactattaaaataggtaggtaaaaaatattaggtagatacctgtacaaatattacaatgaatttggaattgtaagctttcatgcacacaaagggaaaaaaatttcctaaatttgaagttttcattgaaaaagtaaatggctcagggcattacaaataaatttcacagattacgtattcataaatcaacctttggaagtctagtccatgtcttgtctctactccgccccttaccttcaagctgtccctcagtgagaatgtacttggaacacaacagagcatattacagctcaatatcatgcacatacctacgctactcaaagaaagcactggcagcgtcacatgtaagaaaccaaaaaaaaaaaaagataatcaattctgcatggcatttaacattttaattgacaacatttttcgtcttatttaaaatcgtataaaacccagaaacagcttgactccaaagaactatacctttctaacaagaaaagcacattggggacagaaagagagattaccctccataccaaaatttttcacttttatcctttacggttagaaagccaagcatctattaaggagaggatgaatccgggcacagccaccaccacggcctctgcctctaaaacacataggaatccccggactgtgtgggaaggtctcttttcttttctccctccccttcagcaaccttacaggataagttttaagtctcgagctacagcactatgaagacttttccaagaaaagagataccagggaagctggccgcctgtcgccatgagtggtccgccccctacccccacctgcccgcgcggcgccggactcgcggctccgcctttcggggaggtctccgtggccgcccaggcgccacagcggggagccgcggtcgacccctccgggatgggggccagggcagcctccgcggctatcccgggagtcctgctccgacaccacctccacaggggaagccgctcggagagacgcagggacccaggcaagggatgcgggcaaacgcgccaagggttcagcagaggggcgtgaccgccagttggccgggctgagcgaggcgccagagggaagcctgcaaggtacgtctgcgagagccgggtgcgggcgcggcaggggaaaaggggggcgctgactctcttaccgccaggtccggattgcggctgtccctgtgtgacacggctcggatgacccccgctcgccagcttcgccagccgcgtccgctctcccagcgctccgaacgtgcctcgtcgccgaccgccacacacaggaaccgcttacccaccagctctgcccgcgtctctaccgccatagctgtcgctgccgaagcggccgctgcctcctccagtgcgagggaaccgatgaaacctcactcctaccggccgctcatgctgaggagagcggaccgggacacagcagcggacccgaaagagcgcagactcgggacgaaccggccgctctgccccggacacagcgacctcgggccctccccgcaaacactcctttggactcccagattcgcagccttgtgctgcagcgccacacaagaaaactgaaacaaaacccaacgcggccgtcgaagaccccgaggcagcccagccgccgccaccgcgccgcggccagtactgctccgtctccctccccgggcagcggcggcgcgcagcgcgtctccttccgccggcgcgggcggggcagcagccgcgggagggtcggcggaaccaccgcagacggaaagtagtgcccggccctgcggaggcggcagcggccactgggtccgtccagatccagaggcggcggcggcggcggcagcgggagacgaaaaaatgaagagggccgcgggaaagtaggcgacagctattcaaagcttttgggggtctacctttgtattcgttgctccctcagaggtggaggtgaggggaaagtgaagtgtagtggttccactctgatcacaaaataaactcctgggttgacgcctcacccgcggtttgatgttcagagcacacagcgcccgccgcctgagttagcctgaattagcagtcccgcagtaacagcagcagagcaggacaacacttctactgaaaactaagccccaaagtcacagcagaaccaaccgttcatgacttcaagggaaaacgagggggaaaatgtgatcctttcattcttctcatttgtggtgatactaattacatgtttaagctattcacagatttaaattcgtcactgctttattataagaacagcaaatgctccgtggcgggcccttgtcaacgtcctgaaatttcacaaaccgtgtctgcgacagtcttagtacttttagtactggtacacagctcaaacacactggtcagataataaaagcagagaaaatccccagattcagttattagaaaataccatggaaagaaaaggattttagccaatcacaattcaagaaaaaaaatatttatttcccatccaattacaatcggactccctaacccacacaaagatctctaacttggaacaatcactcttctttgatcaacttatttgttataaatcaaacctccctacaaatgtcagtgagcagttcgatttcaggcaccctttatactgcttttttataggtagtccaatattctaaatttcagtttcttgagattttcctgaacctctatttaaaaaaaaaaagttaacagagtttacagtagtaatctgaatgtttaaaataactataaggcttttatctgttttctctagaacactcaagctgggcaatttgaagtggagaaacacaaccactgctaataggttagaaaccaaaattataaggaagatggattttaataatcatggtcaaattttgccaaagaccaaacatagaactgtaataaataggctgggcacggtgcctcacgcctgtaatccctgcactttaggaggcagatcacctgaggtcgggagttcgagaccagcctggccaacatgatgaaactaaatgtatttttagtctctactaaaaatacaaaaaattagctgggcatggtggagcatgcctgtaatcccagctactcaggaggcagcaggagaatcacttgaacctgggagctggaggttgcagtgagccgggatcgtgccactgcactccaacctggtcaacaagagcaaaactcagtccccccgaaaacaaacaaacaaacaaaaaacctgtaataaattaaaacagcaaaacatacccaaaaatgcatatcggcaagttgagagaaaaaattttgcttgggcaattttatttccaagtccactttttcagtgtacactgtataatacttagcaaattatcttaagaattacagatgaagatttctaaaatcagtgtagattaaggaaccagtaaagtgacttggtgacaataattcaacatatgtaaggataaaagagtagggagatcaacatccagataccaagtcatcaatgatctgctttgtgaccatgggcatgatgcaattgtaaaaatgcaaaaatgcctgaatcctaattttcagtgatatcctaggagcaaacgaaaaatacaaataaagtcatttgagaaaaacatgcaaattcatcagttattacataaatcccactcaccaaattacattcttaagagtataggttgctagttgccttatat

SEQ ID NO: 913773 - DNA, 4001 bp, Homo sapiens
acacaactaatttccatttgctatttccaccttctgtccatataggaggggccctcatatgctctaccctgaatttccttggtacctccaaccccaaacatacttggttcgttggtcttcatttcctatttcccacatctgtaattctttatcactaccccttcacaacttctgtctaacactctctttaacacgtcccaacaccttctaccaattacagggcttaaactccttcatggggcataggacaccatttgtaatctaacccctcctctgcctttgcctggtcatctcctaccactccctgcactctgcccacagcaaagtactagcaaattcaaagctatgcaaaatgtcctatcccaaggtatggtgcatgtctcttcctgggataccctgctgccggacactcccttgaagactccagatcaagtttaacataatgaatccagcgtatcacgggtcgccatagctcacgtctgtaatcccatcagtcaggcagaggtgggcagatcacttgaggccaggagttcgagaccagcctgggcaacatagtgagacccttttctcatttttataaaaaataataaatacagcctatcaaacaacttgtctcccaaactaacacctttctctgccccatcctcacccctggcacagtccaccaaatcacattcaccgaaaattactgtacagctccacccactttcttcacacctgccgccttgtcccacccctaccaatcccttgtccccaggagattttctgccacagattttgcaagttctaagcagcctctctccccttccttcatatttaagtttgctctgctgtcttagcatcatctttcagaaactctcccaagcacaaccatcccatccttccacgtttttaaaaaatacttcataccccaaagctagcaaacctccttcttattccaacatgcgatccacccagatacctctttcccatcactgcaatcgtacctgctcctcacatgcgcctcaatgcctccccaaacccctcaacgcctccccaaacccaacactctgcaccgcttcaactctactccacatccaccacacccaaacccacctactctgcgcccagacaactgcaatctcgccttcggtatcatctcacctgccctcacacacccctcggtccgccttccacttctctcaaattgcatccctccctaactctccctctgcacctgcttctacaccttcagcttctcctcccacccaaccctcactagtcttcctcacaccctcgccggccccccaccgctcctaccagttcactcccactcagaaattccctctcagcccccgccttccgactccccgaaccccgcccccacccgatcccgccccgcccccctccgccctcgagccccgcccccttgccctagagccctgccgaggggcggggcctgtccctcctcccctttcccccgccccctaccgtcacgctcaggggcagcctgaccccgagcggccccgcggtgaccctcgcgcagaggcctgtgggaggggcgtcgcaagcccctgaatccccccccgtctgttcccccctcccgcccagtctcctccccctgggaacgcgcggggtgggtgacagacctggctgcgcgccaccgccaccgcgcctgccgggggcgctgccgctgcctgagaaactgcggctgccgcctggaggaggtgccgtcgcctccgccaccgctgccgccgccgccaggggtaggagctaagccgccgccattttgtgtccccctgttgttgtcgttgacatgaatccgacatgacactgattacagcccaatggagtctcattaaacccgagtcgcggtcccgccccgccgctgctccattggaggagaccaaagacacttaaggccacccgttggcctacgggtctgtctgtcacccactcactaaccactctgcagcccattggggcaggttcctgccggtcatctcgcttccacataaacacacccctcgacccatcatccccccctccggcaccaccccgggggagggtccactgccaataccaatcaacagaccgctgggtccgcctcttccgggcacctattggtccagccctttttctctctcctagataccgcgccacctctacttccacctacccgccccctccacctctaggaaaggattgggtctactcgcagcagaggagcgtagccttattggctgcagacgacgccaatcaggaggccttttccctctcccctcccccactcaaccccaaaccccctagcccgcagctaaagtttgtgtgagagctgatcgctggcggcggccgcaggatttaggggtgggcgcgggcgggcgcgcgcgggcgggcacgcgaagttaaaattcgaggttctcagtcgccagctccttcggtggagtgtgcggacgggcgcgccgcccggagcgttccatcccgccccctcctccaccctctctcccgtcccgtcccgtcccgggcgactactcgcccgccccctggctcgcatccttccccccccaacacacccctaccctgccagccccaggccgggtgcaggcagaacgatgtcgctgcagcctcctcgccatcccatgcctcgggggagcaagcccctacccaccgggcgtgcaccccccggctccacactcgcccgtgtctgcaagcacgtgcaccgctcgccgctgcctccggccacccgggtccccggctaacctcgcctgcagcccggccaatcgctcgctgccctttgttgctgcagcctgggtctccccgctgccttcctcagcctccgcctcgtcctttgccagccgcccgggtccgcagcgccgcgctccccccgcccgggacccaccgccgccgcctccttctcctcctccgcctcctcctcctcggctccgggctgcagcgcacagagcccgaggcagcgccgcccagccccgctccccccgcgccgcccgccagcccgcccggcctggccgggggcgcagcccggaccccgcccgccccagtctccgccccgggggtacctgcctccgccccggggggctcctctcgccgccctcgggggagggcggagacgctggtgtccgcgggaggatggggacgcctgggccgtttggggcggggagtgtgcccgccagggctgggactgaggtgcggtcctcgccaacgcgtccccactcccgtcgctgtgggccccaaacttcgtccttcgcccaggctttgcgccttcgggcgatcgcggcagttttggggtgggggacgcctcgggagctgtgtctaccctgatcgggaggaagagggagcagtgacattcagcgactgcggacagggcacggcggcggcatccttgtgtgggagtggggatgtcagacgcgggctggagggggaagctgccccccaggatgctctctccctgcctgcgaggagctggcgagctcagccgcgttctgggtgctttcttgggcggtgcaggcggatggcagaggggctgaggcgggaggggggcggggaagaccgctggggggcccttccccccctctcttttagccagcgctgtaaggaaggctgatggcgaagttcggttttccaggcttcccctgggccccccgagttcctgaggcccacttgagggagactgggggctcctctggccgcccaggcgaggccactctgacgctgcccacatgcctcccagagctctctggactctgaagagagcgcccctggttctttccggaggtgaatgggatgctggcaagggagacttcagaaaataggaaaggtgggctgagaaatggctcctagagagtttgagcacgaagtttccctcccaggcgccatttctttgagagggggaggagaactatggctttgcaaaagaaccaagtttcaggcatggtggcctgggtggaaaaccacctgttgcctgaagtctgtccctggagtcagggccatcttgggcctgggcatgg

SEQ ID NO: 913774 - DNA, 4001 bp, Homo sapiens
agggttttatactggactcgaggcctctatagccttatcttttttgctctgctggccagagaccaatgctgtcaggggtcggggagcagtgcctctaggaaacctaagtgctggggtgggggccccgggccatgcgtacccgattcgcagggccccgggtgtgccacagtgaggttggcatcgggccgagcgcgggccgcctcctgcaggcggcagatctgggagtaggtgtgaccgtcggacccgcagagcggactctgcgaacgacaggcacacagaggttccggcacctctccgcggctcaggtcgccgcctgtgtccagccggcactcaagctgctcgccgcagtgcccgtagaagtgagcactggggtccaggtcgcagagctggccctcgaggttggcgcattcccagcagcagccgcacgcgtcgcgcaccctgcccgccaggcagccccgcggcgcggcgcactcttctggccggcagggagcgcagccctcgccctccgctagcagccgcatccagccgcgccgcaggtaatctgggcctggggatggccttgcgccggtcgggggcggcgtcagcaccaccagcagtagcaggagcacaggcagcgccaaggcagctgcgggccgcggcggcggcagcatggttagcgggaagccctgcgagcactcggggcatcagcgcgttcgggcaccctgccaggaagggaagccaggtcaggaggtcagaaacagggcctgtgccgaaagaccaacctcactgcttcttgtaccaaagcatgacactagcatcgccccctcccctgctaccaagtagcctcccccaacacacaggcctagtgaccctctagggattatccagttatggcagttagcaatcagttgggctgttcttgggagggctgggagtgaagagaggtgaggaaagggtgataaggctcaggcgcacgcacacccaccaccagcaccacttccgtgcaccacccgactccgatccctggcccctgagcatccttgcccaaagagaatgggtggctccagaagtaagaagctgctaatggggggtgagaactgggggggctgatgccgcctcgcttatggcctggggcacagagtgctcacctagtgtccggaactagacccttcgcagcagccgtgattcgagtccgaaagaaaaggttatggaaagaaagcagaggcgcagtcagccgggcccgccggccacctctgctccgtcctgaggacttctgagagagcccacgaacttggattcagaaagcagctcctccggccccctctctccgcccctcgacttcgcgcacccgccttcccactagttctaaggctgccaattttatgtagccgcatgggaccctcccgggtcatttcccccagcctggcccaaagtcacaatgcgagcagaggagccgtaaccagacaccgaggctgggagagaggaagggggtgaggaccggaggcggggagtgggggtaggagtttggctgggaagctcaaagtgttggctgaacggctaggccctgtcccatctgattttacagtccctggcgtcggcgagggcagctgcataagggggaggcggcaggagctctggtgccaagtcattttacgtcgatgtcggggcgctcctggagggcaggaccaaccaccttcgtctccccgcagcccagggctggttcccgggagcgaccgcaggcttgcccacccagctgccccaccaaggcgcggacagactgggcgcctacatccgccttccctcatctggcctccttcttcctccccacatccggcaggtgctgcgacccgcgggtgagccgggtgattcgaggtcggagccgaccagcggccgcagggagaggcgggctggcgcctccccggcgggcgtccctcgggtcgggattacaggttacggttgcgaggctggcagggccggagacactcggcctcgcggccgccaccaccgccaccgtggcactttgggccgggggcggggaggagagcattcctaggggcccgccagccaaacccgggtcgggcaggccccgccccggccggccccaagcggctcacagaagccttggcgcagtccagctcgcggggggatgggcgagggtggggggcagaaatagcaatctgcagccggcaagggggcggcacttagtcaggctccgcccacaagacccggctgccgtccccgcccgcctgcgcgggatcgactccgcatgcgcactggagcctcggaatacagccaggactctcccgtcggaatgcgcccctaagttgggccaagcccattcattcaggggctcccgagccacgtaggcgccatccctggccagaggggttctgaggaggtgggcaagggcagacactctctcccggtctcaaattcgaaatagggactagaagggaacttcacgcgaggcctcgcaactgtcgcgagaatcagaacaggaaatctaggaaccgagaacactaagagcccgcggattttaaacaggaaaaagaaagggcggagcaaactctggcggatagttgtgagtaatccctggtccttggaataagtgtcgacctgagacagaaggggaactgtcagagagctgccggagaccctgaaaaaggccagagacggggacttgtggggctgacgaatggaatcacccaaggagaggtctctgactctaacaaaacaccttggggacggagctccttggctgggatacagagcagacaagtccgggatcttttagtgaattgctgccggcttctaaggcctggagcagatattcaacaacaaactccacggacctagaaactctccacttatcctactattgtagacggtggcttacttttagtcttccctatgctctaagcttctggtagtaggaatcgtgcctaactcactactgtatcttgtgaacctagccccgcgcctggtggcacgtcaaattctcggtaaatatttgtggattaaatgtgaaagactgcctgagtgtttaacctggattttctgagtcgctgatggagaacagtaggtagacggggaaccagcgccctctggtgggcttgtggttcgtgacgagaacatgctggaaccgtgcatccaggtaggcacaaagataataaaaggggatccgctgttattaagtagagattttgttacattaaaaccctacataccgtaaaaatgcttttagaagggagttttttgaataggacacaacttgaaagtttagatacattccccgatcctcaacatcccatactttatccatcaaggctccaaaatattcagtaacacctatgcgcatcatacatagtaaagagatagcaaatgattttgcgtatatatactttgaaaatgtttactcggttttgtgcaaaacaggccaaagggaagggattttctagcctagatgatgtgaatactgctagggagaggagccaggtggcagcatcctttgcatttaatgagggagactagatccagatgggcagggtgaagttgaaatttgttgaataatagatggtcccgcctcttttttccccttttcctgcagatgcttgtattgaagaaggaatgaggtatagaatgtagttttctttccactgtgaagccctgtgttcacaagattatcatacgttcactttcagtcactgacacatgaaataactgaagtataatgacagaatgatgagctggagtgtggtggtgcacgcctgtagcaccagctacttgggagactgaggcagtaggatcccttgagctcaagggttcgagagaccatgtctctttaaaaatagaagtttagggccaggcgtggtggctcatacctcttaatcccagcactttgggaggcggaggcgggtggatcacctgaggtcaggagcttgagaccagcctggtcaatatggtgaaaccctgtctctactaaaaatacaaaaattagcccagcgtggtggtgcacgcctgta

SEQ ID NO: 913775 - DNA, 4001 bp, Homo sapiens
gacagtgggtcctttggattccatccagctctgaggcacatctggcatggtctctcatctggggccagcctgagtggctcccctgatcctgactagggcctccctagggacagtgatgggggatgggggaagacacatgctcaaggcacctcatcctagtcccctcccccttcccaggtctcaatctcactcccctcaggaaggacaaggatcatggcctccctccacctccccagctttgttttggcctcagggagacagcctccctcctcccactctgctggctttctagagcaggctgcacaatgagagacacaaacacatacatggaaatgtacccagggtgacacagtcacctacacaaacacatggctcttcctaccaaacccaggaacatgcacatgcacagatgtactggcctcacatacctccccatgtgggaaagagaggatgcccgggcagccaagtggtttggtggacatgcaggacaccacatggcacttcccaggcctagagcttctagctctgtctctggaggggaaggaagaggatgtgttttcctggggtttgagtgaagttctgaaaggtttgttgggggttgaaggattcagttgtaagaataatctcagtacatgatttggtgtggggagagagggctgacccagcactaactaaagcctccctacaggggccaggtgctggagccataaggtctcttggaaaccagactgggcagctgaacactaaagtccctccttgggtccacctgggctatttgtggaaaaattggtgaaggagtggggtgtactaaagacccctatctgtaccaggaagccagagaggcagcagggatgagacacgtcatagacactcacagagccccgctgcagacatcaccacatgaaagtacacaactagcactgaacactaatctcacaaccacaaaacacaacacaacctactttaacaaattcttgcccagagggcttatggtcatgaaggcttacaaagagacaagccaccctaaagtagagccctgacacattctggtagttacacaccacttcatacagaattacacactcacaacacatcgttgcacatagagacacatggtcaaaacaacttcatcagtacaaccagggtcctacgcaaactcaaacatctgacgagaccatacaattgcactgccacatacaatcacactcaccctagctgtcaccaagcccagggcacatggcaaccagctgtgggaggtgcgcgcgcacacacacacacacacacagaatgacaggtgctcacgcacgtaacacctcccactccagacaccctctcagccctgtgtcacatacgcccacacctgctgcctctccacacctgcctcttctgttcctccccaacccctgcgggacccaaggctttgaacccccagtgtcctgccgcccagaccggccataagagtgcctgggaatggggcagagtgtgggtgcgggccaggccggggtcggagaggcggaagggtctggaggaatggaatccaccctccctcccgcgacccccacgtcactgactcacccgtgagctggtcgtaggagccgtccaggtctcgggaatcggacaaactctccttgcggccctggccccgcatggcccccggcgccccgctcccgcccgggccgtgggagggggcgccgggtggccgggatagggcgctcacacggcgccccctggcggcctactgtgctgtcggggctggggaagtccgggctgaggctgagtctgggaatgggcccggggtctgaggtctacccggaggtcctggagcaggagagggaacactaggcagcaggtgagcgcagagccggaggcagagcggagctgagcgcggagccgagccgagctgcctctctcctcccgccccctccccgcggctgtcaccgcctcctcccctctttggcgctgccgggattggctccccctacccccgccccccaccctttgcagcccgggggaggcacccggtgaaagggtgaactgcaaagtgcggggaaggagactagctccccagcaatctgcccctaaagcagaagtcacggggcttggcggggggggggggtgggggaggaggagagcgcgggacagaagagccccactgagaggaggaaaccccgcccccaattctcaggcaccccgtcccccttcgtcaacacagttctggctgaggcagagcctggggtatcatatctgagtccccgctccgtttgtctccatgtcagcctgtattttctctgttgttcctcctcccgtgtatgcgtctctcgtggtcccagacagtccccaccgtgcttaaagcaggttagggatgcaaaggaagagtcaacccagcctctaatattagcaggctcatcgtgggccaatggactactgtttcatcttctctcaagttccagaaggaccccaactctcacccactccaggaccccgtctctggaacctattcactctcagggtgcctccttcactgatctaatgaaccccataggccgactaggaagataaaaaaactagtgaaccaggtcagtttctcaagacatccttgctcttttgttcctcccctgcagcaacttttctgcccttctcttttgtcacctgtcctgtcctagattccttgttttccagcagatatggggagcaactgacaggtttggggatccaagtcaggatacagagtaggaaagaaatgcccttgttatgaaaccccttccttaagattagctcctttccaaaggcagggctagcacggaagctgggctgcctcatctcccaggaatggatcctgagtgttttgagcgtcacaggtctgaccttcctcaggatgcttcctgggctccacacccaaaagccccccaacccgttgctatgaggatgaggggaccttgtctggtgggtccaaaggagtgacctgttaagaccaaaaactttaaagtgactcaagcacacttaatctcttcaattggctttaatttccaaccacttgatttaatcaacccagcaggaattgtggcgggagttcaggcctaagagggggacaagtggctgagggtaagattgtctttaggagcaatgccctgcgcttggatctcccttggctctggaggaggctccacagacctggtatagaggctgggcatagaaagtgcttgggcagctcctgttaaggttgatttccaggagagaatgggcactctcgtttggagttctgggataggtatatgtgaataaactggtcaagagaagggcctttacaatggagggcaaggagccctctgcttagtgccccatgccctagacctgtcctcattcacttggaggaaaggctggcaggaatccgtaagtggccaaatgggttggcttgcctcctcaataccactaagtttggagataagggaactaactctcttctccctccttctacccagaggacaagagaggttacagctctccgaacccaactgacctctactagggccaggagactcagaggaaggaggagagttcacaagggcaggtaggggtcccctagccagatggcagcagcacctaggagattaccttacctctatctttgaggaatgagtctgggcaacagagattaaggaaaaaaaaagcaacactaaagacagtcccacacaaatcaatttttaataatttcaacttgccaccagctccaaatccagctgccttggggatttatcaccagggaaaacactaaatgccccaggctgagctatccatccagtgatcagatgacccagcctgtgatctcttaagaacctacatctacacatggcagcctgttagtggcttctctggaactagtgcatagctgctcaatgttagagccagaactctggttcccagggagggcgagtatcccaaagagatttgaggttaaatggatggcagtccaggtggtcccagacatgctctcactgctgaat

SEQ ID NO: 913776 - DNA, 4001 bp, Homo sapiens
gccagactatttgaatggaaaggggccccacaacagccccttcttgctccctgctactgataacttgcagccagttgccctggacctggccctggccctggcccctccttttcctaactcccactctcaactctcagagaccttgacccagccttgccaggactcatggtcctaaatcagccaggcatcctgtggcagagtctgtcaggagtgaaaggatgagttatttttccaggctgtcccttctccccactcagagacttctcaagtcctcgggttcagtgagaaacttgccagatccatcctccccaagcatccctgtgccacgaatttagctcttcactcaaagtaaaatctctgtggaagcaatttggcagagtgggaactcaagggaaaaccatctcgaggcatgaggtgggccttccccagatccctcaaatcttaccacagagatattcctatcatttatttatttatctcccccagttcaaatgtgagtaacactgccttgtgggggaacccactctatgcaactgtcccaccttccccagtttagctttgtcccaccccccaccgccactgttaacccagccagtgaagacctcaaagcccttctctcagtcccccagacccacaccattcccagctaggccaaagacactgcagcccccagctgcatcgagtgattaatgacctccctagacgttggggctattttgggtcctggaagtcatgcctgcaatgactgagagctggccctgcctggctccagccatctgtcactggagacaggcccaagcagggggcttggaggttgtatgctccccagaagatttccaggtatggttctggctcaggaccatccatctaccctccttttgggggacagatggcaaggagaggccacaggccctatctatactccaggggctcaagtggatacccatggagagagccagaaaatgacagatctcagaatgccacaggaccaggttgttttggtctgtttgaggtcaggtacagaggagacgttgcgttctatgggccctgcccaagcagtcataaggaaatgcaagtggagatgtgcatacacctcagcagtgccgtgggatactcaacaatccacacctcatacactccacaaatttcacaccaaggtacaacctcacgaaggctacacaaccaacttagaggctcaggaaccctcaacccagtcctaaagtacagaactccaggtacacacagtctcagtgtcacagaatcccagtgatcacaaccccagggagacacagactcagccatacatagcccagtgatgcacaacttagtaatgcacaatcccattaatacacactcccagagagagagaaaacagagacatacaatccttaagccacacaagtctatcagtcccatgtcatgtatgaacttgctagctgagttcatgttggtctaggcccatctcagggttttttccttctggacactgaacccttcatcttaagaccccttcagccaagaaatgcaggaaaggactgaactttttccctgctctgctgcaggcctcctcctttcatccctgggaggcgccctgcccctcagttaaggccccctcctctgccttcggtgagaagccccgccccctccaccattgtgagggaccttgatgcccctctcctttcctctttgaagagcgctgtcttcctcctgctcagtaaggaggcccatcccctgctccgcttctgtccaggatctcgtcttggaagccctttccttggagggatgttgctccctccatctatttgaggggcccttccctccctacctctgcggagctcctaacccacttcgctcactttttgaaggatcctgcccctcccttcccttcctcatcatacctggggacagcgacccagtcaccagctggtagagggatcgcgctgcctgccccagcgggctccggcacctgcgggggcatcggttcatggtttggcggcgagctcggcgtctaagctccacccccaggccccggggcggtccggtctccgccctcacccgggtaggcccgcgtgggcggcgcgggagggccggcccggcaggcataggatcgaaaccctggagccttcccatgttctcctggccgcacgagaggagctcaccctggccccatcatgtgaagcagccgcccccaaagttcctggacggggggggggggtggcggggaggggcggcgcggactcagccttctcagggagcatttttctgggttctggcggggaggccaggcaggcacatgtgggttttgagaaaagagctggatggggaatgaaccgtatcttttattgccccctttcagcccccctttctccgcctgtcgcactcctccccgcaccctgcaccccgcccccaccattttggcataaagagccgaaggggtaagaggacagagttgtcatggcaactccccacacttcctgggccaatggaagaaagccaggaggaaggagaaagaggccagtgtattggggtggcaaagaagaggcagcagagttgtgccccactgccttctgtctcctggctccaaattccttgctctcataactgtttctatttgtgtttgtctcggtgcggcaggttcacagactaccaccatacgctggctacagccgaatgcttcgagaagagccccccccgcaccccccccccacttcggtcccgctgcgcccctttcctggactccggactcatctctatcaggttagaccccaagtaaacacttccaggactctctaacgccttaaaattcctgggaaagcctacgggagagatatagtcccgctctttcgactgggatcccgcatgattggttgaaaaccctacatttaagtggtgagaatgacctcctaactctgggcaaatcttgtccacttgacggcgactatccccaccgcaaagcagctccgtgcgcatggctcctcgcagccacacgggggcgcccccgccccggcaacaatactcagggccggagggactccactgagatcccagtcgggggaccgagctcagggctagccagccaggctccaaccctctccgcatcttctcttggcctttctctcttccgctcagacagggccgctgctaaacgcggcctttcccctcggaaccgcactgcccagcggccccgccgggctgggaagacctgagggattagacaggggtccgggcggggctcggactgttttttgttttgttttgttttcctaaagagtctctcccagctcccttttgagcttggggtgggagtggggaagtaaaatgttcggaggtacccaggatgccctgaggtgtaactttccagctgcttccctgcaagcctgatgggccgggaagacgggagctgcagactaccctaaatccgatcccaggaatcccaactgcagggaaggggaggcgaagcctggcgcgcgcttcagcaccgcggacaacgactccccttcatgcttcagcttaggcatctctcagcgctcagagctcagcgccgcccgcccgcccgggagtcttcgttgacactggcgtcccaacccgatttgtctcccgctataaaataagccgcccttcgagaggagagctcctggtagtcctatttctactttccaagtcgtgtgtggagctatctacagctaggctgctgtagacccggaccacaattcttgatacttgtcaacatttgacctttccattttccttgggaggtaggcaggcaggcaggaagtaacattcccttttacagatgagaaaggtgaggccaagagaacaaaagtcacatagctggtacacttccattcctgactgaactggggcagggcatctccaaatacaaatgcttcccccacccaatctcattcaaatagccaagtggggaagggatggtttcactaagggtgagaacccattaaagctggaagcaaacactgactaatgtgatactattgaaggcc

SEQ ID NO: 913777 - DNA, 4001 bp, Homo sapiens
gagataatgtgtgaagtgtttgccacagggtctacatgcaactaacccttatggaacattttaatctccagtgaaaatcggtacaaaatggagtgggaccagctctgtgttcccataccctgctgtgcattggaatcacctgataaactttatttttacttatttatttttgagacatctctggctctgtcatccaggctggagtgcaatggcacaatcacggctcactgtagcctcaaactcgtaggctcaagcaatcctcctgcctcagcctcccaagtagctgggactacaagtgcacgccacctcatctgactaaattttttaattttttatagagacagggtctcaccttgttgcccaggcctagtctcaaactcctggcctcaaatgattctcccaccttggcctcccaaaatgctaggattatgggcatgagccaccatgcttggccttatccttgaaactttaagattcccagcccagccctggagatcctgattaagtgggtttggagaagagcctggggatgtgtactctaggcagtctccctggttgattctgatgtgttgctggcttagagagccttgaacttgctggtagtctaggccctgcgatggtgcagtgtccctttggcagcaatctcccaggtccactgagcaggctggcgtctgtctggcaaggatgcagggagtgggaccctccacagacaggagactctgcctccctggactggcctcttgtctctgggagctgcacctgttcccaaatcaaggtctgggctgtggaaggagcccccacaccagagtgggaggggaggggctccctgcaccccattcttctcctgacttttagtgtctggttttcctttgtttttcatttatctactctcccttgttttatcttgctctgttgaatacaataacaagcttccttcgaggaacacagcagagtagaaacaagtgactaaatatgaagaaaatgcaatgaggacactataaagtgacttctgtcttccaagagccagaatgttccttgtctcctctgcttctcacagggtccctgtgaccaccaagtctgagattgggggtccccttctctcccgcagactgagacccagagagaacaaagctttgcctccacggattgcagagcaagctgggagagcagccaggacaacagccaggacccccacccctccccccaggtcttctcacaacacctccccactccgctgagccagacagcagaaaaggagtttgaaacaggaagtgggggcgtgggtggcaggtgctcctgctggaatttaaatccaatttgggttgttccctaaattctcatccctgcaaactgaatcctgggtcaggcagacatagttctgaaaagcaagctagccccccaaccccagccccagatttgctcacccatgcaccccaccccaccaaattcccagtaatccatcgtcccctgaggccactggtctggatggggctgggtgctgaggcacaggaaggggagctggtctttcctgagcacctcagggtgctcagggcctttcctgcattcttcacagcaaccctgagaggcagttagtctccccacttttcagaggagaaaacagaggttcagaaagaagttactcgcttaaagtgcccaggcatgaggaggatccaggcaggcagctcccagacccagcctcctagaaggcagccctctgctcttgggggactgctgccaccacggagaaaaggcccaccctgtccaggtgaggcacctacctgtttcactgcagttcaagattctgcagagctcctccaagaacttctcaaactctccatcatctgctgccaccaggacctggccgtcctcaatggcagagaagaccacagcacccaccagggcgtaggtcaccagaaagcagaggaagcagaggccagggaagagctttcccagggcctctgggcagcatctcctggcctgggggtgccccgagacctccatcgtccctgaagcatgcagggcaagaggagctggtggaagaggcaggagcatctaagccccgccaggaagatggggtaggagtgcccggagaacagccaggctccagtgctaagtggatggtgcgtgtgcttccccaaggactcaggaagcagccggcaactcatcatgttcagttcttccgaactactcagatggcgccctccctagcaccccagattgctattgatccgctgggccggccctggagctgcctggaaggggctttgggaggatagtgtggttgttgttttgtgctacgtttaatcttttctatgcccaaactgcagttttgaattgcagatcccaaacctgatctttggcgtttagtcaagtgattctttcctgagagctgtctgtgacacaacttggcttagggtacctggtcttctggacaggtgataatagtagtaacctataatagtaacagtaaccatagtaactaatgcggccagagctcaatggtttccaaaggacctttatcctgtgtggatctaattattggtcccaattcttcactcccctgctgcatacccccccttgctggggcctcacggtgggcagagtgtacttccttgaacttggctttagggtaggtcatctcacttgctccagacagctgggcattagcagatgtgatgcaagcaggggctaggcctgtgcttgtgcatttggacttgcttagctatgcctgtgtctgccatgagaaaaggtgccccacctttcaattttcagctcagagtagaccaatgtgcaactttctttggtggtcctgaatccaggttcatccaacaccacctacctccaccatacagcctaagtttgaccccaacgagattaaagtctgagatgcaccgggaatgatgttggtgccacatctgtgctggcccctaagatcaaacccctgtgtctgtctccaaaacacattggtaatgacatcgttagggcaaccggtgatttgaaggatctgaggattacagtgaaaccattcagaacaggcaggcatagattgaggtagtaccttctgcctctgccctgatcatcaaagccctcaaggaacctccaggagacagaaagaaacagaaaaacattaaacccaatgaaaatatcatttgatgagaatgtcaacattgcctgacagatgcagctccaatctttagttagggaactctctggaacaattaaaaagatcccggggactgcaccatctgtgggctgcaatgttgatggtcaccaccctcatgacatcaacagtggtgcagtggaatgctcagcttgttaagcacaaaggaaaatatttcaataaaggatcatttgacaaccagtggggataaaaagtgcctcagatggcagctgtggagatgcatgcaggttcagatccctcttctagaaaggactcgctgtgcagctttgatgagcatggttcatgacagccccttttgttctctgagggtttgccaccggtttcaagccctcttcttggagaagcctgtgcccactgactaagcaaggtggggacccaagggcctattcatttctgcccaatacaggactcctccaacttgagcctgttccagagtggccctttggtctacagagagaacttgtcagtctgtgttatgatccagaggctttccctgttccatctgcttccttcattttcattttacaagtcttcccaaaaaagcttttgcaattgtgactctatcttggtgtctgcttcccagaggattcaacagtagttggcaccagaagtggtctgagaaagcctgctcaaaaagctaagatgggggtcgggcacagtggcttgcacctctaatcccagcattttgggaggctgaggagagcggattgcttgcggccaggagtttgagaccagcctggccaacatggtgaaaccctgtctctactaaaaatacaaaaactagccaggcatggtggtgcatgcctgtaatcccagctac

SEQ ID NO: 913778 - DNA, 4001 bp, Homo sapiens
caatacaccagtattttccaaaacacaaatgtgctgccacaaaacacagctgagctccagcacccaacaggatgtataattaatgatcaggagagacaggctccttcccccctggtgttttcatagccagccttcacccatagccccaggcttccctacttctctcagccgccaaggaggctgctacaagttgctgtgccctgtagaagtttgaggggtcctcggtttaactttactagaaaagatgtgaacatgtggaggctgcaatgtgtatctaccctgcactattcccctggatttcccttccctccaaaacggttcgcgcgtgaagtcccctaggatgggaattactcagaaagaaggcagctggctcactctcttttttccagttctttcttttttattctgcagttttctatcagtgtcgggtcccccactccagccagtggctgtggggaagggaagacatctctagggacacgactacagaccaggcagtgagcctagcaaccatacatcgaaggtgtcgccagcctcagtgccggtgggcgtctgcaccaggaatagctaaagccgacgacatctagccacctcgagcgccagggaagacgctccgcgtaaaaccgcggcctcaggcggactcccgctccagctccgcgctgctggtggcatttccggggacccaaagtgggtggcctgggggcaaaggaacagaggccgaagaacttggggtatgttccactagagcacctaagggacggagtgggaggttacatcagatatgcgacctcgacacattccaaaagtggcagccccgtgggctacccccaatagtgggatggatctccccaacttctctcgcccctcgaagtccccctgttatctcgggccatgctcctcccccgggattcccttgtgcaaaattattctctcccttgcccaaaggatttttcccttctttctgaccccacgaactcatctccccaacaggttcctaaagtatgggcggatgtgctccctctcgcccaccgccaggagccgagccccggcaggtgagcggtgcaaaacacgcacccagctgcccccagcttcctccgtccccgctgagttggctgtccccaccccgcaccacggcacccgagcctgtgagtccccgaccccggccccagccgcagccgccaacaaccctacaataaacaagaggacaggattgagcgtccgcgtcccggagcgcactggctgggggcaactcctcacccccggcgcgccgcccgctgccccgatccgagagcaccgggagagccgagggaagggaaggcggcgaggggaaggcaggcggggatggagggaggcacggcgcggcgcggagcgaggaggtgggctgcaggggacgccgagaagcggtggggctggcgcagagggcgggcgcccggggcgcgcgttaccttcgtcttgcccccgcagtggcagcacacggtccacaggtacttgagcgtccgccagagcaagatgatgaagaggcccccgaagaaagtcaccatggaggaggccaggaaagcccaccacatgcgttggccccggctgtcgcacggcacctccatggtcaccgggatgatgagcgcatccatcttgggctcgtggaccgaggacgaggaggaagaggaggaggaagaagaagaagaggaagaggaggaggaggaggaggaggacgcgtctaggctgagatggttcgcgtggatattgctactcattctaagactgctgcctccgccgccgccgccgccgccgctgctgccgccgccgccgccgccaccatttgccatagctagcaacgggcagccggcgcaggggctcgggggagctcctcccgccgccagcgccaccccaaacacccatcaacagccatattgctgctactgctgccgccgccgccgccgccgcggagcgcgggaggggggcggggaggcgcctgggctcggggcgctgtgcgcgacctggcggggtgcgccgagatatatacagcgagccgccgccgcccgcccgggggggagggggatggagtgcgcgggcagctccccctccccggcccgcgccccgctcgccccgggctgcgctggccccgagcgccgagagccagggggcgccgcgggccgcccgcgcccggggtctgcgccgcccccgggcccgccccggctccgcgcgcggtcccgggtgtcctcggcgccgcgccgcccgccgtgcgccacgggtgtgcgctgcgctcggccggtgacccccttccccgagcgcctcccgcgcggctaacgagccgctctccgcttattaggtggtaactcgttaataatggataatcggccccctccgcccgggcgcccctgcgccagccctcctcccccggctgcgctcggctccggctcgccgcgccagtgcgcgcccggccgcggcaggttcaccgcgtccggccgccggcccgtggccgcctgctagcccatgttctcgggaccccctagtcctgtcgccacgccgctgagcccctcggcctccgctcgctcttcctccttgccgcctccgactcctcctcgtccccgtcctcgccgcccaagcctcttcggcgcgcgccccgcgctccccgcagccgccagcagcagcagctgcagcaactggagcgggcgcggactcaggacgacccaggcgggaggggaggaggctcgccgcgctggctcgcctgggctccgggctgggcaggggtgggcagggcccctcggcagcggcccggcaagcgcccctgacccccagggcgcaaggtagagcgcccccagcccaggcgcggggccaggcgcctctctccaaggtgctgcgcccccagccgagagcggtggggtacactgggaggacggcggggcgccccggtcaggccgtttttttccccaaagagcccccagtggggaggggaggagtggccagctgtcaactggattccacaggctgagctccccaggaccctcgggcttcgggagtgaggaggaccccacgccaggatacacacagctacccacccctacttcgctcttcctgctacctatgtgcccagggtcccgcgtgtggctggagggtagagtcaggaaggccagcgggtggtctgtggcctctgacagcagcaggtggtttctctcctttttccttattagcaacagaggctgcccaacaaagagtaggcagaaatgatcaaggacgacctggcctggggatagtgcaggccccgatagacaatagagttccctgaagggttgctttcctctcatatagtctcagactccatccatcccgtgaggagggcagatgggggaagagggactccagacttcattctggctcaccgttccccatttagggtcttcccttctccccacttaagatgaagaaggagtccgtgtttgttccgtagcgtgtctccgtacaccaccaggggaatcccccttctgacactttcagaaactttgcgccccctgaacagcgtccgtcctcgtgctaccagctggaccccaagtttttccagcgctaattaaatcgaggatgatcacgctcttccctcattgctgcagtggtttccccaaagtttccagctcattagtttaagcctaattggaattctcaggttcctttcagctcttcccatggaaaaggcccaagttagcatccttagctttacacctgaggctgtctccgtgagagtcagatcagccctgcccttgtccttggaggtctctggaaggaagagcgagcaagggaggctgagctgggcagagaggctgaagaggatgtttgaagcttctctcttgcttgattcggaatacattcattgggtttagagtacacatccactaagaaagagtcaaggccaaagtcaaaggagaaaatggaatgaggtaagagttcttgagtatttggttctcaaaaagaagtgtatgtaaaagggagctgcagaaagtgtgctccagaaa

SEQ ID NO: 913779 - DNA, 4001 bp, Homo sapiens
tgggctgcgagtgtgagtcattgtggttaaaaccaggtagcacctgcccttccctgtagagcaagcatcttcaccttctttccaaaccacttctagcacagactgtaagctcccaaagtgctgagaccacacatgaatcatctctgttgcaggagcatctagcacaatgtctggcacatacatagttgggccccataaagtgtatgggagggatggagtgaaattgggtgaccaggatgcattacaaatgacttttgtcttcaactcaattgaatcagtttttaattaactatctccctctctctccgaagtgtagacttggtatcagaagctaagtgggatttccattcccgaagcacagaaactcctactctcggagaagatgccttagccactttcctaggatcgtttcatcaaatttaatatcaaattcctgagaaccctccccaggtgagagcagggtaggcgagctggcccacgccgtcctcgcctgccctctgcagggctctgaccctaggacgagggcagattccaagaacttttttcccctatgagaagtagggtcagttaaagaagaaaacctccttgggagaatcccattaggaaggagagagcccaaaagagctaaacatgcccccgaaaagaagtgagcagaatgtcgagggtctcgagggtctcttttgaacagacagggtctcgcccgccctcgaagcagctcaggacagtccggggtctcggaggacccgcagcggcgcggggagagcggcgagcggggagggcagccagccggaaggccggccgctgtgggggtcaccctgctcccgggcgctgtcgccctccgcgaaacctcccgatgacaagaattaatgaccagcttccaaaggcgcccaacatcaaccgtagcgaccctaagcgtcacattcgcctcctgcctcgacctctgccgcctccggagagtctggagcgtctcagaagacccaaacctcccactccgaacccccagctccaaactccccagtgtccccaccctccagcccgtctcggggccggttctctctctccttgcccctgtcttccagccatcagaaagagcaatgccctcttcgcagccccgagtgaaaaacgaggcaacatcctagtcgcacctatataagcccctggctcgccactccaggggggcacgccaaggtcaccaggataggtgtgactgcctccaccttcactctccccacatccttccctttctgagatccccggggtccggttcctctccagtccctcctcccagttgggggtcttctccttttggcaccccatcaccgcaccgggacccctcccggcctggccctcctgggggggtccttgccctctctcgaaacgctcacttgctctcccgcgcaaggctcccttgtaagtctcccctcggtttccttatccaaggaggggagatgtgcctcccactcgcgctgggggagcggcggggcaaccgacgcaaacttctgctgcacttacttcgggccgaggctgccgccccctcgcctctcctcgctctcccactggcagctgctccgcggagacctggagccacctcgctctcatgccccacaccagcgcagctgcgaaatgcgcaagagggggaaggggtatctcccgggcgagcgtgccgggggcccgagtctggggccgaggttcggccgccgctcgcggctgccagccgagtggtggcctcttctggcagcccggggatgctgcgcagggcgctgcgcgccctgctcctccgccgggtcgtttctgcccgacttgcagtttcagggcatgccaggactgcagcaccctctccgtcctcccccggaaacgactttcaattcacctggaggctctcgaggctcccccgcgggcgggtagcgtgacagtgggtgcagaggagagggaggagcgcgggaacggcggcggccccagtgcgcctcccgcttgcttggcgagaagcgcgcagccctctccagccgctctcttctggactgcagtcctgacgtcacccccaccaccccccaccccgcggaggagcggcgcggagggtggggtgcagggagtgaggacgcgcgagtgtgagctggagtgtaagcgcgtgcgtgtgcacgcgcgcgtgtgccctgcagggctggggacggatgggaaccgcgtctggatcctgtgaggagccagagctcgctccctgcaaacgggcgccgaggggctgccgcgagcagccgggggcgctcgcttccaggtcggggcggggataccagggaagcagagtttggaggcgaccgcaggaaaaggaagaaggcagtacgggtagttggagagcgggagttgggcattctctttccccaaagttggaggctgcacaggatgcctttaaaaagctgcgctagaggtttaggggggaagagtgggatagacggtgtgggagagttggtttccacgctcctgtaggagggagttcggcttggggaagaagagctcagagtcctttcaacctccacccccgcggcaggttccagcaaggcagccagcttcggtgcgccaagggcgcctctagcctactcgaagcaaatctccagcccggggcccctgtctactaagttcctgcaaagagatcaaaggggccagccttttccacctgagtcccctccctgcgtgaacctccgccagaagctgggcgaaagcactccgaacaagcgaaaggggtcaaggccgaggctggattccagatgcaagagggccccgcccttgggtcctgggtctgaggtcagtcgtaggggtgacaactccaagcagagttccttgagctcatcagtgaggctacatttgagttttgccattccccgggaccttacactagaaagcgatccacgttgtcacccaactttactggttctctgaaattgtcttgggggccaaaaatagaagagactttctgcgagagagccaaacgaaggttcgttaggtggtgctgggatggctagaggttgttccttgttcctggagcgtttgtcccttagcagagacccagacatccttgaggctgagtgcctggttctgtgcgccttctgcgcacctctgccggctgccgagtgaccaacccggagttgcccgcccgccgcctcccggctggagcagaatgtgcaatgcgccccagcccgcgccagatccgccgtcagcatcgaggcatcaggagcgctctgcagtgatctccagtgcagccagcaattttgccaccgtcgagtggcaacggtttttaactgcgagcgtcttgcttcctgaatccagacactgtttaatcgccaagatgactttttattcattaaaatatttttaatggaaagggtagagagtgggaagtggcaagtaaaagaggcaaaaatattctccatccacatacactgtttttcaacctttttaaagttactgaagtagagtcagatctggatgaagcagcagaaagtttcattaacactcttgattctcaaatggaagctcaacagaatagaagcaagcctgagatcctagtctactgtcttaggtttaatgatcttaaacactcccgcatttgaaaattcaaattctagctaattagacaaaattatggatatccttaacgatgcattagatttcacgaataaatagaataattaaaataagtaacgtacagcccagcatgttcctaattagaacaaaggagtactagagaaggctgtagattcattgccccgagggcttcttgcaactgtaaccgtcctattttttaacgtgcaaatgtgaaagcaccctgacatcatgaaggaattacataactagttcctcgttctgcatctttcaaaagcagcaatttttcagtaggaatcactgttcctgaaaatgctaattcagattgatagtgtgggaataggcaagtcattgacaaattaaaggcatgatttgaaaacaaaattgtcaagaggcagctatgctggtacaca

SEQ ID NO: 913780 - DNA, 4001 bp, Homo sapiens
ttacactggaagttaaatgaaggcaagtatttttagtctgctttgttcaccactggatgtctggcagctaaaacagtgacgtctacataacagatgctcaatattcactgaatgaatgaattagtgagcaaaggagcacactgtctcaggctgaccatcctagcctctgaagcctctgaattgccctgattgttggaaagtcatttcttaaatggatccctttctaatggcccctctagaatctgagtcatctctttcaggacaggcccagaggttgaattcctgaagtaggatcctgtcctagaaaatgggggtggggggttgcgggggtcagggggacgaggtagccttatcttccactggatgccactgaccccggtagcctgaaggagagtgctgtgctttggcagcacgaaggcagacacttcgacagatgactgttcagactcagggattctccagccattacaaaacttcaagttttctgcatttcactgggggatttctatctcttgtcattgtaagttctcctgactggcttagctttgcattttcagcgtggatgagtcatgtgttacttccctttcacattttcataaaacacacaccttttcccctgtgcataatccctactcccacgcacagcactgcactcccgcacgtctttttgttgtgtactggcccctgcatgaacctgagggagggtggggcgggtggtccagggctgtgtggtttatgaacatgctgcctataggatcccacagaatcagctcttggcatcacaggcatcagatgccagagagcagggacctcctctggccacccaacccggtgcgaaatttctttggaacaacataagcttctggaaattccctacggaaaagacaagtctattataaacacaattaaagggaaactgcctggagaaaatttaccaaaattgtccaacaactcccaagttttgaattaaaacataaaagaagatccagagttctatctatcacccagatgctcaagccctcccctgctgctcggatctgtaaaataaaacatgcctggtttctgtgatttaactctaaaattctgcacaaactttgcagccagcatgcatctgccacatggaatcccccaaccaatgaatggaagctgcggtcctagagacagtttcacaaaaacagctcctttctcccgtggctggagccccggggggaaatgattaaaagctgcttagtgatttatttgtcattgcttagagatacagctcatgctgatggctcactgcactacaaatgtgacatcaccccaccacctcttttgctgcttaagaaaatcgtgccagagataaagtcaagcctaagaaatcacagttctctatgctctactcagtttggaaaatgtaccatcccaagaaattgccttttttttttttttcctttgccgggtcccagagctgcagtttataaaaagcagcaagcggcaaggggcacgcgtccctgtaactccatctttgaatgggtctgttacttaccctgcatctgtcttctgtctgctgagtaaggaaggcacggctcacatttctggctttcattttcttccattgtctctgcctgccgcaaaagctcctcgctctctggaaacttcagagcgcagttctaaaagctcccagaaagcgcctgggagggggcccggggctggggaggaggggacggtgcgaaaccccaccccaaactattttccactccggtgcaaagtctccctcgcccgagaaaactgcattccagcgcggggcctcttggatctcccctgcccctggccctccgtccctaggtctgtccgtccgtccgtccgtccgtcctcaggcgcgctctccggggactgggggctgggctctgccagggcagggcgatgcgggggtgtgggggggaggcctcaacaggtgacggcctctcctacccacaactgggcctgcctggttccactgctgcaaaccaccgaggctctgcagccgaggaaggaaaacatttcacacatgattaaggccgagagccttcgctgggagccagtgccctcatctctttaatctcagaggcagagtgagcctcccaaatcgggtgatccacatattaaaaaacagcaacctgttgaacctcccaaatttcagtgaactcccttaaaaaaaaatcccaaacaatttgaaagaaagagtatatgctgagtgttgtaagtaagcactttccggcactaactttttagggcccgattaacatctatgaagaggtatagcgtcatttgcacacagtcgatttcaatcacttaatctggactttttaaaaaaaagtttctacgtacttgctcactttctcagactcctccctcccccaacacacttacacacacacacacacacacacacacacccagcccttaatcacaaatctgaaaggtaaactagtaaagtcaatcttctgaagctctcccagttaacgactccaaaaatctgaaagacagtgaaaatgcatttctttggacaggcagagttacaaccaacatacttctccttttaaaccacctacaaatatttattttgttctttacccagtccttgaaaaactggcagagttcccagagagtgaaaataggaggcatgatgtccgaaaaaaaaaaaaaaaagaggatgggaaaataatttaggcaacattagctctgcgatgtcagatatctcagagtaacacagtagctaggaggaagagcgcgattttgtaacctgtagtagccccgtcacaggaggggtaaaaaaggacaatggttagtctggtgaccatactttgccccagtttacagggcattccagcaaggtttgagattgatttagatcaagaatgtgtgctgaacaatggccagcctatgttccagattgtgacctcgagtgacctgtgtgttttggcagtgggggtgacgtattttggccatttaagacataaggatgtggaagcacctaacagacaaaggatgtaggccaaaaggaaaggagacataccaggaagtgagttacactcacgtcaggaggggaagaagagagcccctcaattcttaacgggatttttcttgaaatccaagaagacgcggtgaatctttcaaaaaattaaagcagtgcctcggcagcctgaatagaggcagtgggatttgcagggcagataacttaaggtctctatgactttgcaacagaattacctggcaatcttgctttaaggaggaactaatcttacacagtttctgtcctggtggcccctgggcaaaggccagatgaatctagttttaaccttattatttccttaggtgcaaaatgttcatgaaggagggccctgctgtgttcagcctttcaggtccagatcatcctgattcttgtatactgttgtgtatttgtctttaaagtattaatgctaggaagagtggggaggagggtgggagaaaagtatgtgtgtgtgtgtgtgtgtgtgtgtgtgtgtgtgagagagagagagagaaacactgtagcaggagatgcagcagcccaaatcagatgtcccgcagcctttggttgtgaccccaatccccttgctctggtgtccagagagcccgtgcttaacagctcctacctgtcatttggtgtagcacaaaggcaaaaaccccaggatgaaggaggcagcagagggctgccacagccgttggcagccacaaacagcaccctgccccagggccctcctggctagctcaacccaggcagaaaagatccattggcagatgctgattaagatttcctgggggctgtttggaaggtgtcagagcagtctttcaggcctctgttgacccctagatggacaaaaatagggaaatgtctcccaccaggtctgaactaccattttccaggcagcccaaggaacccccttggtcagccgaccttgctttccagctgctaggaccctcccctcccccatacgggccaagcccactgccctctctgc

SEQ ID NO: 913781 - DNA, 4001 bp, Homo sapiens
gaagagcactgttgaaggtgaagttcgggctctcaggcagctgagccagctgccctaacttcagaaccctccaccttcagccttaacattcttcctgtccccctcctgagagctctgccagcagcctgaagggcagtgggcaggcacagttagccagtctccattcaaagatactttcttgctcccaaatcaagctcacaaacaagcttcctgctctgtcctatggaaacatttttttatgagcaacacggcacatgaagcaaagaagagagcaggaaaggtctgtgtagtaaagaaggaagagtcgtttatccaaagtgcttttctctatctctacactctctgatgttcactgttttcattatgctctgagtaagttgtaaccaggtccctggataaacaaccagtgtgatactaggttttggatgctacagatctaaaataaaataaaattccagaaaagtaaaaaatagtttatcctgaagccacgtaaacattatatattattattattttcaagataagtcatctatatttgattacagacctgaagctctcagctactattgaggctgtgctgtccaggacttaaaaacaaggaagacagtcagcctggatttaaatcccagctctgttacttacaagtgtgtgatcttgatcttgttcctctctgagccttggttttccaaacttaaaatgggtgtaatagtacctattccatagggttatcatgatgactaaatagaataatagatattacgtaaaccacattggataacaacttctcaggtatattaactcatctataaactgggataaagatatccacagaaatatgaacaagcaaattcatgaacacatgtacttttgaaaggaaacagactgatttaaaaggacattgctcttattaaattcctttaaaggaaatcaatgcaaaaatattgtgagtgaattactgcaagagttgacagaatagttatctcaagtaaacaagatttctgtcaaagactttttcaggcaatcactaaacctgctataagagatttgttatatcaagcttgtcatttaaaactgtagaagtttttaatgtgatttcatacagattaaactgctatttctttaaaattttttcaagaccaggataaaggttatttttatttttaaatttaaagtgattttcacaagaacaaaacaccaaataatttttccctggaatgttaaaggacacatatgaatttccctccttgcttgtaccatgccttcaaattatcgactttgcctcagacactgaatgtatgtcaacaacttcatgaaaacactgaaaattgtcacagagcacataaatcaacaagacctgtaaaagcaaactgtgttggcactttaaatcccattccaaattataaggttagccagaaactagaccacaagatttatagattgaagaccagcccagtttaatttaagtggatttcaaaaaaacagaataatgtcaataacaaagagaggttttcttctaggcagtgtgcaagaagttaaaataaaacctaaaattgcaatcgcctattgcattgaacttgaatacagaagacaagttaatgaaagataaacgtgccagagcatgaaaaaagattctaaagataatatcctatcataaaggcacagttcttaccttacattttccgtgagcctttcttttctagaagaaactttctagacttgcagagacctcgaaaccacccctctctccaatgctttcagctttgcctgtcttcatggtgactaaatgcaagccttgggttttttacagaaggaagcttttagtcaaaatatgtggtttaaaggagcagtatccactcttgttaaaactatttcacggacattcagaggttttgtttctactctatgaaagttaattctgagtaggaaggcatttttcctgtcccggaaatcagcataactaaaaccaatgctgaactaacgagaaatgtttcttccatgtgttctgtctggcagaaactgcaagccatatcaaggaaacacgtgatgtttataaatacaatatggctcatgttgtcataacctctcaatgacaaaaaataaaaaaaaaaatagtacaaggaaaagcaagcagccacgcagcaggaaagatgagatttgtatcacttggaagttgcatatcagatgtgcatatattaccttttcttgcttctaaaaaataagactttataactggaagcagagaaggaacaagaaaatatctcccatgttctggacagccactgtattcaaatgtgtttgcctagctaatcatttctgtaagagtccttccttatcaatcataacagaaacatctttttgcctcccagaaaagcacaatataaaaaagatatcattatgtatatcactcataaatgagttccatagtgttaactccagcaaattatagaacacaggcaaggatttcatgagcctgaacttatgtgaaaaattatagatgtctgtatcattattgattattgagttaattgattattgtctgtatcattattgctttttgccaatatatcttcaggatcttgcatgagagctgagaccagaggaaggatctgactcactatggctgattgagtgaatcagtaaacgcttacagtaatgaagttaggttaactgttcaaaaatcatcacccttacggtgtaagtttagagatatttgaaatactgactatcgactcaatctaaaagcaaggggccaggcacagtggctcatgcctgtaatcccagcactttggaaggcatggagggaggatccctggagcctaggagttcaaagccagcctgggcaacatagggagactgtgtctctacaaagaattcagaaaattagccaagtattgtggtgtgtgccagtagttccagctaatcaggaggctggggcagaggatcacttgagccagggaggctgaggctgcagtgagccatgattgtgccactgcattccaaactgggtgacagagcaagaccctgccttcaaaataaaataaaaataaagcaaaataaaagcaagatttctcctagtgaattataaacacagcaaaatcagatctatcttatttagatttgttgtctagggatttagtttacgttctaccacaggtgaattcaactcctgaaaactccagccccccccacgcaaaaaaaggttagataactgtgtatttctgatgaacacttattttaatctgacaaagcagattttttctttattgttattcttaaacttcagggttattaacttctttttttttgaggtggagactcactctgtcaccaggctggagtacagtggtgtgatcttggctcactgcaatctctgcctccggggttcaagtgattctcctgcctcagcctcctgagtagctgggactataggcacgcgccaccacacccagctaatttttgtatttttagtagagatagggtttcaccatcttggccaggatggtcttgatctcttgacctcgtgatctgcccgcctcagcctcccaaagtgctgggattacaggtgtgagccaccgcgctcagcccagggtaattaacttctatcaaattatactgatagactgaggaaaggcagacattcttatttctcatttgggtcagtggccaatagcgggatacattaggtaatgtgctataagcctcaaacacgtacctttacaaatcactgtatcgctcttagtagataaggcactaattaactgaaagttggtgatagaaaagggctgaagtaagtatctttttctatccaggtatttaatgagaatctactcagggcagggcattgtccgagagagccacagggagcgtgaagatgaatgaaatggagaccctgtccctgagaagcttagagctgaaagacacttaagacgtgtggacagaaaaccaaacaccacatgttctcactcataggtgggaattgaacaatgagaacacttggacac

SEQ ID NO: 913782 - DNA, 4001 bp, Homo sapiens
atgtctctatcaacacaggtgacttagatgttggaagtcttggcagaattcttatgttggtttgccaagctgtgactgactttctaagacggagttttaaaaagaaccaggatcatgtatttcatccttggctctaaacagagcccaagaagaaaaatgacacaatgatcccaatatagagtgggaaacatttgttttaaaaccacaactagaatgaacccttacgatcagacaacttgggaatcctaccataaaagacagggaccaacctaaggcaactcgctcttaggatgtgggggaaggtaaggggacatcactggagggatgttttcaagtcttcaatgtgatttccaaggtcacacttgcaataaaaagtagaatttagagactccagaatctgatagatggaagcagcatgatggttaagattgtataattcacagtttaaaacaaacccagcctttgctgcgggtattcttactaaggagagatcttcctagaatctgtcaccaacacagatttattttgttttggtttttaactgttatttggctaatgagtaaagacatggcattaaatacatactgggtttttcctgcgctggtactcaaagtcagaccttgtgggagaaaattatactaaacttacaaagaaaataaataagcaacacacacacacacacacacacacatacacacacacatacacatacacacatacgagttgccattcacattaatatatcccagtcccttattctgccactgatctctctgatgctactaatcttatcatctcttttcccttagtgagtttaagtaactagctatgttgtaccattgacactttttccccacagaatttcaacactaatgtcataatgtaagctttaaacaatttcattttacagcaagaaagagatgaccgacacagaaaaataaagattcttctaaccccttatctgaatacaacacagataactatttgcctgcacctaagcccagacacagaaaatgttcattcaactgcactagatataatggcaatgtatgaacaagactgttctacctcattcatctgcttggctaggcactgtcttttcttctttccattactgcccaaacctctattgtctcttcattatttgagttcttccagttcttagaaagagggtagtttcttcaagagcctcatcataatagcaggctgacaggcaggtgtccctgcccacagactgcacacggatcaaaatgctgtttacaccatacttctgaaacaccagaaaatatctggggccatttcaaattaagatctgaagtctgagttagaaattcttacatgtagctatatattatttcccaaaagaaccataagtcaaatcgaatatcactcattcagaagtttcttgaacgtaagataagaaacaacatattaaaattgtttccagaaaaaaaaaacctagtataaaaaatatttgtttaaaatcatcttgggaaactgcctcatgtaatcatgtctgtggagcatttatatatatatatattgcttgtggaaaaggaatattatgtacagtttgttgtatttcaaaccccacccttccaagtctagaatttgtaaacataccactcaatcagaccacacaatgaagtaagcagagaaaactgaaatggaatcttaagacactctttcaccctcaaagaattaaagccacttactttttcttaaggaaatcacctgtgtaactaacgccgtgagtaagcacattcgctcaggtcctgattacatgattcctttgtttgctggcttcatctaaatccttggttgcacacttgaatattttagacagcttcctcttcagaaacaaaatcatcacaaaagacacaaagatcctaaaatgtttctcagctcgagtgttcacaaccaataaagaccatttcgtattacccagttttcggagagaagctgacactggcatggataaaaagtaaccttccccgtgataagtcaatttctcctccccttggaaattagtcactgaataacctcagcccacatccaaccacaggctacctcacgggtgactcagtccttcaacaactgcttacagggaaaacaccaatgaaggaactttaaacggcctaggtaaatgggttaacagcaaaggaaatattacaaaatatatttcgctgaaggcaaacaggatcattagaaagggcaaacaaccagccaccgagaaatgaaactgtcaaaaaacccaacatactcaatccagaggagccaactttcagatcagttttctgttgacttaaaggtgctactgcaaaaacctagaccagcacccaatacccactttgctgccagacttttgaagtctgggaattggcagctgaaggaaacgtaagcctcttctcctggtttaacaccagagggaaaacatgagggagataaggaggctgtctattaattaaccagccctgttttaccacgctgaactttgggtagcagccattaatcagtcctacatagcgccgggcaaggaactgcaatcaccctggaaaatacatctgaaacgagaaggaaagatagagagggcaaaccagggctgtgcagaggggattctggaaaggaaaccagagcccttctgccccaccctaaacaagatgaaggacgagaaggtaggcgatccccagagacctctggctacaaccgctgtcagcacagctggtatcttccaggggaacaggtacaagaaggtgcgtgtccacaacacgaagtgacttgtgcagctctcagcggaggactggcattaatgcattgctagcaaaaggtgggggagaaaggaagcatctcctgcgctcccaggcaggctctgattaccatcatgttttctgagcccttggggactgggtggaaccgaaagctatccaagtgggaatacggtgacaaggaactccactcactgggctggaagccccactggcttcacgccacacccaactaccacgctctgggcagcctgtgcatttttaaaacattttaaggcttttagaggttgttcttgctgaccaaaagaattccatgacgtctttcaagttcaaatccagtcctttgcaggctttctaaaaaaactgtttactgccatcaaatcactttgtggttattaaagaagggggcaaatggagcacgtgacattgccaccctcctaagatgtctcactaggaaaaatatttggatgaagtggttgtaacagatgccacctaagaggtcggaaaacagtagaaggaatgtggaagctcttgacttttaatctaatcagcaagggtttgttatttctcaccagagtatgggaggcacacactatcagcttctgatgaatctggtatacattaggcaggttttgttttgtgtcttcagtcaagcacgtactttccaggaagggggatggaggagtggtcccccttgtctgattaggccacgatgccgcccctatcacatcctccaaagaccctgtcttatggcgtgaggtgtgctaacagacatggctcttataattcttctttacctgcttattatgggcagggttgcttgtcccagtgactgtatgtgaagggtctggggccaggctgtcccccaggaaacaaacagtgaactctctgtctctctgctgcttggctaagcaagtcatgccatgttcgacatgttatcccatatctgctatgggctaggtgctatgtggctcacgcctgtaatcctagcactttgggatgtggaagcaggaggatcccctgagcccaggagtttgagaccagcttgggcaacatagggaggcccagcctatacaaaaagtaaaaacttagctgggcatgctggtgcatgcctgtgttcccagctacttgggaggctgaggtgggaggatcacttgagcctgagaggttgagaggctacagtgagccaagatcacaccattgcgctccagcctgggtgacagagtgagaccctgg

SEQ ID NO: 913783 - DNA, 4001 bp, Homo sapiens
tcctgcctcagccctgcgattttccttctttaataatcaacactgctgtgataaacatccatgttcacctgtcccaatattattttaactttttaaagtatttttctttttttcaccccttcttttcacaggtgttgaccaatattactttagaatattgatgtggattttgttgttgttgagaaaaggtcttgctctgtcacccagactgcagttgcagtggcatgatcatggctcctccaggggctcaagtgatcctcccagctcaacctagcctccccagtagctaagactacaggcgtgtaccaccatgcctggctagttttgtgggttttttgttttgttttgttttgtttaagagacagagtctcactttgttgcccaggctggtcttgaactactgacctcacgccatcctcccacttcggcctcccaaaatgctgggattacagatgggagccactgtgccctgcccagatttatttaagaaaccaagtaccatataaatgggaaacaaaaagtattataagaattcaaaggtaggagggagagatcagtttggcccaaaatggtcccaagaaagttattaatactaaaggaagtgattcttgagataggttttcaagaatggggaagaattccctaagatgcaaacaaatgaatttggtaagaaaggaagctgcagattttggacattttattttgaattaagaatgtattccgagccaggcacagcggctcaggcctgtaatcccagcactttgagaaggtgagccagaaggatcacttgagtccaggagttcaagaccagcctgggcaatatagtgagacccccatctctacagaaaattaaaaaaattaccaagaatggtggcatgcgcctgtggttccagctactatgaaggctgaggcaggaggactgcttgagcccaagaggtggaagctgcaatgagctatgatggtgccacttaactcgaacctgggcgacacagtgagaccccatctctaagaaaaaaacaaaaacaagacaaaaccaaaaaagaatgtactccggtcattgtcatttccttgagacgttaagatttaaattactttggattttcttaacagaatgaacaggagttggactggtggagaggaaagcgcatgacgatgtaggagggtctcggacaccaatgcatcgccacgtctaagtgaagcagcagcaagcgatattggtgtgggcgacgagggtggacacggagtctggggacggccgactgtgggagatctagttacaaggcaataagtccataagactggcttttttgaagaccacagacgctctttgggactcagtccagagctacaaaaacgtggggacgaattgcgccttacaacgtctgcccttggccttggcaggggctcctccccatccctcgccatttgccaacaggggccggcctggccgggctcgctctcacctgcgcctggatgcagagagagatgcagtcgtgcgagagccggtacctgcgcagcagccgcaggcatttcaccaggtgctcctcccccgccgacagctcctccgtgtcgatgtggttcaccccgaggtggaactcgatgactgccagcctcaccgctcgctgggcgacgggcccctcgggctccaccacctcagccggcagccccagggcgtggtcaccggcacccgggccgtcctcggcctcaggccgctcatcctcgtcctcaggcgcagggccgagcagcgccttgacctcttccagtagcgcccgggcgctgtatttggacttgtatggttccttctccggatttttatgcagttccacccgcgacagagcgagcgccgcctggaatttctcgcagacctctgcccacggaacgttcgccatagcggcctctactgcctggctttcctcaatgtttgcagtcgggactcccgccttccttctgctttgcgacactttacttacggctctcgacacgttgcggccgctgtggaatgggaaccaatataaccctcccggagaaccgcaatacgctcggcaatgaccaatgggaagacgcagcaatcaccacagcaaccattctcatggaaatgaagttgtcaatgagcgtgttcccacctccttccccgccccctgcagcggtgagtttatctccagattgaccctgtgaggatggatttatataaatgtttaatatcggcttactttaacgaagcatatcggaatattgtttacaaacatagctagctaactctactcgcgttgatatgaactgaaaggcaaaaacctttagacattaagtgtatagcccagcctgtcactggataaaactttttttaaaaaaggccaggcgcagtggctcatatctgcaatcctaacattttgggatgccagtaacattttgggatgcccactggagtgggcaacatagcaagacccatctctacataattttttttaaaaaattagccgggcgtggtggcgcgcgactgtagtcccagctaccatggaggctgaggcggaaggatggcttgagcccaagaggtggaggttacagtgagcgagactgcctcagaaaaaaagaaaacacgagcattagaacaaatacctaatgtatgcggggcataaaacttagctgacaggttgataggtgcagcaaaccaccatggcacatgtatacctatgtaacaaacctgcatgttctgcacatgtatcccagaacttaaaagtaaaataaaagaaaaaaaattgaaatgtagccaagagctgattattatcattgacacataatctcttgatcgagagccataaatatacaaaacactcagtgatagacaaatattttcacttcgaccctgaaatacaggttgtaggaatctgtacaactgcccaaggtaacaagagctaagtcccacagctgtgaaagccgcctcatgccttttaccttcctaagttatcaagtcaaatggggaggggtgatagaagattttaactattaagcaccagctgtgtacagtgctttgagacatacaaaggagcattgattttgggagctcatagacatatggtttgaacctcagaccaaccagctttcttattgacaagttaacttttttaagcttcaggtttcccacagtaaaatctgaatgatactacttacctcgacagaattattctgaagaataaataaaattaaacgtctatcctttaagtgttaatgctcctaaaaagtccttcctaaaccttatccctgggagatctcatccatttccaggtctatcattaaacacgctgctcactcccactttgtctccaggccagatggctctccagagctccagactggaatatccaacatccagctacaacaatcacacctgaatgtttcaatagctgctgtgtgtcagtatgttcaagtctaaatgatcttcctcttcacatgccccttccttcccataccaaatttgccacatttgcagttctacatgtcagtgaatggcaccaccatccaccaggctgatttcctgcacttttttttttttttttggtagagatggagtcttgccatgttgcccaggcttatcaagcaatcctcccacctcagccccctaaagtgctgggattaccaagcccagcctgttctgtcattcttttttttttttttttttttttttgagacggagtcttgctttgttgcccaggctggagtgcactggcgtggtctcagctcactgcaacctcaacctcctgagtagttgggattacaggtgtgcaccaccacacctagctaatttttgtatttttggtagagacggggttgggggggcggttcaccatgttggccatactggtctcgaactcctgacctgaagtaatgtgcccgccttggcctcccaaagtactgtgattacaggcgtgagccactgcaccaggcctcttctgtcattaaacctaaaaccagatagtactgcttagtccacctcctaaagagctctg

SEQ ID NO: 913784 - DNA, 4001 bp, Homo sapiens
cttcttttttccccgaaacaggctttctccacccacccaaatcccctaattctcctgggcctgccaagggcctgaccttccagtctctgcagcaaagggtgaagttttacaggaggaaggcccagcagattaaaggcctctgttcaacaaatatttgctcgcccactccaggcggagtaacagtttcttacatgctgcatgcccacagtgacacttagagacttcaggaagcttgttaagctggtgactaagaattagacacctaatgtcaaggtaaataattaagtcccaatccacagacgttatggaaaaccaaaccactttaacaaactcccaatgtcacacgaaaaccaacacaagtccaatgaaatagaatctgcatatgatttccaaaaaagcctgtatgcattcttgctttgccgggtggtcttaaaattctaaaatgaactgacattcccaaagttttacctgtacagcccatgaccctcagttcacaccatgcagactgcctttttttgccagagcatttctggctgcccgaatcctacccatcaggccccttcccccaaatccctgtattttgcaaccctagccctcaatctctgggttatctattccttgtaaatctgaaaagacaaaagaccggagaaggaaaacaagttgtgggagaaacatcacattaaactgtcaggacaggaaaccctgggagttgtgtggtctgcaccgccccacccctctccccaagactaagaccaagctactagatttggggagggaatgaggacacgggaggcgggtggagtgcgtgcgggggtgggagagtgggtgtaggtgtggggaggtgatgtgcccaagctaattcccccaaggcctctctactccttaagcgcgtggatgaccaaacaccagggcatgcccaggtagcgctggcctaaagttctcgtttttattttcttcttcagtagtgaaatcacagcttctttacaaatgcccagaagaatcccaggcgctctgcttcttgacggaagcgagaggggcgctttttagcagctagtgctgggccccactgtggccagggcatcgaggcaaaccctggcattttgggggtgaacggaccccgactggagacgggggaagtagagggtgcccgcggagatctgagcgcagagaccctaggagggcgggttccagatcccataaatgagataattaacgggatttacagcactcctaggcggggctcctgcccttctcccatcccacgcgcagccaggagccgggcggccccgggcactcgctgggaggcagctgcgattagcgccctaatccccagcgcagaccgcgcagagaccggagcgggagcggggccgcggcgggagccccccaccgtcccgggcagtccagacggccggggcagcgtgggaactgggacctcggggacccagcgcggcggctgtcagctctggggtgaggtccgcgagatctgggcgcgagggcgcgggaggggttggtggacacaggctggggagggcgacttcgagaggggagtgagtgaccccggccccccaggccctccgcgcgccgaggggcgacgcgagcgctaacgccagccgcggcccgcggtgcccgccccgggacccccgcgctccgagcggggcacctgaggggaggggacgcccctcccgggctggcaggcgccctccaccccgaggctgccgggctaggcaccgcgcggggggcccaggcggggctgcgactgggggtgcagacatcccccaccgccagggtggctggaaccggagcgacgtcccagctggagaagttggggggagtgcgggaggctgcgggtgaggcccgcgaagcgccgtgggagcggccctaatggacggtgggagccaggagggttagacgccgggacttaccgagcggctccctcatgccgcctcgcgccgccaccgccgccgctccggccggccggggaccagcgcgacccgccccgcctgcagccgccgaggccgagcatgcccggagaaccgccgtccgccccgcccaccgcccgggcccgccccgcccaccgcccggggctgcctcctctgcgctgagggcggtatccaggccacgagcttcctaggcttttggggtccgcctgcgtgggtcgcgcagaaggcacaagtgagctgaccaccattccctcttttcttgtcacttgggtttgggccacgtcaaccctgtggaaatgtccaaagacacacacactctcacagatacacagaaagcaaacatattcatatcacacaaacacacaaagatgtatgcaaacacactcatatacacccacacacagatgcacacaaacacactcacaggaaacaggcgcacacaaacacatatacaggacacacaggtgcacacacagtcacagacaagtgcacacacactcaaatacagtcacacgcaggtgcacacaaacacacccatatacagtcacgcacagatgcagccaaacacactgacacatatacatacatacatgggaacacagtatggctatacacacacacacacacacacacaaacgcacccacataacacatcgatattatgaagagcagaaaacagtgatggtgacaacagcttgggatttacttctttcaaaaaaaagtctgaaggagtctggaagccaccttcagatcagctggcccatactctcctgtggcagaggaggaaactgatgacaggagcaggatttgcctacagggcaggggtaggaggagagataggaggaggtcagtgggagagttcagaccagaatgaacatttggggtcatttgggtaaccccaaacccactccatatttctcttacagcgggaaggggcagaaagattagactgctgcctgggtctgctcagggcgaacgttttcataattttggaaggcagacagaagacaaaaaatgtgaaatattgctgatgcattggggagagacagggaatgttagttaagtccacccagacaaaacatggatggcacagcagactggtgaccttgccaaattagttttcagaaaactacttagccacatcatgattttaggactgtatttgctgtcgaaacaccaataactaactttttttgctctattaccacatctgagcccttcctatgtattatttcttttaatcctcatcacagtttgatgatatgggcaccactttacagatgaggagtgggctcagggacgggcacagatggcaagctgcagaatctagcccaagaccctcgctctgaaccaccagagcaaggtcgtttctttgttctcttgaatcatatgttcctcatggttagtagcaacgtataatctaacacagcataaaagctaaacacactattgctggaaaagaacgaacaatgtaattgaatgttgtattgtgcattatcaggagtgcgtgggaggaaaccagatggtggcgataggagcaggcagcatgattaggggctcgagaaccaggtagctcaggtcccgggcttggcttctctgccactttctagatgtggtactttacttctgttagcctcactttcctctctaacaaagtgggggtaatgatggtttgcatctcataggagagtcatgagaattcaatgagatgatgccttcttatcacttagttcaggtacatgtaatagtcaagaaaatggtggccgggcatggtgactcatgcctgtaatcccagcactttgggaggacaaggcaggcggatcaccggaggtctggagttcgagaccagcctgggtaagatggtgaaaccccatctctactaaaaatacagaattagccgggcgtggtggcaggtgcctgtaatcccaggtactcgggatgctgaggcaggagaatcacatgaacccgggaggtggaggttgcagtgagccaggatcatgccactgcactccagcctgggcaatagagtgagactctgtctcaagaaaaaaaaaaaaaaga

SEQ ID NO: 913785 - DNA, 4001 bp, Homo sapiens
gttttacgcaacaacaggtaagagtactggacaggacctcagaaagtcctccagtttcaccctcgcctttagtcaggtcggccttgattgaccagaagatccacggaaggaaagagactcctccaagttcacagagcaggtgagctgggccaagagaagtgaaagagctgcaactaaataccaggttttgccacagagcagggatccttccattacatggtcttgtcagcaagacattcagaaaagtacatgttcctacacatttttacttcctttaaatctgtatggttcctccctttatttctttattatttattattattatttttttttggagatggagtttcgttcttgttgcccaggctggagtgcaacggcgccatcttggctcaccgcaacctccgcctcctggcgattctcctgcctcagcctcccgggtagctgggattacaggcatgcaccaccacgcccggctaattttgtatttttagtagagataggggttctccatgttggttaggctggtctcgaactcctgaccttaggtgatccacctgcctcggcctcccaaattgctgagattacaggcgtgagccaccgcacccggctggttcctccctgtcttgacccacattcgcagaccaccctttggtcagggtaataatgataagtgtttaaatgtgataggttagcatttggttgttgatctggtttggttcagaagtgtggtaactgatgaaaaaaatgattgactgaagcaggtctttattaaaggataatccccagttaccaagcagtacagaaatgcgtgcgcatggcctggctctccttcgcccagcgtcaaccctgttaattctgaaagctcaacactggcaggatgttgaccttgctgactaataaactgctaaaattgagaagtgattaaaaaaaaaattatggcctgaaaatcccagctgggcaaggaaagaggaactagaccgaatccaaacgaaaagctgggaagggtgtgaaacagccctacaggccacccagcgccaacaaatgtgtaagggtggggccaagctagctgagccgcccaaagcagccaaaatatcctgccccacccgcttctccggcaaggaaggtggcactgtgcaacctcgtccgcactgaatcctcgtcccttcccccagcccccgatcgccagcaaacgcaaccagcgggcagcgggtctcgagctgcggggcctgactagccccgacactccgcgttatcctcggtccagagctttcccaggcgcgccggccacggaggacgcttctctgcgggtgacggagctactgcggtgaccacggcggccgccacgtctcccgcccggcttccaactgccctggccccagcgccctggggccgtccccgcccacgggccgcggctgcccacacctggcgcccgcgtgctgcctaccttgctccttcagactggtaatgagctgcagctgcttctcttcgtccgagctgttcattttggcgggtggggccgggaataaaagggaaagagggagcggcgcggggcacacaggaggagggggaagaaaaagcaagatgccggtggcttgcggctccactacccggaagttggatccgctcccgctcctcctcctcctggcgcggagcgcgcgagtgagatcatccccacgcacctactcggcggctgcggccgcttcacctgcaggcggggcggggcgggcccagcagtcccgttcagggggtggaggaacgagggcgggtcggcagccgctatgccagcctgtggctgccggcgcggcaggacgcgctggtgggagggggggcggccctgcgtggggtcgctccgcacccttttctccgcctccacctcccggactcagggacgcgagttcagagaaaaccggctgtgggttcgcagcgtgtgtgggaactccactttggacgcttcccgggggtcgctcccaaagaaccacagaggtagagcgggacgcaatgagccatgaacgcctgggcttcttccctagttttcccgcagtagactctgggggcgcggttgcaaaacctagctgcccacaggggcgggcccagggtggtacattttgcaccttgaagaggagacaaggatcgaatcaggccgcccagctacttaaatgaccatgccgtgagtgaaggagggccctggctagctttcccccatcgcaccaggtttgccaggtggtcagaacgtggaccctgctgcacgtggatggtggggcctggagggcccttgcagatcatctggttggtggcgggatgaccttccctttagagagggtgccactgcagtccgaatgccgaaggtcacgcagcccccgggcagcagaggctggcagttaagccaagcgtttgtcccagttcactgccctctgaactatttgaactcatgtctgtgttagaccatgcccaggagagaagtggcaggtctgcattgtttcaaaggtgcttctccccaacccctagttgcgagctaacctttggtcaagtctcctgcatctttgaacttcatctgaagaataggaagaatagtgatacctactctcaaggaagagttgtaaggatttaatagaggaagattaacaaaacaccaagtccagaatttataatgcagtttttttttgttttttttttgtttttttgtttttaataaagattacaggtctgtggccgggcacagtggctcacgcctgtaatcccagcactttgggaggccaaggcgggcagatcacgaggtcaggagatcgagaccatcctggctaacacggtgaaaccccgtctctactaaaaatacaaaaaattagccgggcgtggtggcaggcgcctgtagtcccacctactcgggaagctgaggcaggagaatggcgtgaacccgggaggcggagcttgcagtgagccgagatcgcgccactgcactccagcctgggtgacagagtgagactccgtctcaaaaaaaaaaaaaaaaaaaaattacaggtctgtgagaaaggggttgtggttgctgactataagctgaaggttgcagttcttttacactgatcattaagcatgggagataagtccaaactgaattagacttattgcacagcttggtttttctcactacctctaagctcttagtttgggtacagcaacagcacagtgctgctcattcctcaattgctgttttatggaagtgcccagctccatttcttgtgttcatttctccatgatagttgtagagtgaggttgagatatgggtaaatcctgtaactagtgtctttctgatactcactacatgctaactaaaattttgaaaaaaaaaatggtagcactgctttctctttctctaaaatggcaatatagtactttagcatgagtgatttaggggtagaatgatctaaaagggcagcatagtattttttaatacagtgtattaaaatgtttaaagtttaaaaataattttgatatgggattgtattattcagccctttccctaggtatgcgtaagataattcaagatagttgcagatagctgccatgaagatccccaggagataataataaaaaaatccgggagattttaatgaaaaataatggacatttagcttttgtccagcagttgggaaacctgttaaacctgatgagtcatcctgactcattctctctcactctaccaaatacaagcagagtgcccattaaatatttggcttagttcacaaagttccatttttttttaatggctgatttgtctactccaattatacagtagttagatagtatttctggagtttaagaatgagttaattatcaaatctataatcaaacttttggttccatactaaatctgcggcctcttgcaattaatcccatttatcctccttaaaattagaaaaggctcctgagctgagattctgccactgcactgcagcctgggtgacagagtgagactccatctcaaaaaaaaaaaaaaaaaaaaaaaa

SEQ ID NO: 913786 - DNA, 4001 bp, Homo sapiens
acgtggtgaaaccccatctctactaaaaatacaagaattagccgagcgtggtggtgggcacctgtaatcccagctactcaggaggctgaagcagggagaattgcttgaaccccagaggcagaggttgcagtgagctgagatcgcaccactgcactccagcctgggcgatgcagtgagactccgtctcaaaaaataagataaaataaaagtaataattctatttacagatgaggattctgactgaaagaagttatttgcctaagttcacatggccaataaaagtcaaaggtggaattcaaagcccaagttttcctactattgctatattgtgggggttaaggtgatgactgggatacctgctgcgggaaccttgccccgagttacttggaaacagcttcctactctgccatgacctgcccaggctaagaaaaattgctgagccaaacatggacccagctccttactcagaacctagggaagcaacctggcctcaaagccacttatatttgtctcagaattgcaagaacccctccgatgctggcagacatcactaatgatcagcatacttttccacggaggcctcagaatcctccacaacttagtatccccaggcagctaccatcaaataattcaacttagcactagagttgaacttatttgccaccctcccactggtctctgaacagagacggtcataggcagctcagggaaagaggatcttaaaacgaaaataatggtgatgtctagaaacaaatgttggcattaatgtgttaactaacttgtttctcatcccatcactgatgagacacctacctactttctatcctccccacctgcagcttaatcccagacctcgacaccaatctgtttactaacctttctcacctgtcggcacccatctcatcttgtaactgggctttcctcccatcgttaccctgcccaaaacctccccttcacctacagaatagagatctttagtttggtcttcaggcccttccttgaccaggccactttgcaagccttatcttacacctctactcgatgtgagacccccacctccttcacatcatttccttttctttttctctcccctccgtttctccctgggatgccctggttaagaacccaaataccttcttgatcatctcagaattctacaggctgtctgcccatccctgccaataatgctcccactccactgtgcttactttccctcgcatcagctgacaactaggacagaaaactgaatttgcctttagctcttcccgggaagggactaagccagaccctcagtaaaatgggctgatgacctgactttctggccaccgatctaacacatggcagtcttatctaacccatgagacgcaagggaaggaaaccaaaacaaaaacctggcactccgtccgtcctgtgcacccttagcaagcccctcagcccccatgccgctgcttccctcagtgcaagaagccgggggtcaagggcgtgggtctggagggcggagcgctaggtgctggcaggggcctttcagggggcgctgccgccgcttgacgtcacttcccgccgctccactgccttgggtcacagctggcgtcttaagggccggacccaggaaggtattttcagtccctatttctgcccgtgctggcaagagagcacgggagccggactcagcgtgggtcggggccctgccgctaaaaccgtcaaagcaggcctaacttaccactttcctggtgaggccccggcctccgtcgacggaagctgtgggagatgggctgcgtgaggtgccgggtccaggctcacaggaggagagctccaggagtccctagagcgccagccctgcctcctttctagccctagcacctggccctcgcctcgcctcctagcacgcatgcccctcgcctcgcctcctagcacgcatgcccctcgcctcgcctcctagcacgcatgcccctcgcctcgcctcctagcacgcatgcccctcgcctcgcctcctagcacgcatgcccctcgcctcgcctcctagcacgcatgcccctcgcctcgcctcctagcacgcatgcccctcgcctcgcctcctagcacgcatgcccctcgcctcgcctcctagcacgcatgcccctcgcctcgcctcctagcacgcatgcccctcgcctcgcctcctagcacgcatgcccctcgcctcgcctcctagcacgcatgccccattgtgcatgccaaatggctcacatggcgcaggctccacgcctttcccgcccttgggccctcctgccttccgggctgaggcctctgccccaattcacaggtatctccccagctttggagccaactcggcctccagtacccccactaaacccttattggcttcaggctctctgatcaaattccctctctgatacaaggaaaatggtttcaaaattccactcggacccgatcttgatatcaatgctaccaccgggcacctctagtcagacagtaagatctgttggttttatttaagcaaaatgccttgaaaccatttctcctctccatttctgctgccacttcaccaagcaaccctcacccccatcccctacccccaccatcatcgcatcaccatcatcctctcttgctctcctgttcctatggaagtgtactcactaactggcatctgcctcagaatccgtgcactcctgttcccatgccacctcttctgggattctcccccagattgccagagagaccttgtaaaatgagaactacaatgattccatgatctccttgggagaacttttcagtggctcctcatcgccctgatggcaaaatccaagtgttatcaacgtggtattccaggtgctgcctgcattcctgcctcttctcccactacttgcactcagccatcctcactgcttcctctccattcccagctcttagcattctccttctcatacctttccattgaaattggttgactcaagaactgaggaaattagcatgtaggaggtttactaaggagtgcttcaagctcaacaatgtagaagggaaaggaaggaagcagtactggacagaagtcaaactgcatagggatcccaacagaggcctcagccattccttctaagagtttagaagatgggatgagtcttcaaatatatccaaagttggggtgcaagaaccaggcttatccccaggtctaccagtcattggaaaccaccctggaaagtcattggaaaccacttgagtacagtggctctcttcagatgaggcagtctccaatgaacagacagctgagagctgtctgccaagtcattaaaataataatttagcattttggtagagatgctgtgcttactaatggctgtgataccaagtctaaaggcagggggagtaaattccattatgcctgacccaatcacgttccccttcctcaggaaaggactttaggccaacaccgtcattttacagatggggaaactgaggcccagagagactctcagatagtcagctatctcaatcacagtcttataataaatagctaatatttgagcatataacttatcctaggcttgtactagatgctttagatgctttatccaactaaacaaccatgacaatcctatgaggtaggtgccattattactttcatttgatatacatggaaataggtttggagcagccagatgactaatttgtccaagattacacagctattaagtggtgtatctgggatttgaacccaagtcattctgactccagaaccataactagaaaccattaagatgaattactttttctctgtgcattaaaccagcatactacacattgtatgataccagggaatgctatgtatgtgtttatatgtgtgtatatgtgtatgtgttattgctatacatgttatgttgttaacacacataacagacttttttatatgaagaaaacttttacatgaaaaattttatatatattttacacatatatatgatgtgatttatttttaagaatgggtacaacactaccacataaagcac

SEQ ID NO: 913787 - DNA, 4001 bp, Homo sapiens
aaaccacatgtgatctgcaaagcctaaagtatttaaataaaataaatatttatttctctgggccctttacagaaaaggcttaccaacccctgaggacctcgcaactcataagttgcctatttactaaagcttaatgcttaatgacagacgcaccaggaaggctatttgaaagaaaaaggctaatctgaaaaaaaaaatctctttacacaaaaattattgtaaatattagacacaagcaaagaactattctattcattggtgataaagtaaatctcttctaagacttgaaatgtatacggatcataaacatcaagttcaagataatggttaacagtggctggaggaaaagggatggagagggaaaaggggggctccagcaatgattgttttgtttcttaatctgggtgatgaatatacaaatgtttattacattgttcttaataactttttgtaagtctgaaatattttgtaactaacattaaaaaagaaattaaataaatgcatacggaaaaggtaatattgcctggttttattaaacaaccaaaataattttaaaatttgcacttgttatatgcactgcatttttaaataaaaatcttcaaacaactaactactaacagaagccccagagtacaacaactagtaagtgtcactggctagacttaagattgccacccaatttcctctctgacaccttgtttagaaacctagtcatcaccttcgatatccacaattcaagttaccagggctgagtaaacaatagcctaagaaagtttgttgatacaagtttttctaaaaaataaccttttaattttagaatactttggggtttacagaaaagttgcaacagcaactgttaacagccacaaaaacggacacacaaaacacacatactcagtaaactgtggagagcctctaaaaagttgaataaatcaattctaactaagcagcagtttctagcttattttaaaattgggaagttatttggaaaccagtcaggggagggccgaacacccctccacatccctttatctcgaaatatccgtttagtttggtctatgaacaaacacgcagatgaaagggaaaactgcagcacaatcagaaatttacactagcttaacttgtcttgatcttttaaaaaacataaactcactttattaatttttaatgtttaaagacagagatgtttacttgtttagtagggatgcagaaaatattgcatctagaataaagagaacagtgattgattgctttttagaggtaataataccaacgtaagtgcttaaccatctgcaaaataggtattcagtcttacttccaaactgacaaactacatgaagtagcatataaaagtgacacctacatctttattgactatagtttaaacataagaacgcacttttcagtatggaacagtgatcaaatcaaacatgttattttctcctaaaaaccacatacacacagcaaccgggtgtcatttttattgaacagaacgcggagaaccaagaaactgggaccctcaggaaatgcaaataaaatccctctccctggaccgcgcagtagggggcccagcagcgaagccgcagcgctcggaatcctgtcagccctctccctacctgcatctcaccaccacctggatgttcttccccttctcctctttcttcttcgcagacgaatttggctgcgacgccatgacggtccccgccaaaaaatcaaggcccggccgcggacctgggcgctgtgaggggcggaggggcttggcggccgacaggggccggagtctccctggtccctctcgggcgctggcgtggcctggaggaccgacgcacgcaggtcggcgtccccgctctctacccggtactctggccgtggcgtttgtcccgcgccagtcggagccgccaaatcactaatctcgtctccgcccgaatccccagaaactaagcaacgactcggcgcctcaatttgaaaaagagacagagtagccggaccaatggctgcgctggcgcgcaaggcaccatgggatgcagtatcctcactggagccccgcccccggagcgtggcctacgggaacgtaaagaggtggtctgtctgcttgctccggaacttggtagtccagagccgagacgctagaattgagtgtggaacttttagcgtagcgtggctcaacttacataacgtccctagcccaaaattccctcagctgcagagaggaaataatagtaaccatctcagagggttagggtgagaattaatgagcttgtggaagtaaatagattggaatatatggtaagcactcgccatgattataattattagagaattgtaagagagggcagtagaagcacagaagagaggtccaaagcgagccgccatcccggaggcagagaccagaatagtctttgtgtgtgtgtgtgtgtgtgtgtgtgtgtgagagacggagtcttgctcttgtcacccaggctggagtgcagtggcgcgatctcggctcattgcaacctccgcctcgcaggttcaagcgattctgctgcttcagcccccgagtagctgggattacaggtgcgtgccaccacgcccggctaatatttgtattttcagtagagatgtggtttcaccatgttggccaggctggtctcgaactcctgacctcagatgatccacccgcctcggcctcccaaagtgctgggattacaggcgtgagccaccgcgcccggtccagaataggcttgaagaataattaatgttggggcccggtggctcaggcctgtaatcccaacactttaacgggccgaggtaggacgataacttaagttccaggagtttgagaccagtctgggcgacatagggagacccccctccccgcgcctcccaacgggtctcaacaaaaaatagaggggaaaaaatagcctggtgtggtgatgcgtgccttttggtcccatctactcgggatgctgaggaagaaggatcgctgaacacgggagatagaggctgcagtgagccgggattatgtcgctggattactccagcataggcgacagagcaatgccctttctcaaaaagaaaataataataataataattaggaagtgttaagcgataaggctactacaggttccaaatcgtgatgaaatggacactggacgccatttggaggactctgaatttatcctttagtcatcatctctaagtgactccaggcaagaaagcagggtccgcctcgattttagaacgactgcactgaccgagtgacgcaggccgcgggtgcgctgcgctccccgtttctgcgcggcgcagcgggcggtggcatctcaaggaagctgcgcaaacatccgccgccccggcctacggatcccagcatgcagcgctcgctggggcctgcgcgccgtcggtcacctccggcctgctgcgggagaacttttcggcgtcttggcagtgcctggcgtgactcgaccgctgtaggtgtggtacgccgcaccaggaaatactgaaacaggagcctattgttatgaataacttttaaaatcttaaggaaattgaacacttgaacaaaggatttttagcaaagcaattttatttttgcgcagaggggtgcctttttggccagtcgccttgagagcacacctgaacaaaggggcaggagtctatttttgacgcaagtcctgcccctgtatctttttcccattggctggggtcgggtcgtataatctaaactaatcccggttggctaaacatttgattttttttagctaaggtgggtacttaaaagaaagcggacaggaaaggggaaggggtgtctgtaatgagctaaaaagttagtcccttcaaataaggaaaggaatgtgagctggtattgataaggcctagtattgtggcgtgcctgggcatttaacaaaagcaaaaaaggagaaaaagagaaaaaagggagggtactatgaattaaagaataaaagattgatcgggttatttgaagagaaacatcatatcccacactatgttgtagtcgg

SEQ ID NO: 913788 - DNA, 4001 bp, Homo sapiens
acccccaagccactgctgcccttgagagtttctatgatccggagactctccactgtgcaacatcatttaggcatgtaagcccctctatgattctttcctccccgactccccattccccttgccctctttcccctctagatggtggcccctcaccctggtctagaaaaggtcccaaactgagacggatttcctttgcctacaatcctgtcaaaatccttgtttattcctgccatcttgttgtcaatctttttccttgatcaggctgaaattcctaaacgtatcacaagaacatagttgacttttttcccctaaattgcaaaaagactaaggaaagcactgatctagatcatgggtaagggggtgcagaggggggagcatctgcaaaacgttaaagtaccggcctgacatttcataacacagagttcatggaaatgcccagaaaactaaaaaacacctgtggcttcaaataataatttttggtttaaagaaaagtgttgataaatcttttaaattgctgaattaaaaagaatattcctatgtactaaaagcagttataataaagtatttgttcatatgctcatttttcaatgaacaaactacttcctagcatttctaaaagtgttcagacttactgtaacttcttgcgattttagatgacttctacttatacgtggccttcccaactaaactggaaacttcttgatggcaagaaccttgccttataccactctgtatcccctataacaaattcagcgacttatgcagggataaagactacctaatgacttaaaataatggttataaagaaaatactattccaaaaaaaaaaaaaaaagtcggtcctagtctgtaatattatctttcgtgacagcaggctccaagacctcatttttcatttcaaaaggctgctctgactggaaaactgcatatttaccctctctccaataagaatccacaattggagactttggtgaaaaatagcagaatctgttgctgaatgaggtttctgaatgtggtctacaacacaaagcctcaaaaaaagtcttcacaactaatcgatgagtattttatgttatttttacaatttaaaatctggagtcttggacatgtaagataaatacactgttacactacctaacccataaggcgtgaacttctgtaaactagtagtttagcaagaaatataagagaactgtgccagacatgcatcactgaaccagcgagcgaatcgagatggagaaagccttctaaactggggaatgacagcagtcactgtgccacaaactcttcagcctggcactgcaaaaccctagaagggcaagccccaaggaccagtaggagtagtctggaaataagtgcacagaggctaccacagggctccccccgcaaaaaggccgtgttacctaccagccgagcaaactgctcacctcagagcttcagaaaactaggtgtggcaaaacaggcctgttcctcaacaacaacagaagcaacaacaataataatattaataactgcaaacatttagtacctactgtgtgccagcactaataactttacacattaccatttaatcttcacaaaagccgaaagaaatagacacttcattgcagccttttaactgataagaaaactaaggtacagagagagattaaatgaattgtcttgcgtcactcagctaattagcagtggaggcgagatttaaaccgtaaccgaattagtatgactcattcctcgctgcgtaccccgtgttcgcatcgctccgcaacccagttcctgacagtaacctccactggggtatgagccctgtcggaacatgtccacattgccaaagccgtttccccaccttaggccccatacatgcgcagtcacccacctccttccccacacattcccgcgggtcacctcctcacctgcaaacttcgcctgactagccagacccgcgagcagcactgcgatgttaccgttttcaaattcaaacaatggcggccagggcaccgcactgaacgctgggagtaggtggggcgtccagagctccgccagggagcgtagccggctcgcgctgcgggctttccagtggctaccggaagaagctctccaatatgggggcgggtcttgaaacgcgggcagccaatgggcggaagcaggcgtgggccgccctggtgctgacggtctggtttgcctcccagctctgctagccgggctttagtagtgcgctttctcgcggctgtcataagtaccacgctgttgactgggacaccgatctccaattctgtccttgaggcaataaagatgtggcgaaggcccgaggtgaggccactgccactgcacttagtcctgcgactcccctaaggacgggccgaggaatggcgggctagccacttcccagtcctgtccctacggggcagaaaaaggctcggcatcccgggatccggagggtcacttccctcgctgcatccccattgtgcaactgccagtctaaaaattgatataggtaagcttatgaatgctaaaactaatgaatgcaagatgctaaaacaaacaattaactgaaaggttgtagggaagaggatgttagtatctcaaagaatcaccctacagatcatttcttattataaagggaaaatagaattttacactgaagagatttattagacataccttaaccaagtgaagatacttagcatcgctaatatcacccgatagtatttgtgctagaaatgtttgacattaatcatgaggaaacaatcagaaaaaaacaatgtagaatattctacaagacaacaggcctaggctcttcaaaaatgtcagtgtcatgacaggaaaaagaaaaaaacgaagtggaaaattactttagtcgagagtcaaaagaaaccaaatgaaatttgtgaatcttggctggttcatagtttttaaaaaaaaaaaaaaacttcgaaagacatttgtggacaactggggaaatttaaatatgaactacatattagatgatattgaatcagttttaaattgattgcatgtgagaattaatttgtgattaagtggaagaatgcctttgtttttggaaggcgcttgctaaagtaattagcagcaaagtgtcacagtgtttgcggcttaccttcaaaagatatggcaaaaaaatagagaaagcaaatgtggcaaaatattagtaattggtgaatctagttgaagggtataatggtgtacatcgtaccagtcttgcaactttctaaaataacagattttataaaataaaaagaggaggggggaaaaggaatagaattctgatctttaccatggcctcccaggtcctgcacaatcaagtgtcagccgacctcactccccactaactgtacagtaagttgatctgctctggatacctcaaacaccaacttctttccagcatgtatgaacctttgcatgggttgttccctgtacctaaattctctcttctccattcaacacgtggcacttcccttcatcatttaggttacgtctaaaatagtaccttcttaaagaagactttcctggctactgtatctcaagtgagcactctttttttatttgcaggttcaatttcatttttatactttttacaactagcaattgttgttgttcccccaccctgtaaaatctaagttctgtgagtagaataactgtgttttgtttggtcgctaatgtatcctcaatgactctctaacacaagacaagcaaatcaatatttgttgaacaatgaatgaaagctgatgtggctgggtagagaccatggggaggagtcaggggagtgaatctgtaggcatgggccaaggccagaccctgtaagccttagccaagttactgacttgagtattacgaaatgcttactggataaccagttttaagcatgggcatggtgcaatccaatgtgcatctatcttttgaaaaggttaatctcctggagaaactagaggcagccagggaggatgctgttgaaccagttaggaggctgttgcaagagatcccaggaa

SEQ ID NO: 913789 - DNA, 4001 bp, Homo sapiens
aaggcctaccaaggagctaagacaattcattttttggagctgaactttggagaaactttcacatcaaaaccctaaagaactttagtctgtcttcagtgtcaatgctttcaatcatccatgtcccatctcctgtgacctctgccctatttccaaattaaatagccccaatacagtattaactatagaatgacattagaggaaaaattaacatattaaaatttcataccatggtaacaatgtagaaagttagttctactacatagcattaccaacaaagagcaacataatttagtcactgtttcgtatgccatactttacaattaatttttaatctccttcaactaggagtgctattttctcacacctttcaatgccagagatcagacctttaaaaaccctcacattctggtctcactgataatgatcactcaactctagttatgtttttcattacaaaaaaacagtatctcactattcttgggattaccaaacaacaattttcttcaagatagaccttaactgcagaagtatgaatctaatactggtcaatttttatcttttttataagtttgtttttataacactttctgtctgatacaaaaacaaaaagttaatactttttcctaggctgttatcccataaaacctagcaagaatgcgatttgtctttcggagcacttatctgacccaaccaaagtcggctaggtctgctagattaaacaaaactgatcatcctgtttcaaaaaaaaaaaagctcaactatttctttctacaatcatcgatttgccatttgtagttgttaacatgaaaagtctttcatcactcaaaaagtggtgggtgaaagttggaggtatagataatatttgtacctctttttggtgctttttccttctcccagagggaaacaatacggttcaaggactggttatgtttccataaaactaagcatctttactaaagtacactacggcttatctcagagctcaatgtcaccagccgatctttatattagcattacatattttctgaatggcaaatttggggttaatccaaaacaccaacagtatccgtaattgcacacacacacacacacacacacgcagacaaacgtgcactgaacttgctgcccggacgttcctccattgccccaggtgggggagtgtccagggctgaggctgggcgcttcccgtctcccggcgccgaagactggggtgggggcgatccaggaacgcacgcgaggctgcgcagtctccctccactgggttatctgaaccggcaaaccccgccggggagggctggggacaccgccgctccctttcaattctgcaccctgccacttccctaaactccccgcacaggccggcccgaagaagcgggaggagggatgccggcgggggtcactcaccgcgatcacgaccgtgtcttctccctgaaacttggcgatgtacttgtcgccgcggttcacttcagactcgttgagaggtctgaagcgacacatcactttgatgttgcactcggccaggtccgccatctttctcgcagccggggccggcggccgggagccactccccgccgctcagtcttgcagggaacgcgccggacctgagggcttgtggtcgcgagggccgtgagaggcagcagtcagctgcgccgcgctgcgcttccccgggtggaggcggccggggagccgggacttgaagagccggcgccggcagccgttaaccctaatgctcacttccgatccatcatggcagccatggcggcggcagcggcggcggcaccggggagagcgtccgcggctcctcagcgtccccctttacggtctgggcggactgcgggggctggggaggttctggggaccgggagagtggccaccttcttcctcctcgcgaagagcaggccgggcctacccgtccgcccgctctgccgtccgctggccggccgactgctgcccgatcactcctgaggccgccgttgggcgacagggcggtgcgggaggaggactgcgcaggcgcagtgggccaggcggcccggcgaccaatcggtgcgcgcgctcgcaccctgccgcggcggccgggctgctgtttccaccaccactcctggcccggggtcgcagattcaaattttactgcactgcccctgtcgcagaagttcctggggaggcagggcggcagctcccacccgccatcccaagccgccgaagaattccccagagctaaggcagacgcacttagctttcttttctttgagggagaaggggtttgctttaactacttaatgtcgtttgtttaaataaatcactaggctggtcccgttgcggtggtgtttgcagctaattggtcacagccagagatttgtttcttctccactcgcactgtgtcacttgactagctttaaaattaaaaacagaaagtactatattcctaaaaggaagtgttgctttcatttttgtctgggggtggagggaatcattcctggcccatctttttagagcgcgttgccagaaaaaagtaagatttcaatgaagggtagctctttcctgagagagtgggatgtggggaaacaggaataagaaagaaaaaggaaaattttcctaaggaatgaagaaagttgctgaagaaatgtggaacagtagggtgaggagggggaagagccctcagcccccatcacacagcatctctgtcactccagcggcccagtaccttgcatccagcccgcaccctcgccgcccccacgaagttcagcgaattcccgccactttccctgcaatgaacatacggaacccatcaatcccagtgctggaggaatgactgacctggagcctaaagatggtctttataaaaggcctaggtaaatttgttcatttcatatccaaggaagaccactccatagttgactttgccttctagttttagaagatgagtaccataaaattccacggggaagtggctctgaggaagtggctctgaggtgctgcagaagaactgcagtaacaactcctccccctcgtccccaatttttgtttgtaaaatgaaggactgaactatgaaaacctccagggctacctgtgctcacccaatcatcctaatacctacagaaacaaattcagagttcaacagattcaggtttattaatccactgccttgaagaagagctcacgctcaaggaaccttggaacatctcaccaaacaaaggaatggatgaaattaacccagggctttctgggaggtgtggagttctgatgacatttaaatgaagcagtgtttttgagaggccccaggcaaagcagagctgcaaataaaggcattaacatcaggtctggaccaccatggaccccaggttctgtttccgtgaatactacagttaagatagatgggaagtgttgtcttcagaaacccctttttccttcacctggcttggaagtcaagactgcttctctgtgtcttaggtcctccaagcaagagtggaatgttttattcttactgatacaatttcaaacaacagtttgtaatagtctatgatttttgtggaatcagttttctcagtaagaaatcagtaggccaggcatgatggctcgtgcttataatcccagaactttggaagggggattgcttgaggccaggagttcgaaaccagcctgggcaacatagagagaccttgtctctacaaaataataaaaaaatacaattagccgggcgtggtggtgtgtgcctgcagtcctagctactacagaggctgaggcaggaggatcgcttgagcctaggagccaagattacactgagctatggtcgtgccactacactccagtctgggtaacagagccataccctgtctcaaaaaaaaaaaaaaaaaaaaaaagaaagaaattaggtcactcaaagaaggagtttgtgtgacactttataaatgtagtatgtccttgagagaaatacttttctgcttacctttcagctggctttatctctgtctgttagtccagtctgatcaatgaaggtagagtct

SEQ ID NO: 913790 - DNA, 4001 bp, Homo sapiens
gaaccctaatgtaaactatggattctggatgatactgatgtgtcaatgtagtttcatccatggtaacaaatataacacctcgttgcaggatgttgatgatgagggagactggagaggggagcggaggtcctaataaccaaacctataacagtctattgcttttgatcgaatcttgatttcaaggagcagttggaggacaactgaggaagtgtgaatgtgtattagatgataaagaggaacttctattaattgtgttatgttgatgacatatactatggttatatagaaaagtatcctgaaattttagagatgcctatttaagtatttaaaggtgaaatatcctgatattggtatttaccttaaaatattttttaaaaagtaaatacggcaaaattacttaaagtgttaagtctgggtgttacagactgcatgtctgcgtcccctcaaagttcatatattgaaccctaacccccaagggaatggaattaaaaggtgggcctttggagatgactggatttagatgaggtcacaagggtagagcctgcatgatgaacagggtgggaccgtatctcaaaaaaaaaaagaggaagagaagtttctattagagcttgctctatctgctttgtgaggatagaggcagtttcgcaaaccaagaagaggaccctcactagaatctgaccatgccagcaccttgatcttgaacttcccagcctccagaactgtgagaaataaatttctgtcatttaaaccacccagtctactgcactttatatggcagtccaagcagactaagacattagataatgcatatacaggtattccttaatagaactaaagagagtaactgtatcaatattagtatgagtcctacctaaaatacctcttccttcacttgcagaaacactggattagattattccaattgcctcagtgttcttccacccttacccaatccagtccaatctccggagaaaaatatgatcacatcactagcctgcacagcattcaatcaaccacctctttaatggggaaaagtgtaaattccatagtgtagccatataaggcttttcgagatctgcccagactccttgagccactctatatatacttcactcatttaaaactcagcgacaatcctacaagtaggtgaaattattattccctctttacagataagtaaaggggaatataagtaaataacttgcccaagaccacacggttggtaagtggccctgcttgactttaaattttgacagtctgatatatccataaaccagataaatccataattttaaccacaatattattctgtgcccggtacagtgtaggtgctcaataaatgcttgctagatgagtagtgtggaagagcttagctctcctttttcacctgatcccaaaagaggagtgaatcctaaccaccctgtttctcttaagagtcaagtcaagtaagagctgatgactgttactggcattgcccgggcgtctagtattgcagtatccccgcccctgtgaggggtgcaaaaccttttctgatttcatttctttggtggtggggatcggactggggaggaatgaggggtcgcagaacacaggctgcccgctgggcccgggggctgcggggagggacggctctcgtgcgctgagtagttgactcgcccactgcagacctcagaagcctcacgacccggaccccgggagccccagccccgcgccctcagccccgcgtccaggacctgatcctggattgccaggggccctcctgggaagacggggccactccgggcccactcacctcgtcccggcactgcttctggcacatctggcaataccagcgtagcttctgcagccccttggacttgatcctgttggcgatagccttgggagtaagaaaatccgacttccccatggcgaccacggcagcgatcactttctggaccccagtactcagccagccggaaacggaaccgggctggcggcggtgggcgggacaaatcccagctgagaggcggaaggaggtggggcctgggaagactgggttgcaacggtcgcgagactcccctcgccgtagcgcgaagaaacgagactgaagaagagagcaaggtgggaggggcgcgctggggagcttcggcgcatgcgcgctgaggcctgcctgaccgaccttcagcagggctgtggctaccatgttctctcgcgcgggtgtcgctgggctgtcggcctggaccttgcagccgcaatggtatggcagcttgcgggaagatcggcaggaccgcaagggatggaagagcttgggcacggggcagggaggaggagatgggcgcgggggcagatgtggggtcgcagggcctagctgggcccctggcccgtcggaggcgccgggtagcgggggctgcaggaagcggctctgaggtcgggcaaggtgtgcgcagggccgggctccggcggagcaaggtcccgcccggttccctgaggtcggagggccacctgggacctcgggactgcggcctgagtccaaattgacgtctgggcggtcttgagttccctcagctaatcagcacttcctgagcttccacttccactgcaagccaggcccccagtctcagggcctgcaaggtgacgggagcctgagcaatagcccaggggaaggttaagtcgtgctttttgtccttgacgccctttgaaaccctgtagtgctggacagagtgaccctttaagattcgatcgagtcagagagcgcggccgtcgagcacctcccgtgttgcagacgctttgctgggtgctgcaacagcaaaggcgaacatcctagatgcctctgagggtggttttggtgcagaagggaccgtacagatctgtctgagggcggggaagggaaggacacctagcactaccttgaaaccacttgctgaaaccgtaaccctgcaaggtcatgaaattgcccccaggtcctgggggaggagttcggtgggcttttaagtggcatttgttaactgacatgcaactaaagggtgccacgagcctcgagaattttaaacattagttccgggtagggggacctgggctgggggaagtgcatattagaaggcccgggaatgggcaggtaaaagttggtttgtgggtggtgctgttcagttttgaagcttgacggaatctggaagaattccagacacgctgctaaggggattctaggctgtgtcgtagcaattccctgctcttaacagtgtggaggatttctaaggcgctacagtgctaaactagattttcgtatcctaatttatatgaagggaccataaagcattagttgaaataaataggtttttcattaagcaaataactgatagtaatatacgagattttcagaatgatatctgatgtgaattagccacataaaatttttggtggcttggccttggaagtcagatttttttttctctaatatggaaaaagaacattcatgggaattaaaaggtcactgtagttgaattctcagttgtatagattgtcccacttgttaaccactcagcagacattagctgagtgcttccactccacccggtggtacttggaaagtgcccaaatgtgatggtgagcaaatagataaggtctcagtcagtttcctgggacagtgcctggcatgcagtggtgctctgcgaacatcagctctcctggccttaccttcttgccacgcattaatgttatctgtcagtatttttacaaccttagtttctaagttgatctttaaaaaagtggaaatagtttctgaaacaaagacaatattttacaaaaaattttagaaatatctttttttaaagcacctgtaagataatttgaagctcttttagtgaaggattgttttaaataagagctctcagttcaagacaactactgttaggagcttaaatcggaaccacaatcagcatataaaggtcctaatcctgaccttaatccctttggaatattggttttataaatcatcaatcaacagtgttccactatgaaagcatatt

SEQ ID NO: 913791 - DNA, 4001 bp, Homo sapiens
ctggaaaagaaaaatggtaggaaacattttaggattaaattatgtctgccctgattttcacgaggatcagctgcctgcatgtccatataaggttgtctatactactggcaattctacagatttcagtttctacaccaaacggctctggtgagcacgtcatttttccgggcagggaccttcctgagcgcagcctaccccaggggctcaggctgacttagcagtgtgcctctctcctgccacaggcaatccctccccctccccaggctcgcacacagccggtgggagcaagcacacgggagaatcatgctttcccctttcccccgaaaccaggcgtctgagttacaatgcacactacagcgttctgaagagaggcagcagcgatgtattttattgatttaacaaagaaaaaagaaaagcacatttatggagatcttgttaaactttaataatccggccaatttaaaatctccattacgctgatgagcacccgggacctgaacgaagctctcggagagtttaaaagcctccaaaggcgaccaagagccaggtctggccgtttgcccaaatcccaaacgcccgaaggaaactacttagatcaatttcaatcacgtcctagggagcagcttctttgaggaggaaaaaaacaggagggggagggggaaaaggcaggagaggactgtgaacaattaagcaggcgtgtgaaggttgcaacaccctgcatttcatcttccttaaagctttcgaggcttggaaacccacagcctctatttgatctggcaattcactttgtgacgaaaaacaaacagcacagcagggcagggagacaacagtaaaccctcctgcgatcgctggagagacaatgggaggagtgtcagtctctctcccctcgggcgatgctacctataagcacggggacctggtaagtttcttaaatttccaatgcccccaaattccagttctacgacaatgtcggaaaccgaggtccttctttccaaactaagacttgaagcagtttggacgggctcattgtcacaagactgacaagtcactggggtgtacacagttttatttttatttttcttggtcaacaagagaagcagggaagacaaataaggcagatctaggggaaatgttaggcattccaaagagcagaaaacacattggaaatggtctacagtttaaaaaagacaaaaataaaagagagctggtctacgttctgggggcaaaatgtgatttttttaaaaaactgttaagtacaagcaccaagaaacaaaacaaaaacaaaatccgttaaaaaaaaacaacaaaaaacaaacaaacaaaaaaaaaacaccttggcaggcagagcaagttggtccccatgacaagctccagctgtggcgtctggagcggggacaggctccgaactcgtgccaggggctcggccgggctgtgccgggagttggggcttccctgggcggacgctgatcgcagcctggaggatcgatcggcgggggcgctgcgcccgctcccccggtgacagcgcggggcccaggcccagcggaccgcagagagcaccgggtctgaaccccaaacagccgacccggcccgcgccccggcgcccgcagggaaccgcggccggctgcgtttacctgttgccagtactcctccagagacggcagcgccgagaagtagccggtctcgtgcacgatctggagctcctggaagatgctgcacatggggagcacgtccatgtcgggccgggttggacggagcccgcggtcgcgagggcggcgaggcgcgcggtgggagccggagccgaaagtctccccggagcgcaggtgaaagtttcatgcaaactccaggctcgcagagacgcccggccggaccctcccgcagcccgcagcgcgcggagcccacacaatatttgcaaacaccggactgactgcaaacgtaacccctgcaaaacttccctattcaaagctccgctgccagcctccccctccgcccccgcctggctccccccactccccctccccccacgtgactcgccccgcgcccgccccgtgcgcggcccaatcccgtggctcccggcccgggggctgcgcgccgatgatgtcagctccggccaatcgcaggcggcgacacacagcggccccgcctggcgtgaccgagactctccatcacggcccgcaccattggctcaattcgaactctgctcgttctgattggaaagtggcctcgcaggctatttttagcagggtatataaggcgcgggcggccgcgcgccggaggagtccgcgctgtgaggtgcgcggccgagccctgcactgcgcccgcggccggagctaagggagccggggctgggagagccggggcgggccgcgtcgcctgtccccagtcccggtctctcttccccgctgcccggtcccgccaccccacgcccgtcccggtcaccaagccgggccctgtcgccgcgcgagccccggttccggcagctcaccctgcgggcggccgtccggtcccggggccgcccggttcccccccgtccccttctatgcccgaggccgccccgtccccaactgtccccttctacgccgggggcttcccggtcgccaactgtccccttctatgcccggggccgccccgtccccaactgtcctcttctgcgccgctctgtttccctacatccccctagtcatcctctgttctctaaccttggggtacccctctctgtcctcctccacctccgggtccctctctgtccccctccatccctgagcccgtctccgtccccctccagtcctagggtcccctctgtcctccgggccaccagagtgggggaggggagcacgcaggctccccttggaattgggagaaacgtgtttatcttgtagagggcgatcttagccctcaccaaggttaacagctaggttttcccatgaacgtgtaaacaatttaggtgcaagccgacatttagtgtgtgtgtttttttccatataaattatctcctaaaatataccgtaatgttcatttttaagaaaaatgtcgagactcgaaccagagcattttaaaatccaaaatggaaaactgaattgtaactgtattatagtttttgtttcaaaatagtttaatgaacattaaacattttgaaagaatggactatgtaaaaaaaaattagagggttttgtatgttaagttttagagggtccggcagaagcatgtggctgtaagactaggtggggaccttagtgagtctggagtggagaaaggaggtttgtcttgtacctgcggtatgtgggcggtgaaggttatgcagagtgaattgacagtgttcttggctcgtgttcatcacatttaccccagcaactgagagccaggaccagcccttcttggggacctgcaccttaactctgtttccaggaatgcaaatggctttgttttgaaccatccacagatttgcccaagcgcccattgaccggggcccagtgactggcagccgagagcatctgggcagccgttgtgttgggggcagggttctctcagtaattagcgcttgtgaccttggccccgctagttcctaagtaagcaggagtgtggagcaagtcccccgctgagggccaggcacgctggatcagggggagcccgagatgaagggggaaggctctgtctgggccagggaggacaggacggctgtctttgcaaggcgtgtgggcgtcctggtgagggtgtcccattttatctttgggacaattaattattgtcttaatgttttttaataaatccacattcctatagaacttaaattcatccttgtctcttaacatgctttgcccggcactatgaagattatatagtttatttttacaagagggaacctgattagtcataatgcagatacagtacaatggccattgtcattttcagaaaaaaaaaagatttgaaaacagggtacatatgaacactaaatttcaaatagaatagatcctatggcatcctgctgcgctcattgaccattgaac

SEQ ID NO: 913792 - DNA, 4001 bp, Homo sapiens
tagttctacttcctaagggaaatgaaaaaacaataaattcccagactggtgttgatgctcattctctttaagcgggtcgactacttgctttgtagatccttgacgggtggggtgcggggtaggagtgcgatccaactctcagcatttccgaatcagctctctcacggtgacaggtcagcccaatcggggctgtaaacagacttgacaggtttgttctgggctgacggccattgactaggttctcagaccagataagtcacttggctgagtccacagtaggtggggcgcgctcaccagctcaggggtagtgactggacgtttgttgcaacatcggagaatgcacgctctgggctgcagcaggagataccctcaagcacagaaccaaaagggttcaccctaagcggcagggcatcagcgatggagaggcccgagagccctagcgcccagctccttttcccacgtttgggaaggcgcagaataggtcgatgtagagcaaggagtgagtctcaggtctcagtcctttggcttgctcttagggtagcaggcgaggagtggcaccagtttggggactctctccccgcgttctgtaagaatcggcggcagccagcaggcggggaggcgggggcacgtgtttggatgtgggtgcttgtgtaaccagttccccaagcgccagccccgacagcgctccttcgggaggctggtccgagcccctgtttccgccgcggcgcaggaagggttggggttccgctgcctgcaccaggcaagagcaccccgagcaaaggaagaagacgacttgcctccggagctatcactggggagtgggaatttggaaagttccccaactagggacacacgtgacctccttcggaaagtagttccgactgtggcccgtgtatccttccacctccttttgaaccctcctaggtctcctcgccccgcccactcgctgggctgcagcttcctaccgttccgtactttccactcaacccggtaaccccaaacgtgcacggtccggccggggcgcgcggagcctggccccgggcgatccatcctgccgggttttcacggcggccaagggggggcggggctaggtggtctctgagaaccgagcttgactccgacgccgcgaaccgacctggagcccgaggggaaagatgctcgactctcttgggggcaccggagcgggcgcaggagaggcctgcggggtgcgtcccactcacagggatcctctttcagttcatttagataggtgccctttgggcccttgaaattcaacggctatgtgttcacgttcagcacgctcggctgagagctttcatttttagggcaaacgagccgagttaccggggaagcgagaggtggggcgctgcaagggagccggatgaggtgatacacgctggcgacacaatagcaggttgctctttgtgctaagactgacaccatgaggacacagatttgggggaagggggaatctctaggcaaaggctgttacagtcaaatctctgcgaacgattgtgatccgacagcggtgcaaaaggaaagagcgaatgcagtccacgccgcggaaatctaggggtagaggcaaggggggagggtattccccttgcagggaccgtccctgcatttccctctacactgagcagcgtggtcacctggtccttttcacctgtgcacaggtaacctcagactcgagtcagtgacactgctcaacgcacccatctcagctttcatcatcagtcctccacccccgccccacaacagcctaccctgcctccggctgggtttctgggcagaggccgaggcttagctcgttatcctcgcctcgcgttgctgcaaaagccgcagcaagtgcagctgcaggctggcggctgggaaccggcccgagcaagccccaggcagctacactgggcatgctcagtagagcctgcggcttggggactctgcgctcgcacccagagctaccgctctgccccctcctaccgccccctgccctgccctgccctcccctcgcccggcgcggtcccgtccgcctctcgctcgcctcccgcctcccctcggtcttccgaggcgcccgggctcccggcgcggcggcggagggggcgggcaggccggcgggcggtgatgtggcgggactctttatgcgctgcggcaggatacgcgctcggcgctgggacgcgactgcgctcagttctctcctctcggaagctgcagccatgatggaagtttgagagttgagccgctgtgaggcgaggccgggctcaggcgagggagatgagagacggcggcggccgcggcccggagcccctctcagcgcctgtgagcagccgcgggggcagcgccctcggggagccggccggcctgcggcggcggcagcggcggcgtttctcgcctcctcttcgtcttttctaaccgtgcagcctcttcctcggcttctcctgaaagggaaggtggaagccgtgggctcgggcgggagccggctgaggcgcggcggcggcggcggcacctcccgctcctggagcgggggggagaagcggcggcggcggcggccgcggcggctgcagctccagggagggggtctgagtcgcctgtcaccatttccagggctgggaacgccggagagttggtctctccccttctactgcctccaacacggcggcggcggcggctggcacatccagggacccgggccggttttaaacctcccgtgcgccgccgccgcaccccccgtggcccgggctccggaggccgccggcggaggcagccgttcggaggattattcgtcttctccccattccgctgccgccgctgccaggcctctggctgctgaggagaagcaggcccagtcgctgcaaccatccagcagccgccgcagcagccattacccggctgcggtccagagccaagcggcggcagagcgaggggcatcagctaccgccaagtccagagccatttccatcctgcagaagaagccccgccaccagcagcttctgccatctctctcctcctttttcttcagccacaggctcccagacatgacagccatcatcaaagagatcgttagcagaaacaaaaggagatatcaagaggatggattcgacttagacttgacctgtatccatttctgcggctgctcctctttacctttctgtcactctcttagaacgtgggagtagacggatgcgaaaatgtccgtagtttgggtgactataacatttaaccctggtcaggttgctaggtcatatattttgtgtttcctttctgtgtattcaacctagggtgtgtttggctagacggaactcttgcctggttgcaagtgtcaagccaccgattgctttcttaggctatctatatggtctcttcctgagggctattgtccgttaatacagaatacagtacactgttagtggattagcgagctcggtaatccggtctcctaaatgaacaaaaaagtagacgctttttgaggttgagcatatttcgattaaatcttggcttaggccctagatcaagggtttagatcagaataaaatgaaaattagtgttgcacgtacgcatattgcatcagaatcttgcagtgattgttttagtttcctgagttgcattgatagattcttttaaaatatgactgatttgcataactttagaagcagaatcattttcagtatatatggtgcacattgagggcaaaaagtagttttgttaatgtttaaacttaagttacctacaactttgaactgtatgtagaagttttgtagtttgaagtcaatagtgccataatataccttataaggcgttcttactagatctttgttatatttacctttttctctccctatggggtgatgtaggatagtgcttgaaatttgcacttcagtagcatttaatgttcagtgctcttgtcataaacatagaatggatattgagtagtttctgatcccagatggtaatgtgtaggttcaagggtattgtgtgtagcaagtgaagattgcagaaataaaact

SEQ ID NO: 913793 - DNA, 4001 bp, Homo sapiens
agtgagttcctacatcttatgaagcctgcatatgtcctgggcctggcgccaccgtgctttcccggcagctgccctgcacccttggccttccggcattctgggatgatgatgcaacctcaccgtgccctcacctcacccaggacggttttcccatgcaagtcaggtgccccgatggagatttcagaaccttccaagccaaacacgtgtgggaagcagagtctgaacgccaggggaattctgagacatggggtgtgttgggctcagtactgggcacagggttgggccagggaccacccgatgctttccaggagtgtctgcgaagggcccacctgaacgttcccactgcacgctgcaaactcggtgggatgacagttcacctggaggccttggtggacgtcacaggatggagccacccaccccagtactgtgccggccgggagctgtccggccggcccgaggacactggtgtgtgcgtgggggtggggagcgggagtggggagtgtgcagaaagacagcctgtggctccaagtgggctcgcgcctggcgcggcgtgttgtgtgcgtggcaccggctgctgcctccgtgtgcggagcggggaggccctcaaggctcaggcctctgatgcacgaaggagctgtgggaagagctgcgtcctcagggccgcctcctaacagataccctgggatgtgtcctggggcgtttctgaaggctgcgggctgcccctccctctcggtcagagccgaggtgatcttggaagctttattgcctcccctggctgctcctctctgcagccttcaactgcaccgaatccaggccatggtgggggcgggggcatcgccaacccccgcacagcctcagctgtttctaggtggctgggccgagggcctcctggggctgaaccttcccagaaggacggtgcttccacagcagaaactcccggtcccttcagagcccactcccctggggcagcaggtggggactgcgagggggtcaggcccgcggctgctgcagccgggattccctgctccaggcttacttggccggctttaaagagagggcgccacaacatcccactaatggctgcaggtgacgacgctgtcacccggagacgcaggcgcccagcgtctgggctcttgcctgttggaggtttggcagatctcggatccctggagggtgagggtccctctgggagctgctgtatcccctgggggccacctctcatgcttccgggcctggcttgtccactccatcccagccaagccagagctgagctacagggtcagacccagccaaggtggcgtctgggcagccggtgctgtagggtgggcggtccatgagcagaagcgccagggtatgcagatggcaggcagagcccctctgcaccttgcggggtaggggggtcttgggtgaaggcccggaaaaccagagagcaggaagcagctctcagtctcggggggcagtcatccagcgctccccccaccccccgctcctgaacctcagctccggggacctcatcccccagctcctgagcggcgcctgattggactctgctgctctgcaccccgctggcctcctggggcccggcagggagtaagcagacccccctccgtcctccttgctgcccccacactgtcccgccagggtttccaccaggagctaccgcgcaccaacttctgcaggggctgcccacccgccgccgtcccgtgcgcattcgggggtgctgtcccctccgggtgaaaatcctaacgcgggggctgagaacggcggtgggaacccctcggccatggagggcgcctggggaggcgggagctcacagcccctcccgggtcctccccccgggcgctctccgcggacccctcggcggcggaaggggccccccagtggggccgggggctcacctcgtcctcggggagggtgggcagcggctcgaagtcgtagaagtccaggtctttgccgtcctcctcgtaaagatccgccgcggccgggtccatggcctgcatcctgcggccgcgccgcgcaccgcccccggggcctccggctgggctgggctgggctcggctacgcgcgccctggctccatggagacgcgcccggccctcgcccgcccccgcccgcccgccgctgccgcagtgtctccaggggacgcggtcagggatacggggcgggcccggggggcgcggggggcgcggggtgcgcgggggctgcgcggcgctgtccggacccggcgcctagggaacgtcgctccttcctgggggaggcaccgggggcggagccaggcgtgtggcctccgcggggagccacggggtctgcgccccacctgggccccaagggtcgaggggcggagccggcgcccaggaaagctcggacgggcagaccccctcgccggctcccgccgcccccgtcccacccccgctgctgccgggcggggctgccgcagtcccggggtggcctctgcagcggcgttgggcagggccgggcggggcccggggtggggggcggggcccggggtggggggcggggcggtcgctgggccggggtctctcctgagcgagggtctttcggaggcccggggatgttgggggtggggcaataacgctgcctcatccccacctggaggcatcggagagacccactgggcacccgaccctccccggtcctgggggaccctggggggtcctggggctcttgacctcttcctgccccaaaggccccccggggctttcttcagcgccagggtgaccccggcccacggtagtgccgcggtcagaagagccaggatagccccaagctcggccaagaggcagggagggtggaggagaatctcaccttccccggccacccccagaactcccacaggagagagggcggcttcagggcccggctgtcagctccccgtccgtgtggctggccaggcacacagtaggtacttaatccatgctcctggcttgaaggagcagcagggcttttgaccgcagagtgggagggtgcagtgtgttcagggacgtgaattcccagcactctgtcccctggtcggtcacccgggctgtcactctggcctggcagggagttcaggggctcagctccccgggagccaggtgggcactgaagccggaggctgggagtggggcaggtgctgggcagactccctgcgtccagccaggcagccccaccttattgaaaatgcccaccctggggcccaccctggtccaccgagtcagcagtcaggtgcagcctcccccatccttgggtgtttggaagcttgggcagcaagccaaggtggagtgggctggagctggagaggaggagtctcacagagggtggcctcagccagctgtccctgagctctctctctgtgggccccacagggcctgcagcgccccagtccctgtcttggaaggaggcggaagtggcaggcagactctgctccaggagcctgatcccgctgcaccctggtgctcagacctggacattggagctgagcccctgggctcctgggccctctgctgcagggctggggccgcctcctttgtcaggtctggatgtgcccctgacgcctctcagctgccacccagacttgtgcctccgggggaacgccgggctgacgtgaccccaaagggaaggcaccagggaccccacaagcacaggactttgtcaccgagtgcccaggtcacctcacgggcttggggtgaggatatagacactgaatagggggcaaaggtaaccccataatttggggggcagccatagggcaagcactcctggaaagacgtgcatgcggttggtaaaatgcagaactcacaggctcctggagtcggccgtgtcagcttcggctgttgcggcctaaaacccctcagcaggcatttcccacacctgggtcactcagcgctgctgctgctcagggctgggcacgtggggaggggcctcgggcaggggccgcaggctctttcttttacgcacctgctgctttcctttaaagatttgtgggctttggtctctgttgtt

SEQ ID NO: 913794 - DNA, 4001 bp, Homo sapiens
ttacaattgagaaaatgtaggcaacacgagggtaacttctaatgaataagccatgcctttgtttcatataaataagtcaactcaactcacattaacttttcaaaataccggataaaatttatttctaaccaatgcaagtttcaaagataagtacacaaattaaatttatgattaaataataagcttgttaatctgatgcctttcggaacgcatttcacttagcaaacctcaattaagctatttcttatatggtttgattacaaaactgcctttcagcatattaaatacaaggagaaaaaactgaaaagccacaacgatttcaacttctgtaaattaccctgactgtaatgaggggcgccaggcaggttggggaagtatggaaattgcacactgcacacaccacctgaccaccaagaaaaaagaggacaccactcttccccactgtggtcttcacaaactacaactcagcacctatttcaagtgcatttaaatattcaaacaactgaaactaagagaaaaaaactttcgaaagggaaaataacttgtctgtccccttcaatgttcaccttggagttgctctcatctctagaaaaaggcctcacgcatactgtttatacttacaaactccactgccctgtcaaggaaaaccttcctgttttctcagttatccaaaacttcaaacttccaatttactattaagacaagttattgggcatccacttagagaatctcaaacgaaagccagataggaggtagttttctacagctaggtttctcaagtttcatctcagccaagttttaagaacgttttacgtaaaaataaggggaaaagcaaaattacattcgcatgaagtttcgacgcacaacggcactgaaacggaaagactcttcacgttcccaagcgcaccctgagaggcaggtgcagcagctttccgatggcttctctgccgcccatgtatcccagccccaagaccaacacaggcaatcttcacatctgactttatttttttaactccttcagatccacctctgctcaagtctatcaacaggaaaacaggagcgttccaaacacacaccgagcaacaggatcccaacttcctggttctaaaggaatgcgatgccctgatgacccgtcccgccccgcacccgcacggccgcctatccgggctccggcgggaccgaggagcgagtggcaaggctggcgccgcactgcgggtgccggcgcccgcccggcctgggggcgctcgcggcccgcgaccccggccccgcccaggccctgcccgacccccgtcctcgccggccttcgcccaaccccggcctcccgaccctgaccccggcccggtcttccgggcacccagctccgtcgactcccgcctcgcctcaacgggtcctcctaagccccggccccggccttcccctgccccggcctcggccatcctcagccccagttttcccctgccccggccccggtcctcctcagccccggctttttcctggccctgaccccggtcctcctcagccctggcccttcccgtgccctagccccggtcctcctcaacccggccccggccttcccctgccccggccccggccccggcccaggcccggccctgcccgccgcggccgcgtcctccgggaagatggcggcgcagtgacaggcggcgcggcgcgggtccgagctgggccgggagggacggcccgccgcggcccagggtgcctcacctgtcagcgccgccgccccgcccgaccggccgcccgcgggctcctcgcctcaaccccggggcccggcggccgcgccacacgcggggacggcgaggagagagacggcagggagaggcggcgcggccgggccgggccgggccggaggtaggggagagggcgggcgcgagctggcggcggcggcggcggcggattcttcccctttcgggcccgaaaatgtctcaaccccgggactccagatccccaacgctccttcccgttcgcatgagaacacacagctcccacttccggggccctgcggaagtcccgcccccgcgcggacccgcgcctcgcgccctgaactcgcgcactcacccgccggtcccgcggactggcgctcagccccgggagagcctcacgtcatggtgttgcggcgcgctgattgggcgcacccgacgctcggcccgccccgccgccttcttggcctctccgcgcgtacaccctgctcgcggccttgcgattggcgcgtgcgcgcacatcgccccgccccgcgcacgccgcacgtccgccccgcccgccccgcccgccccgcccgccgtccccggcgcgaccggagcgcctgacgctggggggccgtgtgggccctgacttccggagggctgggccctggtcctccgccaccgcgtgcgccccttaaagacccctgcccgccgcccaggacggatggcgaccccggccctagcctgtccccagaccctggaccaaggccccggccctgccccgaacccctcatcccacccccaggacccaggccccgaccctggccacccaggacacgccctggcccttccccgaactcccaccccacagctgggatcaaggtcccggccctgcccggaacacctcaccccacacccgggacccaggccccggccctgccccgaactcccaccccacacccgggaccaaggccccggccctgccccgaacccctcaccccacccccgggaccaaggccccggccctgcccagaactcccaccccacacccgggaccaaggccccggccctgcccagaactcccaccccacacccgggaccaaggccccggccctgccccgaaggccccaccggggacccaggccccggccctgccccaaactcccaccccacacccgggaccaaggccccggccctgccccgaacgccccacccgggacccaggccccggccctgccccaaactcccaccccacacccgggaccaaggccccggcactgccccgaacgccccaccagggacccaggccccagccctgtcccgaactcccgccccacacctgagacgaaggtcccggccccgaagtcccaaccccacacccgggaccaaggccccggcactgccccgaacccccgccccacacccctaaccaaggcctcggctcagccccggaatccccaaccccacacctgggatcaaggccccggcccttccccaaacccccaacccacacccgggaccaaaaggccccggccccacgtttcctagaggcgctgggttcgggcccacgttgcaacgagtcagatgctcttggtagctcagggaggtgttcacactcctgccgtttccgtgaggatggtgacgactccgaactatagcagcatactctacctacccctgatcagtttatggaagaaaaggaaaccaaacaaagtatgttgcgtttcccttaagcttgctgcctgattttctggtttctgctctgattggctacatatacacatattatcaattattccaaattttaggtttgttcccccattaaaacggcttttcagggataccatattcatggttaaccgtgtacctgtgcttacaactgcttttttaattttgttttttgatacagggtcttgctctatgcaggtctgcactctgagctcagagtgctgtctcgggcccccaaaatctgggattagagatgggagccggtgtacccagcctgtgcttataatttttcgtactcagcgttcaaatgctgacaattctgcattttggaagaaagcctctccggcttcccatagtgggtagactgttgacatcaaggttgggtgccttctttgtgaaaccttgttgcatcctagctttaagggaatttgcaagttaaataattatattcatagtaatgtttttaaagaacatttaacgacataagacacatttcctttaatattaaaagcatgtacatatttcagaaaacttgcttacctggacaacctgccctgaccagtaggccatagtgtc

SEQ ID NO: 913795 - DNA, 4001 bp, Homo sapiens
aaaatcaggctgcggtgggaagaacccgctatataggtttaaatatttatatagaagccatacagaattgcacggcgagggcttccggggcggcggaggccgctggtggcggccggcccggccggccagcctgggtttattgcttcgagagggaagaggcggctgccaggagccgagtccggggccggggacaggggaggaggcgggagttggcagaggaggtcccagctcccctcggcggtccggtccgggaggcgttgggctttcgagcgctaggagcccagggcggcggaagacccggggcgccgctcaatcgtccacgtcgatctcttcgtcttcctcgtcctccgagcagtcctggctgctggccggctggtccgtgagcggagaggcaggcgagagctgcagggcgccagcgcccggggccttcggggcgcctggggggaggaccggagagccgggcctcgacttggccctgccgcagccgccgccaccgccggctgtggcctccgagttctgctcgagttcggccagcgccacgatgtccatctgcccgctggggcccagtttcttggcggactctacgtcggccttcatctcctccaggtcccgcttgagcttagcgcgccgattctggaaccaggtgatgacttgcgcgttggtgaggcccagctgctgcgcgatttggtcgcgatcggcgggggacaggtacttctggtatagaaagcgcttttccaattcatagatctggtggttggtgaaggccgtgcgcgactttcgccgcttcttaggggtctgccgctgcccaaagatggtcataccgtcgcggcctgggaggaaaggacagtgtaggctcgcgttgggagagaggaagcccaccctggctctcgcccccgtaactccgtaacccacccaggcctgtccggcctgcagtctaccaatgttcccttctcagatttaattcagcctccaggaccagggcaagtcttggctatggcaaaccatctcctgtctttggtctcccagaagtccctaggaaaaattgttttggtctctgccccctacctaagagttggtttgaaagacccaaagtctctaagggtatgagaaagccagacagagacaccctaattgcggtgtgaatgttggttctccatcccttcccaatcacttcaactctaccctacccataaggtccccggcaaaagactctcgattccccacgccgagtagccgggctaagagcgcccaggacactgggaacgcaagggagcccggcaaagcaagcagactgcggaaagagcttggccacccttctcctgccaccccccagctctggcctacccagaggtccctgggaaataaggattgggtcccgtcccacatatcttcactcccataagcagctgctcaggctggaaggccctggcggccggagagggcagaggcgagcagaggcataggggacgaagcgcgcagggcacagggcgcgaggcgctgggtgcaggggaacccagcagctgcgcctaccttcggctgcctgcagaacgctgacctccagccccttaaacgtcttgctggcgagctcctccagcgcgcacagcggcgaggtctgcgagagcagcgcgcggcccgccaggggcaagccgccctgcgcgtgcttgtccgcggcggccagcaggtgcgccgccccgcacagcgagtaacttctccgcacagacggcttgttgaggatgtcctcgatgctgaacggcgtcagtggcttgttggagttggcaggcggaggcaggtggtccagcgggctgcgccgccgctcctcccccggcgccgccttgccgtcctccttggaagtcatctcggccttgttcggggtcccggccggggcggctcgggccgcggggacccagcccgcgggcagctcgggcgccggacggcgcgggcaggcagcggcgggtggaaaggaggccgcactgggcagggcgcgggccgggcgcggggccgattagcgcggcggctgaggaggggagaacagcgcggggccccgggaagagggcgctgacgcgggcgccgctgctgctggggcttccagcaatccggggccggagccggggcgcgctgcgcggggctccagtttcgccaaccccggtgctatttaaaggtgtcaggtggctcggcagtggctcctggccccgggtcctggcggccgcagttggaagagccgaggcgagggcgccgatcccggactgcgagggaggcggagagacggggcaattgactattgctaacaagttagccttgatcgcggtgtaatcaattatctgcagcggcacttctttctctttctctctcctttctccctttttcctctcttctttgcctctgttctctcctcctgttctcgctctccctccctccctctctcttctctcttctctgctccccccttctctctccttctctccctctccctcgccctctctttcactctctgtctgtccaatgcaggcggctgtaagttgggaagctcattaattagcgggccgggggtaggaggagccggctggaattagcctgcctaatgcgcctgtcagtccgggcgctgcgctgcgttcggcccgagctgtttgtaaattacattagctgctcctttattgcacccgaacctcgggcgactgaaaagccaccgcccccaccccaaactgcgagccgcgctcctggcgcacccgcctcccgccggcctagctgcaatgaccgcaccggcccgaaggtctcggtctctccgacccgggatgtggagcccgaaagagtggtgggaaccccagcccgggagggacgcggccgccgctcgggccaggtaggaccaggagcccgggtgggccccgctgccacccagagtggactttgcggagctgagatcaagagcccagcgcctctacctctgaccctcttgcccctcaccccactgcctgggcgacgcgcctggggagagggaatctgaagccctcctgcgctggcccgcaggaggtcagagccggctgcgcagccttgggtgggcgacgcgggaagggggtggaggaccccaggggttgggggagggggctagtcggagagctcagccttctccacgcggagaggcggaggagggaattgttggcggctctggacgcctctccccggcctgattccgaagcggccgccctacctcctccggcaatcttgctcactttcctccggcagccgctccccaggctggctggggccaccaacggcctgatgatgggcgtctgaagagtagccaggccaggtgccggggctaacggggccggctccgtgcctccctgctgcgctccgcccgggccccggccggggccccgctgccggccccgcctagcccagcgcccggcttgagtgcatggccaggccgactccagctgttccggatgcggggcgggggcccggcgggagccaggccgcggctggggctttgctctcaggaactcgcagggaggccaggcttccagttaggctggggctaaagaccttagggcccgggatctgtgaatatcgggagaacatgttgtgtgcattgttacttgaaggtgtttgtgtttttgaatgtgtgtttgtgtgtgtttctccatgcgtatatttgtgtaaatgtgtgtgaacctgtgggtatataggtgtgtttgaactcagctatttctttcatttccctgaggcattccagcagggctgtgccctcaggccttcctgtcttgctaccccattctgtttatgtggggccactggcctccttactaattttccatttctgcccttggagaaaggaggggaggacctagagggggttggagtccagggagaagggctgttcccctcccacacacacacagccctggccctggctttgtttgtaaactcctgggtgggcggtgaggttgggcattgggcagcaccgcttggaccagaaaagggcccagagaggccaaagtgaggat

SEQ ID NO: 913796 - DNA, 4001 bp, Homo sapiens
cacttttaacctttggacaaccaaactggtatcagataccttaaagcattgttgcctatattaatttcggtgttacagtctaaatccttaacgaaactcacgctatacattttcgtaatgaaaccctgtagaaatggaaaggcgtatattctttaagtaaaggttacctgatttttcacttgtttaaagtttcaattttgctttttaatctattatcgaaaacatcccttgtgggacattgtaaagggcagaccctcctgtcaagccagaaggctcaaacacaaagacactgagctaaccaagtgctgtaattcttccaaactgagcctctccacaccccctccacccttccccccaacagatatgtctattaaatcagtgtctgttctccccctcgcacaacaaagagaacttctcaccgcatgaaattgccgctgaatggacaccagaaagcaggatttgcataattccttccaacgaaaccctgtcgggaaggagggaatgaggggcccaagcgaacggatagactctcctagattctgccgggaaagacctggttcccaagaatattcccctgggggagaaggggctggaattctgggcctccccgaggactgggcgtgggggacagcggacgacgagagggcatctccccacacaccagcagcaccgaagcaaagacggggaagtaacaatgctggaggacaggagagtcagacacaaggatggactggggctagggggcggcgggcggagcggagacaccacacgggccacttactttttggaggggggttaaatatatgagttaagcccttatggtcccgccggccgccgcacagagggaaacgggaccttgggagagaaaaacagacaaaacacacagtgtgagaggcgcagctcggccgcccggcccctcccggggcgcccccgtccgcgctccctccggcccgcagggaaaaagccacccgagggcggcccaaggtccgggaggcggggggcggacggggcattcgggcgaggctgcggctccggccaatccccgggaggggacgagagcgacccccgccggggctcctcggtcggacccggtcccaccccctcctcccgcagcacgacaccgaacacaaatacgcacacaccgacccgtgcgtcgaggattaactccccggccaccgccgcccgctgaggaagtgcagccgctgccccccgcggccatgacaccccacttggctcggtcaggcgcacccggggactgtgacagctccagctccctccgcccccatctccacctcacgcttcgcacacgcccgagcgccgggcgcccgcctgcagcccgccgcgcgtgcacgcagacccgggggcgcgccccgcgcgtgggggaggggtggcgcaggaggaggacggcggcggccacagcgcgggtgggggccgagcacgcccgcgcccctcgcgcctcccccagtacagcggcagcgccgcgaggcgagtcgccacaataagccggcggcggcgccggggcgccgggcctggagcgggagcaggggcgggagcggggagggaggggagcgagcaggcggggatggagagcgggagggggaggaacccgcgctcccgccgagagccagccccggggaggcgcgcggaggggaggggccggcgcgcgctcggccgagcaggggagcccgcctggaggtcgcgcgcgctcacactccggggggtgggggaaggggggacgctcgagccaaagagggcgggcgggccggagcagcaattgccacttccccagcttcctccctggtctggggcgaccggcggcggggcggccggaggggcggcggcggtcggcggagggtctcacctacacagtgaatgagcttgtggcgccacgaatccagttcttgccgaaagccgcgtctctcaacggagcattgctgccgcctacacaccctcgccatcttctgccgcccgcccggcccagcctccgccgcggccccgcgcacgcccagccgcgtcgcccggggccgcgcacgcacccgcggcccgggcgtcgcgcctcctgccgggggcggtgcgggggcagggccggcctcacctcaccgtggccccggcgtggcccgggggcggcctgggcccgctcacccgccccgcgcgccgcccgccgggctgcgatcccgccgtccttctacgcggctgccgccgcctctggccgcccgggacggcgccttcccacagccggaagtcagtcccgctggccccgcgccgccttcgcactgtcccccaaggccacggctgcccccgccctccccggggctttttgttttttacgccagccccatttatcacttccaacctgcctatcgcccggcaccaactgttgcaagttccgtaataactgctgctatgaacttctccgtcgaaactgctcctccccagagcctgtttaagaagcagaaataagaataaattcccggatgccggtggatgcactgacctctaagattttcaaaggtgaagtggatacacgttattaagtcattgggagacatcgccaacattgggaaacctagtaaaaagtggaaatcgagcgttttaaataaaaaaaaaaaaaggtttctactagcaagactgatcgtaggcgaacttctcaaggaattttggaatattgtgccaaagtgagaatatttaatatttccaaaagtagacttaactaggaatacttaaagcagagactattggaaatgctttaatttgggatttcaggaaagggcttgaagagaaatattttatatgagcaagcctcttggaataattgaatcaccttaattttgtcactgttacttcgaagagaacgagaagagagaagatgggaaacgaaaggagaaagggaaaagaaatggggtggaaagaaaaaagcagaagagatcgccctataccagtaggcctagtaccctaggattctggcctctttctcccacctttggtgtttaagattaaggacagtgcattcctgcttttagaaatttaaatttaagtttgaagacttaattttaattactgtagtaggtaaagcaaagtcgttaaatacttgacatcaggatcccattggagtattgatttaggtcttttcaaaggtggtggtcctggttctctgcaccagccactggcggaatggcggaatggtgtatctaccaatgaacagatggactgggtgggcctcgggtacgggtggcttgagatgcaaatgcaagggtaggaaggcaccttcccccccaccactcccagcccaccccgccaatcttaaaacattgatctttataaaattcgcaaacgtcccacaggatttcattggcttaagagtattgtcaaatgaagacgccaggaagtattgagtttctgggtacataatactgtcctgagtgttgaaggaagaggactaatacgagattttaaaaaatggctgtggacaaccatccttcaggtgtgatggcaggacatcttgtatcacctgaaacttccttttttcgccgctaggtggtgggtgtgagtcttttgcggcctttaagtttctacggtgtttggaggaaatacgtttcagtttcaaataaatgaacaacgtgtaactctaagatgagtaaataatcaatgtgttttccaaccaccccaagttaatttgtttaaaaaacaatcaaaccaagggtaataattcctcgacataatctcttagtcccagacatatggattcagagaatcctagaggcttcagagatcaattttgtaacttaagatatgaaattggaagcccagacaagtaaggtgatttgaccaagattacatagttgctgggtagagaaagggcaacaaaagccaggagacaagtttcccaatttccaatttaatgctagttttactactctactctgagttccaatttctgcttcacttattttgagttgggaactaactcatggttgacctatcacaaagacctatttggaaga

SEQ ID NO: 913797 - DNA, 4001 bp, Homo sapiens
gcactccagcccgggcaaaagagtgaaactccgtctcaataaagaaaaaacaacaacaaaaacaaaaacaaaaacacatcttgtcaagcagcagtaactaaccactaactagcaatgactgaaaaaatggggtcctgaggcaggagcccaggattaaatgcaaagagaattagaataagatacactaattaaaaccatctaaattaaagcaacatggaactcagaaaatctacaggacaggactacattataaatttaaaaatctttcaaagactaaaaagccctgctgaaaaaaccaatcactaacaaatgtaaaacatacaagaactaaaaattcttcaaaacaattccagcatttgatactaacccacaattctgaaaacgcattaatttcatgcttctcaaaacctgctatatgctctcttctatgatagtccgaaataccaagtaattcaaaaagtacttaaaccgacgtaacattttagtacatgcataataatactttgaaagaataaaacaagcagagatagagcagagtacaggataactgataggcaaaaggctgtttgtttcctggagggcagcactggtcttggattggcaggaggggaattttaaaatatattcatgagacgaattataccaaaaaactgactcatgcctttattatttgcacaagcatatgtttgaaaatgcacttttaacctttggacaaccaaactggtatcagataccttaaagcattgttgcctatattaatttcggtgttacagtctaaatccttaacgaaactcacgctatacattttcgtaatgaaaccctgtagaaatggaaaggcgtatattctttaagtaaaggttacctgatttttcacttgtttaaagtttcaattttgctttttaatctattatcgaaaacatcccttgtgggacattgtaaagggcagaccctcctgtcaagccagaaggctcaaacacaaagacactgagctaaccaagtgctgtaattcttccaaactgagcctctccacaccccctccacccttccccccaacagatatgtctattaaatcagtgtctgttctccccctcgcacaacaaagagaacttctcaccgcatgaaattgccgctgaatggacaccagaaagcaggatttgcataattccttccaacgaaaccctgtcgggaaggagggaatgaggggcccaagcgaacggatagactctcctagattctgccgggaaagacctggttcccaagaatattcccctgggggagaaggggctggaattctgggcctccccgaggactgggcgtgggggacagcggacgacgagagggcatctccccacacaccagcagcaccgaagcaaagacggggaagtaacaatgctggaggacaggagagtcagacacaaggatggactggggctagggggcggcgggcggagcggagacaccacacgggccacttactttttggaggggggttaaatatatgagttaagcccttatggtcccgccggccgccgcacagagggaaacgggaccttgggagagaaaaacagacaaaacacacagtgtgagaggcgcagctcggccgcccggcccctcccggggcgcccccgtccgcgctccctccggcccgcagggaaaaagccacccgagggcggcccaaggtccgggaggcggggggcggacggggcattcgggcgaggctgcggctccggccaatccccgggaggggacgagagcgacccccgccggggctcctcggtcggacccggtcccaccccctcctcccgcagcacgacaccgaacacaaatacgcacacaccgacccgtgcgtcgaggattaactccccggccaccgccgcccgctgaggaagtgcagccgctgccccccgcggccatgacaccccacttggctcggtcaggcgcacccggggactgtgacagctccagctccctccgcccccatctccacctcacgcttcgcacacgcccgagcgccgggcgcccgcctgcagcccgccgcgcgtgcacgcagacccgggggcgcgccccgcgcgtgggggaggggtggcgcaggaggaggacggcggcggccacagcgcgggtgggggccgagcacgcccgcgcccctcgcgcctcccccagtacagcggcagcgccgcgaggcgagtcgccacaataagccggcggcggcgccggggcgccgggcctggagcgggagcaggggcgggagcggggagggaggggagcgagcaggcggggatggagagcgggagggggaggaacccgcgctcccgccgagagccagccccggggaggcgcgcggaggggaggggccggcgcgcgctcggccgagcaggggagcccgcctggaggtcgcgcgcgctcacactccggggggtgggggaaggggggacgctcgagccaaagagggcgggcgggccggagcagcaattgccacttccccagcttcctccctggtctggggcgaccggcggcggggcggccggaggggcggcggcggtcggcggagggtctcacctacacagtgaatgagcttgtggcgccacgaatccagttcttgccgaaagccgcgtctctcaacggagcattgctgccgcctacacaccctcgccatcttctgccgcccgcccggcccagcctccgccgcggccccgcgcacgcccagccgcgtcgcccggggccgcgcacgcacccgcggcccgggcgtcgcgcctcctgccgggggcggtgcgggggcagggccggcctcacctcaccgtggccccggcgtggcccgggggcggcctgggcccgctcacccgccccgcgcgccgcccgccgggctgcgatcccgccgtccttctacgcggctgccgccgcctctggccgcccgggacggcgccttcccacagccggaagtcagtcccgctggccccgcgccgccttcgcactgtcccccaaggccacggctgcccccgccctccccggggctttttgttttttacgccagccccatttatcacttccaacctgcctatcgcccggcaccaactgttgcaagttccgtaataactgctgctatgaacttctccgtcgaaactgctcctccccagagcctgtttaagaagcagaaataagaataaattcccggatgccggtggatgcactgacctctaagattttcaaaggtgaagtggatacacgttattaagtcattgggagacatcgccaacattgggaaacctagtaaaaagtggaaatcgagcgttttaaataaaaaaaaaaaaaggtttctactagcaagactgatcgtaggcgaacttctcaaggaattttggaatattgtgccaaagtgagaatatttaatatttccaaaagtagacttaactaggaatacttaaagcagagactattggaaatgctttaatttgggatttcaggaaagggcttgaagagaaatattttatatgagcaagcctcttggaataattgaatcaccttaattttgtcactgttacttcgaagagaacgagaagagagaagatgggaaacgaaaggagaaagggaaaagaaatggggtggaaagaaaaaagcagaagagatcgccctataccagtaggcctagtaccctaggattctggcctctttctcccacctttggtgtttaagattaaggacagtgcattcctgcttttagaaatttaaatttaagtttgaagacttaattttaattactgtagtaggtaaagcaaagtcgttaaatacttgacatcaggatcccattggagtattgatttaggtcttttcaaaggtggtggtcctggttctctgcaccagccactggcggaatggcggaatggtgtatctaccaatgaacagatggactgggtgggcctcgggtacgggtggcttgagatgcaaatgcaagggtaggaaggcaccttcccccccaccactcccagcccaccccgccaatcttaaaa

SEQ ID NO: 913798 - DNA, 4001 bp, Homo sapiens
cctgttcccatgctgctcccagagactaagaagaagagattttctctctcctcccactggacccaggcaccctgccccaacttcagggccaacctcccatccacctccagcctgacaacccctccatacatacatacccgcttacccactatttgtaggaactaagaatcacaatttaagactcatccctctagcttgttcagatccttagtttaactgctctgctcatgtgtgttgatggagggtcagggccctggggtgggctaagaacatgatggatctgaaaggggtacccagcatgggtcaattataaaggagaaaatccacaacataaacatgtacaccaagctggtagaaagagggacgacggggccagacaggattccagcttggcaagctcttccctctcctctccccaaccctctgcagcaggagccagtggttcccatactcggatattctaggattgttaggttctcttattcctccttctgggacccatgccccttagacatcagcctcagcaggcacctgaagtgtgtgcccagcccagcttggcctgggtcacatgattttcaaggaagcttccgcactggcagcttcccttggggatttgtgggggagtggtgggtgtccagctgtgaagtatgtagccaaagcgggctacattcagggacactgacttccaggagaaagctgactccagtctggggcaggagggccaattccaggacccagagtcccggggatggagacagacagtgtgccgtgaggccctctgtagactacctctccagtcgcatggcttctctctttcctcctggcagtgaggtagacgccctccgccccccccacctgccccccaggaaaaaaactcagacctaggctatccctggcaagagctgatatgttttggggaggcagggatctgagcctgggtcctctctcaagttctcagttttgggtcaagtattgctcccccagcttacctctccacaaatcactctatttcctagcctgccctcccactagggcggagatgccagacccaagggtccaattatctggcacctcttaggagtacctccggtgcctcaggagggccaaccttccctggcaacaggcaggaaaagttgaaggtggggggcaagatgggccgcaatcaatacctccctgcaaacagggtcctcagaaacagcatgggggggatgtcacaggataggtaagaggcaatgggcagcagggaagggggggcagcccaaaccagccaatcacaactctatggtgacctgagggggggggtcaaaagtccagagtcacttctgattggctaacaacctggaattctgagaatttcagccccccccaaacctctccccaattagcctacccccaaaaaaacatacacataagccacccccagcgtctcctccccgtgtttctgggctgctgcgcatttacacagttggggaaaacgctacccgccagcctgaggccccgcgtagcccttccagcccccggcttcccccatgccatcgacgccccccacacaagttctcgccaaacacggggtgaggggtccgcagggacggctgggcaggaaggggccgagtggccgcacgccccactcaccaggacaggcacagcccactgacatcttcacatcgcccgcctctgggggcccagccgagtcacggtgcccgcccctcgcggggacaggccgggcatgagccgccgccgccgcccgcggcccccgctgcgctcgccgccggcccggcccggcctcggcccggtgcgggcggcccctggctgcggcgaggggcctgtcaggcgcggagcagacaggaaggaagccaggcaggaaggcgagcggcctctgcgtgtgtgcgcgcgggtgtgagtccgcggagtgtgtgtccgtgtgtgcgtgtgtgcgcgtgtgcgtgtgcgtgtctgtgcgctcccgccgccgtcgccgagcgcccccctctccgccctcgcgctcgcgctccctcgcgccggcgccggctccccagcccaagccgggcagggccgggctttattaatatgctaattgtcctgctagtgggaggggagagccgtgtcaaagtgacccgggagagcgcgcagcaagcgacgacgtgcgtgcgccgcgcggcgggcgggcggcgaggggctgggagcgctcggggaacggcatgcatgtgacgcagcttttaaaaaaggagacggaggcagagaccccagagagggagggcgaaggggagggcttggaggcgcagccgcgcgctcggtgtccgtcctccgggtgccgccggatggggagtctggctgagccggagcgggagccgcggctgggggaggcggagccggggtgggcagtgtggtgtatctctctccaccccgggccgcgctccgggagggaaaagggactgcagaccccctgtccgtgctccctgctgagacgccagccttcttctggaggccccttgtttcgcgtccctaccctaggctggatgggtaaagaagcattctcttaattcttgtagcaacccctcaactcaccccttccctaaattaaccactcctcctttgcctgcgaaaccagttgggactagaactaaaagggttaattaagtggggtccccgccctcctccgcctaagggcttgggatctgtgttttgctggggggagggggctgcggaatgaccaccagattggattacggaggggcgataggaggccatccttccttcttgcagactgacgcatcagtcaagacactctcttcccttcccccctttctccagccttggtgccttcacctccgtaccaaccgcccaaccccaccgcctccgacccccctgcctggaagctgctgtcctttgagggcttcggagatgagaacaggaaacaggcccctccagtgccccctaacccagagaggcagaggctgtgggccgtggggggttggatgggagatgatgtggatggtcaatgtaaggaacactccttcccctgggaggagcctcccaaccttcagtcacacttcaaggactccccaacccagccctaggaggggaggggctccatctccatcccttcccaaaagctcagctttagctgcctcataaacaggaaatacctattagccaggaggagggaagggaggggagccgcctggagtagagagttgaccccctccctcctggggtccccagctgctagcttttctttcttaagtttcagtatgggctccagggatagacgatggagacttggactagtgtctcctccctagggcgtctggccctgactgggtagggggttctcctctttgttacttagaggggtgttggttgagaaggctgtttggttccctcactctggctcagagtctgcacagctggcttgactggctgggggagggttacaaatgcggaggcttaaagtgtttatgagacctcttctctccaccttaggtttttgctgagggagcatgaaatgatggaacggtgcagagtccagggattgaaaagaaggcctgcctaggaatggagaccctccccaccatgtgcttaggatgggggataggggagcttgtacactgtggagtctcccacccccaggtttccccatctccacccccaccaggagcagagaggacctgactgaagccatccacactcacacaagtatttccttggcagcatcccctgcctgagtgcaccccctccctgcattctcccagacaaaggtcagcactagagggagtagagagaacataaggcaacagaacactggcccgaaattgtggatacctaggtttgaacgcaagattcgctcctcaatacctgagtgatttgagacaactgaccaccccacctgggacactagctttatcctctgtaacctatggcttggtgagtatcaaactagacaatgtacacccagtcacgtagcccagtgtcagccaggcagtcctgtaaatacgtgttct

SEQ ID NO: 913799 - DNA, 4001 bp, Homo sapiens
aggggaaactgaggcacaggcccaaaagttcatctgactccaatcacatttgcttccttgggtccctaaaactcgactgcatttggaagggtagctagattggctgtatctagatctcctccccaacttagatacaaaacctattttgtttctttggggggaagagacaaaagaagaccctgtgccaacatgtgtcatttaattctctccccagagccctgtcctcacaatgcaggcaaaaggagggtcccagactgcacagtctctgaagatgccaagtcagagcctgtgtgtgcctgcacacacgtgtgcctcatcctgcctagcaggctttcaccctcagctcgccctaacatgcctatcaagggctggaacccagcagccccaggcagattcagatgcccgcaacaggccctcaccccatgcacgagctctcacgggccacatccatatgctccaagaacagcacacacagccttcacatgccagtctggactgagcctgtgtctccagaaagacagtccccacccagccaccaagtctccccaatccacagacaggcagactaaggccacacaggaagcccaaactcacacagcccaccagaggccaggcctgggcaataaacccaagagtagattctcagacctggccctcatcccccaactaggccatcctttctcccatagcttaaccacccctgcctcctcagtttccgggccacttgaaatgtgttagctcaagaacctgaagagacaggaggcaggacgcctgggtttctctccaattttgtaaaaaaaaaaaaaaaaaaactctcagagcctccatttctctctctagagaatgaacaggcattgtctaggcctgggtaaatagctctgaggagctagagcccaaagctctgggcctctatttacacctccagtgaatggacacaaactcagcatctctccagagccacaactcccagtggctccagcacaagggcttgggagtgagtagagaaggggagggacatcacccagaccatctgtccctgttgctgcctgtccccagcagcaggagtagaggcagcaaggtggggggacggaggagatgtgtcatccagccctggagtcagccatagcccccctcccacctctagcaaattggaagcctttaggaagggggagagaagagcccagaactagtaaagttttctcagggtggaagctgcatcccggggctgaggggggcacctccagctgggtattgccatggtaaccaggctgactcgagggcaggcctcctccctttagggactggccacaggtcagcaggcctgagcgccccggcggctctgggctggggcacctctcccccagcccgcagatcaggcccgggccgggctgagggccttccgcccacccccaacaggctcgcagggtgcccagacttacctgggagaactgagggggccaggagaggtacgggggagcgactgcaagcccagaggagtcctggcaggggtgagggctgacggggggacaacttcagcagctcatgtcccgagtgggacgggcaggcccgactgggagctccagtccgccggccgcacaaagactcgcacgcactgcctcggcccgccccgcggcggccgctgtcccgggggaaagttacaatggccactgggccgggggccgggggccagggggccggcctggggggcggggggccgcggggagtccggagccttctttgtttgcaaggtttccctcaacaatggctgctccgctctttcctctctcctcctcctccttctcggctctccccgccgccgcctcttgctgcctctgcctccgagcagcccgcccgccctccccaggccaccgggcccctctgctgggggcaccaggagaggcaggacccggcactcacactcactcacactcgcacactcaaacacacacgcagcgcccgccggctgcctgcctttctccctttctctccctgcctccctccctccccgctcgctctctccgagcctctctcagaatgaggccccagggcgggcggagggtggagctgcccccaccggccccgccccctccctgagaggaaagaggaagagcaagggagggagggaggctgggacggagggactgctgagaaaaacaaaagagagacagagactgggagagacaggggacggatcagattgggccaggagagacctggatggaggagaggcctgtgggggccaggaacgaaatgcagcccgcctcccccgagccccaggcacggtgctcaggagtgagcaggtgggccaaagccactggcagagatggaggagggcgggctcctctctgcagactccaagatcttcaaagcacctcccaaacctcccccaaatctttctcgcccctgtgatcgctcaggttgaaggctggcccggactgccagcctgggctcccctggtgaaatcctggagcagctggggggagaggctccagggggttatttttgacagacacacattctgacatcagactgtaaacactgattggaggaagggggacactccaggcttccctgcccccaacccagctaaattccaagccttgacttagatcccccttaacaggaagcccccttccccaccaccactgaagacaagtgggtgccagggaaagaggcattgtcagagctagggaaagccaacttggccatccaagggtccccagaaggagcttagtttgctgctgaatcctccccaccaccccagaaaaaaaaacgtgtggttagtggataggacctgttctcccatccagcagggcatcccaagggagcagatatttctattttttttcctaaggtaattttgttgtagcaggagggaatatttctaaaacttgggtagtgggccagaccttactcgtggacaaataggaaaaggaaaatacatagtacacacacacacacacaaacacacacacacacacgggaagggggagcacgaaccttctatttccttctttgcaatttgagtgtctgtttctctacttcctgtctcctacccccaactatattcacacataactccaaggacaggatttcttatgacatactcactagttaactgtgcagtaatattgcacctggctctgtgaacatcttccacataaataacacatctcactttcacataaatcactacctgatacacatttcaacctgtgatatatcttttttccaagacggagtctcgctctgttgcttaggctggagtgcagtggcgcgatctcggctcactgcaacctccagctcctgggttcaagcgattctcctgcctcagcctcctgagtagctgagattacaggtgcatgccaccacacccagctaatttttgtatttttagtagagacaggtttcactatgttggccaggctggtctcgaacgcctgacctcaggtgatccacccaccttggcctcccaaagtgctagtattacagatgtgagccaccgcgtctggccatcaacctgtgatatatctcaaatcctaaatatacccaaatcctggatatatacacacacacacagtctaagtcatacacactgggacctatgacacgcatcctgacctcaatacacacaccaaaactgtgttataacccctaaacctgtgacagcctatcacatacacaccccgatcatttattatgcaaggacttaacctataaatcaccctctctgaagcctgcgtaccattcctcatcacagcctggccatagaataaaccccagctttcacaaacatactgaaatctataacattcagccagaccctgcaacatacagcctatcaccaggacttaagacactcccactgactcccaaatttacagcttaactctggggtagtcccacttctcccccactgcctttaaactttccaaagtgcattcacaggcagtacctcaagagatcctcatagcacatagggccaaatatcctaacagtga

SEQ ID NO: 913800 - DNA, 4001 bp, Homo sapiens
ccccctccccagagtaaggacattcctcctgctatctagcttaaggcttctgggctgccatttaagcccctggctggccggggccaggtggcacatagaccctgggtgaggtcattggctatcctgagtgccactgagcccagtggccaatttgcacccatagggatagggcagggagcaccagcaggaggcctcgagatggtggagctgggggagatgtgggctcagtcccaggcaggggaggccacagggcccatgagagagcacacagaggctccaccttatacaggaaggagtcctgcaagcatgggggtggggagctgtgggaaagggcagtgggaaatccactggggctcacatgctcacaggtcaccacctcatgcaaagtgtgcaaggctgtgggtgcccaggaccctgtggtctccagggcagtagatctggaggggtggaatctccaggttagaacaagccacatctgcaactgaaggatggaggtcagggcctgttccctgcaccagagccaggccagcacccctcctgtaagcatgtggcctctatggctattataaggctctcacggcatccctgggtggggcttctacttctggggtcccctcaagtacccgtggaacaaaaaaaagattactcctccactgggggcattggctcctgacccgctgcccaggttccctggcccctctgccaagccccttcaggccttgcccacttcagtgcttcccctccaaccccttcctccagcccccaggcccaaggcaagtccttaaggccccagagaagaaactgtccccttgttcccctggtgggcagtagcccagatacccctgcctacctaccaccctccagtgacagactgggggcctccccctctggccttgtgcccggaacagcacggtcaggggctcagccaccaggcagggttgtccttgccctgtatgcctcacagttcgccctgagccttggggccttcagccctgggtctaccagtgccttgctggggagtctctttgtttgacagaaactgacggagtgcctactacggtctgggggctgttcccccatcagtccctgctcctggagtgcttcctcaggagcatggctaactttctgcctctctggtgttgctgtctccagccaggcggtagagttactcagacaacccctgatgttctgtgtcatctgcatcaggccatgctgctccccatcacagacactgcaggatagggggccatctcaccaggccccagcacttgtggggaacaagacctgagacagacaaagcagccatggtgaatggggagaagcgcccagccccatgagccagggtcttggtgtctcaagtttgggatggagcaggtgcccagtactcagtccagcccagccccacactctgacagctgggcagccaaggtcaaccgtctgtctgtccatctatccaactgcccatcacctgccctctccatgctgggaatactcccttcccaaagcagctgcccatatctagggaaatgctcaaggcttgggggcaccctgagcccactctaacagtaaagggatcaggaaggtgctgtactctctgtccagctacctgcctgcctgcctgcctgcctgcctgaaaactcagcattttcttctctgctaaaaacacctaccacctgctcatgatgtctcacatgcataacaggccggcgcgctccagtgagcaaacagctgtggctgagaccagaggaccaggccagtcccaggggatggggcatgctctgctttctgagaggctcagaaaggacagacagacagacggacacacatgccctcctccaagcgtgcctgccccatcgggtgccaggctgtggcagggtgcactcacccgggagatagtgaggggcatgttgaagtccttgcccccctgcagacggaagccccagggcccgggcccagtcagggtcacactgtaagacatgctggtgctgtcagcggccgcctctgcagacaaagggtagagagggttgagtgagagggcactcaggcactccgcctgcccggtccacacctctgcccctgcccctgacccccagccttgcctgttctgtcccttgctgcccagccgggctgcgtggagctcttgagaggctcctaagaatagctgggagcgaatgccatcgacactgatatctgccttcggctgcgcccataaatggactgtaaccctacactgtgcctgccagcctgccgcctcccagccggtccaccatgactcacacggctaatatagcccctggggaggggtgtccggcacccagcaccccccaggggggaggaaggggaactggcctggttggtgagaatgctctggtctccttgctcctgtgtcctctggagagcgtagacactcgctcttcctgcccagtggtacccatcctcttgctcagaagaccaggggctgagctcccttgggtaggggctttgctgccgtgtggtccctggccaggattctggggttgtgctttatccagtatggggccctggaggtgccttggcttgagctgagcctccagctggtctgtgactggcccagggttgtccagccataaaaacgatcatcataacagcagctctgggcatagccaacctcagtatgggcccttcactccctgggatcctgagaagctgccacctgggcccgcaggagacaaagctcagggaggttaaatgacttctccaaggtcacacaaggagtggacccaggtcacactggagcctgggctgattcctacagaatgcatgccagataatgggctcccagtagccacagaagcctcccaaagccctggtcctgggcagctggccctctgcctgcaccccttggcatagggtctgaaagcaggtctgaggcaggcccatcccctccagaccctctgggggcccagccagttattcctggctctcctgtctttgtgctctggaaaacttgacggcagcatggaaagctccagctgccagtgccacacgccaggccccgtgccctttgcgcaggaatggcagggggcagggagaagggaggagacgccatttgctcagctgctagacacagggccaggaggggcagggagggggaagcacgtgtggcatgttcagcctgtaccccagagacagtgtgttctggatgggggcctcagcaccttgggacttctgccagtgcggtctttgggccaaccccttccccaagaaagacctcaggcccctatgtggtctggagatagatcaaggcccaccctggctccttggttggagaaactgaggctcaggggaggcaactgggttggctgcttgctggccctcttggaggggtctggcttggaccctgaggagtcagtagaggcctgggtgtgagtcatttctcagcttctagcctcactcctggggcctggcacatgcaaggtacaaggtaggatcacccatattacggggttgttttgtcacttgcccaaagtcacaaaactatcaagtggaagaagtcaggaaaagacctgtgtccttttccctgcttaatcacttccttcaccctatatcatgcagcccagcccaggaggccagcagtccatggccagcatcccttccccataccattccctatccctctctgcaaagccccatgtcattcatccctaactccagccttatgccctttcctaggggtgtttgtccatcctgccaggctggggaggactcagcagcagggcataaccagtgtgggagaaggaaggcacccaccctcagggccagggagctgggggaggctgtacctggagctgcacgctgtctctctggcctctggctcctgcctgatgaagctcgcctctggggaaagggaggggtggcaggagagtgctcttaaaggcgaaggccggcctccctccatccgcctccctcgggagatgtgaagccagtcagagagcagctggtacccatggtctgggcggagt

SEQ ID NO: 913801 - DNA, 4001 bp, Homo sapiens
gtgaggtcattggctatcctgagtgccactgagcccagtggccaatttgcacccatagggatagggcagggagcaccagcaggaggcctcgagatggtggagctgggggagatgtgggctcagtcccaggcaggggaggccacagggcccatgagagagcacacagaggctccaccttatacaggaaggagtcctgcaagcatgggggtggggagctgtgggaaagggcagtgggaaatccactggggctcacatgctcacaggtcaccacctcatgcaaagtgtgcaaggctgtgggtgcccaggaccctgtggtctccagggcagtagatctggaggggtggaatctccaggttagaacaagccacatctgcaactgaaggatggaggtcagggcctgttccctgcaccagagccaggccagcacccctcctgtaagcatgtggcctctatggctattataaggctctcacggcatccctgggtggggcttctacttctggggtcccctcaagtacccgtggaacaaaaaaaagattactcctccactgggggcattggctcctgacccgctgcccaggttccctggcccctctgccaagccccttcaggccttgcccacttcagtgcttcccctccaaccccttcctccagcccccaggcccaaggcaagtccttaaggccccagagaagaaactgtccccttgttcccctggtgggcagtagcccagatacccctgcctacctaccaccctccagtgacagactgggggcctccccctctggccttgtgcccggaacagcacggtcaggggctcagccaccaggcagggttgtccttgccctgtatgcctcacagttcgccctgagccttggggccttcagccctgggtctaccagtgccttgctggggagtctctttgtttgacagaaactgacggagtgcctactacggtctgggggctgttcccccatcagtccctgctcctggagtgcttcctcaggagcatggctaactttctgcctctctggtgttgctgtctccagccaggcggtagagttactcagacaacccctgatgttctgtgtcatctgcatcaggccatgctgctccccatcacagacactgcaggatagggggccatctcaccaggccccagcacttgtggggaacaagacctgagacagacaaagcagccatggtgaatggggagaagcgcccagccccatgagccagggtcttggtgtctcaagtttgggatggagcaggtgcccagtactcagtccagcccagccccacactctgacagctgggcagccaaggtcaaccgtctgtctgtccatctatccaactgcccatcacctgccctctccatgctgggaatactcccttcccaaagcagctgcccatatctagggaaatgctcaaggcttgggggcaccctgagcccactctaacagtaaagggatcaggaaggtgctgtactctctgtccagctacctgcctgcctgcctgcctgcctgcctgaaaactcagcattttcttctctgctaaaaacacctaccacctgctcatgatgtctcacatgcataacaggccggcgcgctccagtgagcaaacagctgtggctgagaccagaggaccaggccagtcccaggggatggggcatgctctgctttctgagaggctcagaaaggacagacagacagacggacacacatgccctcctccaagcgtgcctgccccatcgggtgccaggctgtggcagggtgcactcacccgggagatagtgaggggcatgttgaagtccttgcccccctgcagacggaagccccagggcccgggcccagtcagggtcacactgtaagacatgctggtgctgtcagcggccgcctctgcagacaaagggtagagagggttgagtgagagggcactcaggcactccgcctgcccggtccacacctctgcccctgcccctgacccccagccttgcctgttctgtcccttgctgcccagccgggctgcgtggagctcttgagaggctcctaagaatagctgggagcgaatgccatcgacactgatatctgccttcggctgcgcccataaatggactgtaaccctacactgtgcctgccagcctgccgcctcccagccggtccaccatgactcacacggctaatatagcccctggggaggggtgtccggcacccagcaccccccaggggggaggaaggggaactggcctggttggtgagaatgctctggtctccttgctcctgtgtcctctggagagcgtagacactcgctcttcctgcccagtggtacccatcctcttgctcagaagaccaggggctgagctcccttgggtaggggctttgctgccgtgtggtccctggccaggattctggggttgtgctttatccagtatggggccctggaggtgccttggcttgagctgagcctccagctggtctgtgactggcccagggttgtccagccataaaaacgatcatcataacagcagctctgggcatagccaacctcagtatgggcccttcactccctgggatcctgagaagctgccacctgggcccgcaggagacaaagctcagggaggttaaatgacttctccaaggtcacacaaggagtggacccaggtcacactggagcctgggctgattcctacagaatgcatgccagataatgggctcccagtagccacagaagcctcccaaagccctggtcctgggcagctggccctctgcctgcaccccttggcatagggtctgaaagcaggtctgaggcaggcccatcccctccagaccctctgggggcccagccagttattcctggctctcctgtctttgtgctctggaaaacttgacggcagcatggaaagctccagctgccagtgccacacgccaggccccgtgccctttgcgcaggaatggcagggggcagggagaagggaggagacgccatttgctcagctgctagacacagggccaggaggggcagggagggggaagcacgtgtggcatgttcagcctgtaccccagagacagtgtgttctggatgggggcctcagcaccttgggacttctgccagtgcggtctttgggccaaccccttccccaagaaagacctcaggcccctatgtggtctggagatagatcaaggcccaccctggctccttggttggagaaactgaggctcaggggaggcaactgggttggctgcttgctggccctcttggaggggtctggcttggaccctgaggagtcagtagaggcctgggtgtgagtcatttctcagcttctagcctcactcctggggcctggcacatgcaaggtacaaggtaggatcacccatattacggggttgttttgtcacttgcccaaagtcacaaaactatcaagtggaagaagtcaggaaaagacctgtgtccttttccctgcttaatcacttccttcaccctatatcatgcagcccagcccaggaggccagcagtccatggccagcatcccttccccataccattccctatccctctctgcaaagccccatgtcattcatccctaactccagccttatgccctttcctaggggtgtttgtccatcctgccaggctggggaggactcagcagcagggcataaccagtgtgggagaaggaaggcacccaccctcagggccagggagctgggggaggctgtacctggagctgcacgctgtctctctggcctctggctcctgcctgatgaagctcgcctctggggaaagggaggggtggcaggagagtgctcttaaaggcgaaggccggcctccctccatccgcctccctcgggagatgtgaagccagtcagagagcagctggtacccatggtctgggcggagttcaatggctcactggggagtgagtggggatggaggccagcctggcctttgtcccttctctgctgtactccttgcagtttgaggtgggcctcagagtgagagtccc

SEQ ID NO: 913802 - DNA, 4001 bp, Homo sapiens
gggctcagtcccaggcaggggaggccacagggcccatgagagagcacacagaggctccaccttatacaggaaggagtcctgcaagcatgggggtggggagctgtgggaaagggcagtgggaaatccactggggctcacatgctcacaggtcaccacctcatgcaaagtgtgcaaggctgtgggtgcccaggaccctgtggtctccagggcagtagatctggaggggtggaatctccaggttagaacaagccacatctgcaactgaaggatggaggtcagggcctgttccctgcaccagagccaggccagcacccctcctgtaagcatgtggcctctatggctattataaggctctcacggcatccctgggtggggcttctacttctggggtcccctcaagtacccgtggaacaaaaaaaagattactcctccactgggggcattggctcctgacccgctgcccaggttccctggcccctctgccaagccccttcaggccttgcccacttcagtgcttcccctccaaccccttcctccagcccccaggcccaaggcaagtccttaaggccccagagaagaaactgtccccttgttcccctggtgggcagtagcccagatacccctgcctacctaccaccctccagtgacagactgggggcctccccctctggccttgtgcccggaacagcacggtcaggggctcagccaccaggcagggttgtccttgccctgtatgcctcacagttcgccctgagccttggggccttcagccctgggtctaccagtgccttgctggggagtctctttgtttgacagaaactgacggagtgcctactacggtctgggggctgttcccccatcagtccctgctcctggagtgcttcctcaggagcatggctaactttctgcctctctggtgttgctgtctccagccaggcggtagagttactcagacaacccctgatgttctgtgtcatctgcatcaggccatgctgctccccatcacagacactgcaggatagggggccatctcaccaggccccagcacttgtggggaacaagacctgagacagacaaagcagccatggtgaatggggagaagcgcccagccccatgagccagggtcttggtgtctcaagtttgggatggagcaggtgcccagtactcagtccagcccagccccacactctgacagctgggcagccaaggtcaaccgtctgtctgtccatctatccaactgcccatcacctgccctctccatgctgggaatactcccttcccaaagcagctgcccatatctagggaaatgctcaaggcttgggggcaccctgagcccactctaacagtaaagggatcaggaaggtgctgtactctctgtccagctacctgcctgcctgcctgcctgcctgcctgaaaactcagcattttcttctctgctaaaaacacctaccacctgctcatgatgtctcacatgcataacaggccggcgcgctccagtgagcaaacagctgtggctgagaccagaggaccaggccagtcccaggggatggggcatgctctgctttctgagaggctcagaaaggacagacagacagacggacacacatgccctcctccaagcgtgcctgccccatcgggtgccaggctgtggcagggtgcactcacccgggagatagtgaggggcatgttgaagtccttgcccccctgcagacggaagccccagggcccgggcccagtcagggtcacactgtaagacatgctggtgctgtcagcggccgcctctgcagacaaagggtagagagggttgagtgagagggcactcaggcactccgcctgcccggtccacacctctgcccctgcccctgacccccagccttgcctgttctgtcccttgctgcccagccgggctgcgtggagctcttgagaggctcctaagaatagctgggagcgaatgccatcgacactgatatctgccttcggctgcgcccataaatggactgtaaccctacactgtgcctgccagcctgccgcctcccagccggtccaccatgactcacacggctaatatagcccctggggaggggtgtccggcacccagcaccccccaggggggaggaaggggaactggcctggttggtgagaatgctctggtctccttgctcctgtgtcctctggagagcgtagacactcgctcttcctgcccagtggtacccatcctcttgctcagaagaccaggggctgagctcccttgggtaggggctttgctgccgtgtggtccctggccaggattctggggttgtgctttatccagtatggggccctggaggtgccttggcttgagctgagcctccagctggtctgtgactggcccagggttgtccagccataaaaacgatcatcataacagcagctctgggcatagccaacctcagtatgggcccttcactccctgggatcctgagaagctgccacctgggcccgcaggagacaaagctcagggaggttaaatgacttctccaaggtcacacaaggagtggacccaggtcacactggagcctgggctgattcctacagaatgcatgccagataatgggctcccagtagccacagaagcctcccaaagccctggtcctgggcagctggccctctgcctgcaccccttggcatagggtctgaaagcaggtctgaggcaggcccatcccctccagaccctctgggggcccagccagttattcctggctctcctgtctttgtgctctggaaaacttgacggcagcatggaaagctccagctgccagtgccacacgccaggccccgtgccctttgcgcaggaatggcagggggcagggagaagggaggagacgccatttgctcagctgctagacacagggccaggaggggcagggagggggaagcacgtgtggcatgttcagcctgtaccccagagacagtgtgttctggatgggggcctcagcaccttgggacttctgccagtgcggtctttgggccaaccccttccccaagaaagacctcaggcccctatgtggtctggagatagatcaaggcccaccctggctccttggttggagaaactgaggctcaggggaggcaactgggttggctgcttgctggccctcttggaggggtctggcttggaccctgaggagtcagtagaggcctgggtgtgagtcatttctcagcttctagcctcactcctggggcctggcacatgcaaggtacaaggtaggatcacccatattacggggttgttttgtcacttgcccaaagtcacaaaactatcaagtggaagaagtcaggaaaagacctgtgtccttttccctgcttaatcacttccttcaccctatatcatgcagcccagcccaggaggccagcagtccatggccagcatcccttccccataccattccctatccctctctgcaaagccccatgtcattcatccctaactccagccttatgccctttcctaggggtgtttgtccatcctgccaggctggggaggactcagcagcagggcataaccagtgtgggagaaggaaggcacccaccctcagggccagggagctgggggaggctgtacctggagctgcacgctgtctctctggcctctggctcctgcctgatgaagctcgcctctggggaaagggaggggtggcaggagagtgctcttaaaggcgaaggccggcctccctccatccgcctccctcgggagatgtgaagccagtcagagagcagctggtacccatggtctgggcggagttcaatggctcactggggagtgagtggggatggaggccagcctggcctttgtcccttctctgctgtactccttgcagtttgaggtgggcctcagagtgagagtcccaagagtggggacagaggaaggagaggaagtgaagttgctggaggcatcagaggccaggccctggttctctctcccatagcagcaccaacacgtagagaccatatttgtctgaaga

SEQ ID NO: 913803 - DNA, 4001 bp, Homo sapiens
tctgtgtatgtaacttcaaacagccaaaatggccaagtaaggcaagaaaataaaaaaataaaaaacaaacaagtgaaaggcctgggtcctgaatcatgcagttaagatagccaagactcagctgatccacaattgtctaattctgcccatatccgtccagctacaaaccaagtctgcgacctgatacctgagtcctgggagacctcttgacccccatgtgataccgctgtaaggactaggactccaattgccaaacattacacatcagaacaaattttatgtgttccattatgcctgtgaacagatctgatttcttagtcaaatattatttttttgaatattttcaggcatagactgagtatgtggttcccttgtggccaactcaaaacatatagcagagagtaatcctttgcactatcctatattaatattttctttccctccttgtaatggaactagttataaattagatgagattaaaaaacagtctcttgagaattaacattttaaggaattacctagaaagagctgaggtgttttttttccccacatggtaaatcatacagagtagcagcctgccccagatccccggagacaacatcttgagcgcatatgttatgctgggttctgtattgactaattcaaaaactccagggcaaaagaacccaagttcccaagttaaaaatgaaagtaaaatagtggaatggaattgggatcattgttgcaagattccaacaacttcataaatagccattaaagtagacagcatgacaggttaacagatttaccattgtaagaatcaacctgcactgttggtgtgaagtcgcaaacaaacccatctacctctcactttacggatattctgttttctcagaaatagaatcacatttgacaaaattaatattgagatcattttactagaaggcttatccaaatatatgccatattaaaaatagtcatgatataaatatttctcacaagagctgcagcgatggcgtgaataaaaaactcccttctgagatttcagtaaaaccagatctcacaaaggatctgaaagaaaacaaaaaagagaaaacaaacaaacagacacacacaaagagacacacacacacagaacaaaccttatgttaatccggtttagcataacagtgactattttgacactattttatgaagtacgatactattccttcccagatgaagtaagagaaatgaatcggctacaggtttctcatgataatgttcagggctgggggtatctaagcatgttcagtagcagctaaaaaaatcaaaaattctaaatgcagcaaatgttagcactgtcaaatggccaagcatgcaagaggaatctctctctccatgcccttctacaaatacatgcaaagccccaaatccaccggctggaatttttaaatcgtaaattagatatcaaaatgcttacgggccttacaatgagataacatcaggaggaacggtgcgtggaatggatctggcattctcacataaagcattatctttggtacaagtacacacggcagggcattttggcttcgctggtttcttcccctcagtcagcaaaagcgcagataagagacataggaaataagcaattcttttcaggggaatgcaggcatttcccatccttttgcttctttctgattccatgcagtcgagaaaatatccccaaccatgaacagggcttctggaattcagatggtgattgtcttgctctaagaacaggtcacataggagtccacccttttcctctgcctctgtatctctgctttttcaaaacagagacctgcagctgattcgtgagcttctcctcgctccagcaatgcactgctcgggggaagagacctgtgaggtactgtgagatgggagggatccaactgctggaggagagagccgacttgcatcaccacgaaaacactgagcacagaccagccttcgaaggcaaagtgaagtgatgtcacagaaaataaacagctttctgctttcaccgggaggccctttaattgttaccaaaaataggacggcattatgtcttattagtgagtgggtgggcgggtgggtgggagcagtcatcttgcataggatgtcggcaatctcagaaacctctgggagtctgcttttcatgtagcaaacaacctagtaagaaaaactagctttggagccagccccggctggaaaaaatgaagctaaatgaaactctctccacaatattgggctaaaaccttttgatgtttcttgctgagcctacctggctaatgccatcagtgaaagacaaatcagaacagatgaagaatgtgactttcaggggatgaatgtgagtacatacttttctgacacttattaactgtcatgaatgattgattttcctatccccctgggtcccccacgtaattcattctctccttccatgacaaggaagggaaacagaagtgcgggaccctctctgtgtataatccacctccctctcttctcccaccctcccttctttggcagtagcaccagaagcctggaaggaactccctgccagcaggaggcggccagctctagcttcctggggctttgaaaaaggcctggctcagccccgaggctgtgacatggtgggggaaatgctggactgagaaccagacacctggctttgagaacgcaggtctgctgtgaacttgctgaatctattctcctgtctgtaaaacggggatgatagtaaagacattctggaattaaatgaaaatgataggctatgttactcgtgtacttgatgtgagcggatgggcccttggaaaagaaaattcatttaaagaagcaatcaagagcccctggccttggggtgggatagtttagtccaagagagtaggaagacccttgggatggaggaagatgaggaaaacagacccccggttatctcactatggcgaaggcggccatccttcaagctggcacgaacagcctgggatatcagtccacgttcctttctcctctagcttcttagactgaaagtattaaaaggactgcttgagcaaaggcgattttgacataacctcattctgcatcagagctgaaagcattgccattctaccctttcgctcatgtagctggccccatgctaacttcaatcccttgttcagttctctgtaaactctttgcgggggacagtgccattcacgtgcattctcacatttgataactgtctgtttaccccagaagattgcaaggtccacgaggttagagaccccgctagggaacccagggcctgtgtagcattgtgcatgtagtgggcaacctggatggctatgccagcaacagcagagtgtacagtccattcatggtcatgcccagccaaataaacttacagttgcaccttgcagttctaataaagagatctaacctagtcaaggaagtcaggggccaattccctgaagtagcagtgattgagctgagttcagaggtaaggaggagttacagagagggttcgtgagaacactccaggtagagggaacggcatacataaagtctggctcatgatctgcagagcaatgggacacctctgtagaatcaggcaggggagtgatattaactggtttgtgtttcaaaaggaccagtaggttattatcactaagtcagtttttgtggggttgtaaatactgtgtgttgttttttacggaagggaaaaagaaaaactcttcgttgacaagaagtcatgattttaaagtgtattctacgaatgcttcactgtcaaggactctgtggaggagggaatggagggcagtgtttttagaaactgtgacctctgcgcaagcctcactttaaacagtaaaagtgtcacttaaaagttggctgcaagtcgggtttttgtaaattgaaccctgcttcaagtgcctagtggaaacttgctccgtaaaataattatgtggtaaaagttttatggaggattgtttttattcaaagtcaccctctaaatcaactgacttgtaaatgatgtgttctgtaac

SEQ ID NO: 913804 - DNA, 4001 bp, Homo sapiens
actttgggagaccaaggcaggaggactgcctgagccaaggagttcaagaccaccctggcaacataatgagaccttgtctcaaaaaaaaaaattatacaaagaaaagtgtcagccaggtgcggtggctcacgcctgtaatcccagcactttagaaggcccaggcaggtggatcagttgaggtcaggagttcgagaccagcctagccagtatggtgaaaccccatgtctaccaaaaatacaaaaattagctgggcgtggtggcgggtgcctgtaatcccagatacttgggaggctgaggcaggagaatcacttgaacctgggaggcagaggttgcagtgagcccagatggcgccactgcactccggcctgggcaacaagagcaaaactgtctcaaaaaaaaaaaagtgtcctcatggtcaagtcttggctggcacgatgttctcttcctcctcctctcacctaaaccaatgcagtccaacagaattataatgagagccacaaaggtaatttaaagttttctaataagcacattaacaaaagttaaaaaaaaaaggtatacttaatttcaaatattttaacctaaaacagtatattaaaaatattatcaactgggcatgtggctcacgcctataatcccagcactttgggaggccgaggcaggtggatcacctgaggtcaggagttagagaccagcctgcccaacatggtgaaaccccgtctctactaaaaatacaaaaaattagccgggtgtggtggcacatgcctgtaattccagctattcaggaggctgaggcaggagaatcgcttgaacctgggaggcggcggttgcagtcagcagagattgcaccactgcattccagcctgggcaacaagagcaaaactccgtctcaaacaaaacaaataaaaaaagtaactgggcatgatggcgggtgcctgtaatcccagctactcgggagcctgaagggggagaatcacttgcacccgggaggcggaggttgcagtgagccgagatcgtgccattgcactccagcctgggcgacagagcaagactccatctgaaaagaacaaaacaaaacaaacaaaaagtatatcatttcaacaggcaaacaacataacccattttcatgtttttattttacattttactcacgaagtctggtgtttttgggggttttgtttatgagaccgtctcgctctgcagtccaggctagagtacagtggggtgatcacagctcactgtagccttgacctcctgggctcaagcgatcctcctgcctcagcctcccaagtggctgggcctacaggcgtgcaccaccacacccggctaatttttaaatttttggcagagacggggtctccctatgttgcccagggtggtctccaaccccctagcctcaagcgatcctccctcctctgcctctgcaagtgctagaatcacagatgcgagccaccgcgcccggctaagtcttgttaatcggtatgcattttacgcttacagcacatctcaattcagactggccgcaggtcaagcgctcagcagcgcacgtaccaggtggccgccctgtctgaccgcgcagccctaaccagcagagtcctggtgctcgccgggggcaacagtggggtcgtccgtggtcagcactgtgcgcgcaccggggtgggaagggggagaccgaggcggggcctgcgccgcggccccgccccctgccgccccgccccctgccggcagccagggagcgggctgagcttagagctcggcggccccagcggcgtcccggggcccactcacctggccaccgcctccaccgagccggcgatggccgtgccgccgcccgcgccgctgtcgtacagcacgcccgagatgtcaagcagcaccccgcgcacgccagccagccgcttgccccacggtgccatggcgcccggccctgctcctcagctccgcgtcccaaccgacgccggcgccggcgccgcggccgcgcaggggcgcctgggaactgtagtcccgcgggcggggcagggcaagaagaccgggtgcaaacccggaactggggcgcggcctgggcaccccggcgtcactcgcccctgaaacggtgtccttttcggaagctttcttcccaggagatcagcggacaaagagcaggaaaagcagaaaacaagtccctaagaaaggtcaaaggcaaattgagacaagaaggcacctgtagccaggggcggtggttcacgcctgcaatcccagcactttgggaggcagaagcgggcggacagcttgtgcccaggagttctagaccaacctagtcaacatagtgagaccctgtctctattaaagaaagaaagaaaaagtacaatacaaaattgaggccgggcgtagtggcttatgcctgtaatcccagcactttgggaggctgaggcgggtggatcgcttgagatcaggagttcgagaccagcctggtcaacatggtgaaacccctgtctctactaaaaatacaaaaatcacctaggtgtggtggcgcatgcctgtagtcccagctactcggtaggctgaggcggaagaaccgcttgaacctgggaggcggaggttgcagtgagccgagattgcaccactgcactccagccggggcgacagagcaagactttgtcttaaaaaaaaaaaaaattatatgcagataacagccctgcatagatgaggatgcataggacctgggctgagaagaaaacgggactatcacaatgcgttaaacccaggaggtttttggataagctataaaataccactcgatgctacattatttttgcaataaatacacattgatattaaaagggaggagtttcctcaatggcccctcggaacctttcaagttattaaatagaaacgagaacactttacttctggtccaacatagctttgagctttcaaagaagagaggatcatattatttcaccatttcttttcaggctcttgattcacagaaaggatgaggaattcgttgaaatgttatggggttcaatgaattgtgtatattttgttgacatgcttactaggggagctgtttacaagtgaaataaaatacagttcctaccctttgggatttccactaatggggttggggagtagtataccttatataagggttcttagtcgcagacaatagacaccactccagctagaggggttttgtttacatgaggtgaaggagcttacagatgacgggtctaagtcctacacagccaggagccatgcagccacgagaaacacttaattttactactccattgggaccactgccccatcacttagtgcagcccccagcatagctgcccccaaaagaacaaaacatatccaccactgtgccctccacctgtggccacccactcactttcactgtgtctggcttggtggaacctagcccacgctgcaaaggagtctgggaaatgcagtttttagtgttccaggggctgagtgagtcagtttggagaatctgctaggaacatcatgaaccgtacacgtattgagaccctactctgtgcagtgggcacaaaaaagttctagggtgtgatccttgccttccaggatcaagactgggcagagaacaatggaagaccttcacgactgctgaccaaatgtgtgccaagtggcaatgagtgacacagacacagtcaagaggatgacctctgcaggcctaggagggcagctgtggcttctgggcaggggcagcctgaaatggaccttggagaatggctgggctttagcttcatgccaaggaggaggaaaaggggtgcttctgccagtggtgtgagcctacccatagttgtttcttttcagtcagctctgtgggtactcttgggcaagtcccttttcatttctacgactacagtagacagaatagtgcccccttgagatgtccacctcccaatccccacaacctctaaatatattacctgacatggcaaaagggacttagatcttgcagagcctatgctcctgtagggagattatcctggatggtc

SEQ ID NO: 913805 - DNA, 4001 bp, Homo sapiens
agaagtagtgaactctgaaattcttttcttttttcttttttctttttctttttcttttcttttctttcttttttttttttgagacagtcttgctctgtcccccaggctggagtacagtggcgagatcttggctcactgcaagctccacctcctgggttcaggccattctcccgcctcagcctcccaagtagctgggactacaggcgcccaccaccacgcctggctaattttgtttttgtatttttagtagaaacagggtttcaccgtgttagccaggatggtctcgatctcctgacctcgtgatccgccggcctcggcctccaaaagtgctaggattacaggcgtgagccaccgcgcccgaccgtgaactctgaacaggagcaaacgttatccccttcagtgtgcattggcaaagcaaggccactgcttctacttacaactttgtacttcttcatgataggaaggattgtacagccccaggctattttttatcataaatgcaacctcccaaaagtccattattactagagaataaggagtaaattgaaagggaaaaaattaaaggaattaccacaattgaaaacagaatagcatctgcaggagctgctttcattcagcggttttcctacagaacctgtatcaaccgcccagaggaaggtccatgagagtaacagctaaagctactcagctgaaaatctcacccagttaagttttccttccaacacaacactacatacttagtatgtttttctcaacatactaagccaagcaattcttactaagaaggagatactctgaaaatctcgaaggaggggggaaaaaaaaccttccaggctgaattaagtgtgcttttctgggctgtattaacacctttatctcagttatttagactttgtaacaatctgactcagctttgtacccccaggaccaagcaaagtgccacgtatatattagatgcatagtacagattctgaaaaaagataagagcagtccaacagttcagtggcagaagaaaaggccccaacgcagcatgctatttaactttctaataacaacaattattacgactcccatttaagctcttgcgaggcgccagccaccgcaggcagcgcttctgatctactgtcaattactcctccaccgaccctatggcagtaccattaattccatttttcaggaatctgaggttcacccagctgaagtactggaagcaaagtgtcagctgtttaaaaagcagtatcgctgggactttaaccaggattgatgcccaagtctgctttcgaccacgccgttggctaacaagagaggtaggatgggatgcctggaggagctaaggggagagcacgaggatgcagagagaggaatcagacatccctgctgtcctcgcggtccaggagcactgggcagcttcactgaccggagaccgcgcctgtccaggaaagtggacagcgcccagggaagagagtgggcttctctctgaagttgctctctgaagttgccctggttgattggcagatgccttgagccaacgcccgcagaaaaagcacccgcaggcaccccaggcaagactcgctgggtccaaacgcagagggtcttgccggccggcagagcctcggggcgcgaccctccccttgctgaaggcaccagcttccacgccgcacccgcacctggcagcgccgcggcgccggcactctcacctggagctgtcctgccgggccgctgtctcgagtcgcagtgccagctctcaggggccggggtgcggataggggacctgcagggggcctggtctgccttgtcgggagggcggatgcccaccaccctcggactatttgttcagccaatcagagcagccagccaccgggaagtgcctcggagactccgccccagaccagcgctgccgcttgccagccccccagttgaccccatagagcatgcgccgtaggcgtttctaagagatggagcccgtcctccgcctcgcaggctggcaggtccacagctctaccagcgcgtcgcctacgcatgctctcttagcaaaggctgttttaggcggccttctgctccgcccccgaagctcctgcagggctggcaccttctgcgcctgacagagagcatgtgggctctataaatgaaagtgaatcatgggctccatttaaagcgcttatcattgtgcctgatgcaaagcaatcttgctgctttaaattttttattattattaaagatttgttaaaagaggaaacaatattcaatatgtacatattatttattaatcattttctaaaacaaagattttattgagcacctactaaatgccaggcattagtaagacagtggaggtatagaaaccaaccaaacaaggttcctgttctcttgtatatattctgatgggaagagacacatcatgaataactatataatacatgaggtggtgataagtgctataaataacaacaaaaacaaacaaacaacaacaacaacaaacaacaaggggctgggcacagtggctcacgcctgtaatcccagcagtttgggaagctgaggagggcggatcacctgaggacaggagttcaggaccagcctggccaacttggtgaaaccccatctctactaaaaatacaaaattagcgggtgtggtggtgtgtgcctctaatcccagctccttgggaggctgaggcaggaaaatggcttgaaccaggtaggtggaggttgcagtgagcggagatcatgccactgcactccagcatggacaacagagtgagactccatcccccaaaaaaaaaaaaaaacagggataaggaggatgatatgtatatggtaatcaggaaaggactcttatgaagtgacacctgagcacaggcaaggaggtagttaacagccttagatactggagaaagcacattctgggtgaaaatagcaggtacaaaggccctgtggtaggaatattcctggtgggtcctagccagagtggtgaggtctttgaggctaaaacagaatgtacatagtagaaagtaatagaacatgaagtcctagaagtctggtgccttgggagccacttgtcaagatcttaccgtgtcttctgagtaagatgagaagccagtgtaatattttcaatagaagggcagcataatctagtttagaaagatcattctgaactacagaagcagggagactaattagaaggtgtattagtctgttctcatgctgctaataaagacatacccaagactgggtaatttatgaaggaaaaaggtttaactgactcacagtttcacaggactggggaggcctcacaatcatggcagaaggcaaaaggcttgtcttacatggcggcacatgtgagagaaagaaccaagtaaaaggattttcctcttataaaaccatcagaccttgtgagacttatttaccaccacaagaacagtatgggctagactgcccccatgattcagttatctcccaccgggtccctcccacaacatgtgggaattacaggagctataattcaagatgagatttgggtggggacacagccaaaccatatcattctgcccttggccactcccaaatctcatgtcctcacatttcaaaaccaatcatgccttcccagtagtcccccaaagtcttaactcatttcagcattaactcaaaagtccatagtccaaagtctcacctgagacaaggcaagtcccttccacctattagctggtaaaatcaaaagcaagttagttgcttcttagatacaatgggggtacaggcattggataaatacacctgtttcaaatgggagaaactggccaaaatgaaggagctaaaagccgcatgcaagtccagatccatcaaggcagtcatttcttaaagctccaaaatgatctcctttgactccatgtctcacatccaggtcacactgatgcaggaggtgggttcccatggtcttgggcagctctgcccctgtggctttgcagggggacccttcctcctggctcctttcacaggctggtgttgagtgt

SEQ ID NO: 913806 - DNA, 4001 bp, Homo sapiens
agctgtttgtttttagttttgtgtttaaactgaatattccacaagtcttaagaaattgattctcaggagattgcaaaagtgaactgactcccttctgttgatggaattcctcctgggattatttttttccaagaagtagtgaactctgaaattcttttcttttttcttttttctttttctttttcttttcttttctttcttttttttttttgagacagtcttgctctgtcccccaggctggagtacagtggcgagatcttggctcactgcaagctccacctcctgggttcaggccattctcccgcctcagcctcccaagtagctgggactacaggcgcccaccaccacgcctggctaattttgtttttgtatttttagtagaaacagggtttcaccgtgttagccaggatggtctcgatctcctgacctcgtgatccgccggcctcggcctccaaaagtgctaggattacaggcgtgagccaccgcgcccgaccgtgaactctgaacaggagcaaacgttatccccttcagtgtgcattggcaaagcaaggccactgcttctacttacaactttgtacttcttcatgataggaaggattgtacagccccaggctattttttatcataaatgcaacctcccaaaagtccattattactagagaataaggagtaaattgaaagggaaaaaattaaaggaattaccacaattgaaaacagaatagcatctgcaggagctgctttcattcagcggttttcctacagaacctgtatcaaccgcccagaggaaggtccatgagagtaacagctaaagctactcagctgaaaatctcacccagttaagttttccttccaacacaacactacatacttagtatgtttttctcaacatactaagccaagcaattcttactaagaaggagatactctgaaaatctcgaaggaggggggaaaaaaaaccttccaggctgaattaagtgtgcttttctgggctgtattaacacctttatctcagttatttagactttgtaacaatctgactcagctttgtacccccaggaccaagcaaagtgccacgtatatattagatgcatagtacagattctgaaaaaagataagagcagtccaacagttcagtggcagaagaaaaggccccaacgcagcatgctatttaactttctaataacaacaattattacgactcccatttaagctcttgcgaggcgccagccaccgcaggcagcgcttctgatctactgtcaattactcctccaccgaccctatggcagtaccattaattccatttttcaggaatctgaggttcacccagctgaagtactggaagcaaagtgtcagctgtttaaaaagcagtatcgctgggactttaaccaggattgatgcccaagtctgctttcgaccacgccgttggctaacaagagaggtaggatgggatgcctggaggagctaaggggagagcacgaggatgcagagagaggaatcagacatccctgctgtcctcgcggtccaggagcactgggcagcttcactgaccggagaccgcgcctgtccaggaaagtggacagcgcccagggaagagagtgggcttctctctgaagttgctctctgaagttgccctggttgattggcagatgccttgagccaacgcccgcagaaaaagcacccgcaggcaccccaggcaagactcgctgggtccaaacgcagagggtcttgccggccggcagagcctcggggcgcgaccctccccttgctgaaggcaccagcttccacgccgcacccgcacctggcagcgccgcggcgccggcactctcacctggagctgtcctgccgggccgctgtctcgagtcgcagtgccagctctcaggggccggggtgcggataggggacctgcagggggcctggtctgccttgtcgggagggcggatgcccaccaccctcggactatttgttcagccaatcagagcagccagccaccgggaagtgcctcggagactccgccccagaccagcgctgccgcttgccagccccccagttgaccccatagagcatgcgccgtaggcgtttctaagagatggagcccgtcctccgcctcgcaggctggcaggtccacagctctaccagcgcgtcgcctacgcatgctctcttagcaaaggctgttttaggcggccttctgctccgcccccgaagctcctgcagggctggcaccttctgcgcctgacagagagcatgtgggctctataaatgaaagtgaatcatgggctccatttaaagcgcttatcattgtgcctgatgcaaagcaatcttgctgctttaaattttttattattattaaagatttgttaaaagaggaaacaatattcaatatgtacatattatttattaatcattttctaaaacaaagattttattgagcacctactaaatgccaggcattagtaagacagtggaggtatagaaaccaaccaaacaaggttcctgttctcttgtatatattctgatgggaagagacacatcatgaataactatataatacatgaggtggtgataagtgctataaataacaacaaaaacaaacaaacaacaacaacaacaaacaacaaggggctgggcacagtggctcacgcctgtaatcccagcagtttgggaagctgaggagggcggatcacctgaggacaggagttcaggaccagcctggccaacttggtgaaaccccatctctactaaaaatacaaaattagcgggtgtggtggtgtgtgcctctaatcccagctccttgggaggctgaggcaggaaaatggcttgaaccaggtaggtggaggttgcagtgagcggagatcatgccactgcactccagcatggacaacagagtgagactccatcccccaaaaaaaaaaaaaaacagggataaggaggatgatatgtatatggtaatcaggaaaggactcttatgaagtgacacctgagcacaggcaaggaggtagttaacagccttagatactggagaaagcacattctgggtgaaaatagcaggtacaaaggccctgtggtaggaatattcctggtgggtcctagccagagtggtgaggtctttgaggctaaaacagaatgtacatagtagaaagtaatagaacatgaagtcctagaagtctggtgccttgggagccacttgtcaagatcttaccgtgtcttctgagtaagatgagaagccagtgtaatattttcaatagaagggcagcataatctagtttagaaagatcattctgaactacagaagcagggagactaattagaaggtgtattagtctgttctcatgctgctaataaagacatacccaagactgggtaatttatgaaggaaaaaggtttaactgactcacagtttcacaggactggggaggcctcacaatcatggcagaaggcaaaaggcttgtcttacatggcggcacatgtgagagaaagaaccaagtaaaaggattttcctcttataaaaccatcagaccttgtgagacttatttaccaccacaagaacagtatgggctagactgcccccatgattcagttatctcccaccgggtccctcccacaacatgtgggaattacaggagctataattcaagatgagatttgggtggggacacagccaaaccatatcattctgcccttggccactcccaaatctcatgtcctcacatttcaaaaccaatcatgccttcccagtagtcccccaaagtcttaactcatttcagcattaactcaaaagtccatagtccaaagtctcacctgagacaaggcaagtcccttccacctattagctggtaaaatcaaaagcaagttagttgcttcttagatacaatgggggtacaggcattggataaatacacctgtttcaaatgggagaaactggccaaaatgaaggagctaaaagccgcatgcaagtccagatccatcaaggcagtcatttcttaaagctccaaaatgatctcctt

SEQ ID NO: 913807 - DNA, 4001 bp, Homo sapiens
agtgtgtcagaaataaattattcaataaatatttattgagaaattgtatgttaggagcaatacttcgagatcatatgtagaaatatttgacttgaatacagtgaagaatgtgtaatatttggatctttggattcaagtggaattctttgaaaagtggtgacttcccagttgctgataatatttcaagaaaacccgtttatagtaattcatgcagagcacatagcatagttcctgatttacagtaaaaccagaccagaactctcaaggcctaaatctgaccctctggtctaatagtttgcccactggtttagtataggattagatttaagggtatctcttaaaaatcagtttttggcagagcgcggtagctcatgcctgcaaacccagcactttgggaggccgaggcgggcggatcaggaggtcaggagatcgaggccatcctggctaacacggtgaaaccacgtctctactaaaaatacaaaaaaattagccgggtgtgcgcgcctgtaatttcagctacttgggaggctgagacgcaagagtccttgaaccgaggaggcggaggttgcagtgagcggagatcgcaccattgcactccagcccaggagacagtgtgagactccgtctcaaaaaaaaaaaaaaaaaaaaaaaatcagtttttaactaagccttgtttttaccgtgatattttaggaagagataaactaatatataaagactaaccagtagtgttgtaacattcaaaccagaggctttcatcaaacatttcaggaacccacatgacctccattaagtgatttgccattgtaaagtgaggacacttaacctactgtttgcgttggagaacatctcaatgggctcaaagatgttcaagggcagaataaatttctcaaaatgcttgttgccaagtcctaggaaaataccagtaattaacacatacagaggactcactgtgtgctgtactgtgtgttcaacatggtatacgtgaaatgaactatcttgctaagacagtgttctcatctataaaacagggcctgtaatagtacatttctctatgttaggggaattcattatgataacaaaagtaaagttcttaacatgctgggcatctcataaacgttagttaaatatagttattatgactattatctcatttaattctcatagcaactctatgaagtaggtagcattatattatccattttacaaataagcaaggtaaggctaaaagaggactcgcccaaccaaatatatagaaagtagtggagcccatattttaaactagtctatttccaaaggctatgttcttccccactgtaatactccttcagtatgaccctgggccagcttttatagggacatccccagggagatttatataatttggtctagacttctgttttgaaaagtttataatttaaataaatgttttaatagcctataaggtttcacaatcgtattaataatgatcaattcaacagcagttgatttggatgatattaaatattaaacatagcatattaatacagccaattatatgtcactagattactgatctattccttctcaaaaagaagagtcacagagactagactttcacattaggaacttaataaacaaatttgtaattcaatagttaagaaattatgagactttcacattaggcactaattgcaataataaacaaatttgtcattccataattaagagtctcatgtccatacaaaaaaaagaataaaataaatcaaatcctagaggaataagccataatttaaacagatacatttatgcaggtgaatatgcaacaaatatctaagcctttaaaaatgcatcacttgggataaagaaaaaatctaataattcaaataacaattttgttcagcagaagttctacttacagtttcctcagaaatagttaggattctgtttctctggctggttagtattttggtcaatgttgtattgacttcttatatacaaaaccttcaacaatggtcagattcctcatccactgattacattaccaaaaagacttactatctgggcatcatctaatgttaacaggacaaaactaaaaattaaatattgcattcattttcacataatactgagtgctcacctttaacttttaacaaagacaaatattggccaaagtagttctgaggattaaaatgatttaggaaccattaaaaataatccttgatagcctaaacatataaacgtttttgagccaaaggtataatgcaaatgattatatagtttggctcagatagagaggcataaaatgacaaaaggccacctgttattctttaaaaatgcagcgcataagctattttgactagatggttagataagtgaatgtgttcagcaaagattaatattttattatggtctttgaccagggtctcaaatcctacagataatggtctagctatcatacaaaacccagcccttgacctttaagaacatatttttggtgtctttttccttctaagaaatctaggcttaatacctggacgatgaaacaatctgtacaacaaatctccaggacacaggtttacctatgtaacaaacctgcacttgtacccctaaacttaaaataaaagttaaaaaaaaggaaacaaaaaaatctatgggttatagtttgaacaatatgaatgtgtttattaaaagtatatattaaattatgttttaaaatacagttgatcctttacaaccatcatgagcatctgttgctcgtgggatacatgtgcggaatgtgcaggtttgctgcatagtatacatgcgccatggtggtttgctgcaccaatccacccatcatctacattaggtatttctcctagtgctatccctcccattgtcccctagcccctggcaggccctggtgtgtgacgttcccttccctgtgtccatgtgttctcattgttcaactcccacttatgaatgagaacatgcggtgtttggttttctcttcctgtgttagtttgctgagaatgatgctttccagctttatccatgtccctgtgaaggacatgaactcatcctttttcatggctgcatagtattccatggtgtatatgtgccacattttctttatccagtctattattgatgggcatttgggttggttccaagtctttgctattgtgaatagtgctgcaataaacatatgtgtgcatgtgttccctacagtggaatgatttacaatccttggggtatatacccagtaatgggattgctgggtcaaatggtatttctggttctagatccttgaggaattgccacactgtcttccacaatggttgaactaatttacactcccaccaacagtgaaaaagcgttcctatttctccacatcctctccagcatctgttatttcctgactttttaatgatcgccattctaactggagtgagatggtatctcattgtggttttgatttgcatttctctaatgaccagtgatgatgagcttttttttcatatgtttgttggtggcataactgtcttcttttgagaaatgtctgttcatatccttcaaccactttttgatggggttgtttttttcttgtaaatttgtttaagttccttgtagattctggatattagcccttcgtcaaatggatagattgtaaaaatttctcccattctttaggttgcctattcactctgatgatagcttcgtttgctgcatagaagctctttagtttaattagatcccatttgtcaattttggcttttgctgccgttgcttttggtgttttaaacatgaagactttgcccatgcctatgtcctgaatggtattgcctaggttttcttctagggtttttatggttttaggtcttattttaagtctttaatccatcttgagttaatttttgtataaggtataaggaaggggtctggtttcagttttctgcctatggctagccagttttcccaacaccattaattaaatagagaatcctttccccattgcttgtgtcaggttcgtcaaagat

SEQ ID NO: 913808 - DNA, 4001 bp, Homo sapiens
tagttaaattaattttaatatgaaagctaaagcagtgtaaaatatttttctgttaaacacaactttaaatttttataagattttctgtattgttaatccaaattcaagactgtcttgaaacaaaagcaatacttgtcaaatatcccataactgaaaacaagaaaatggcaggatgacgtgttttttcatccatatcatgctgaatggaaaagctcatttattaccttaataaactgctactagactttatgttgaaatgaaaactttccataatgcaattcaataataatgatttacacatttttctaacatgaatcaatatgcagattttaattctaaacaacagcatttatataaattggctacaaaactacaagaaaaatagttgatattaataaatttagagttgctttgcaactcaaacttgaatttgatattaataattttaagttgacatgagctatttaaatatacttaacttggagagatagagtttttaagttgatatgtttttacttcaaagtctaatcaatttttctaaaaaagataaataattttgtcatagtagatgcaaatataagagaaaattgtttatttatagtcaattcagttactgaaacttttaaatatgtttcaaacaatttaggtatgtgaaactactcttgtaggtgtaaattttatgaactctaaaaacacctcaagtgtgtctaatacaaatttagctccagaattaagatcttttatacatgtaaaataaactctggattttgaaggtttacaaaaaaagataatgtaaaatatctcatcaataatttttctaatacatgttgaaataataatttggataaaatcgtttgctatttattaagttcatgcaagatatcatagaagtaatcactactactagattaaaatattaccttggcctgtaaaccttgtacctaatggagcaggtaatcattattacttcaatttgagttacttgccataattttccatccatgctggttgcctggtgagatactattccatggagcaaatcactggtgtttgctctgctaagaggcaaactttcataaggcagccaaagatgaaagtgagtaaaaagtgtagttttgtaccacagcactaaaactggaggttgccagaattttaaataatgatttttaaaagctatcacccatttagcaaaagtacttaaacaaaatatgaagatatcaaatatctgtaatattaataacattaatccacaactacaatataatttcctaaaagatgacttgagaattatgtttctttagcttctgccattaaaatgattagtttgactctaggtacaacacacaacaatgaaaagtattatatcatacctctctgcttttgttgattttaagtgtccaatatatgtgtcttcaaagtagtcagtcatatattgtgtttcttttagcaaaagttgctaagtagagtcataggaaagctaagaaaaagcatattatactaaaaagaaaaaataaaaagagaacatttagctcaaggcaatattaaattcagcttcctatttttttcaagcccctttcccatacgttaatccaaatacattcacatcttgacgaaaatgagaaaaccactacagaggttgttagtgatagtttcccgctagtgtccattaaaaagcaattaaaagtattaagatatgaaacttccttaaaagtctgaagtagatttatttttctgtctggcagttattgtaataacagcaacaagtagtgactatgcagtctataatgacttaaaggagttcaaatatagaagcaacagtcttaaaagtattgttaggtctcaaaagaagacatttacacggccaatgaacacatgaaaagaagttcaacgtcactgatcattatccaactgaattaccatccggtctatcttcatttaagtattatcctcaaaagtcttgtatatcttccagcaaacagatagtgaaccctcatagtctctgagaattctaactttgattctagttgccagggaaactgcgttgaacatgacaaaatttctaccctcttggtgcttaaattctagtaggataaacaataaataataaataagtaaacaggtaaaaaagtgagattacttctaaaagggattgagatgaagaaaataaagcattcatttttccatcatttaatggactagggagtcactgggtggctattttaggtcaagtggttagagaagacctcttttaggtggcttttaagctgatttgaatgaagtcattcaaggagtcagccttgaaaagatcaagaataggaaaaaagtcaagggaaaaggtcaaggtgattaggaaaaaataaatattagacatgggggctgtctcacctatcttgcaatcctaggtgatctagtcattctaggtcatctagtcattcttacctttccagaaagctgcactactgccaagtagtcaaccaaggacccattatgctattaactgtgaaatcagatgtaacccatggaggttggggcgtaatgagaaattgcaaaccactatggctatttccattcgatgaccatagcaatccaaaattctggataactgtttttgaaagagcgtatgatcatagggagaaagaaaaaagacaaagataaatgcggattcacaactgcaggagatgcaagcaaaaacgatgctgtatacacagagaacagcgtaagtaaaggttttcttctgccatagataagtggaaaatctgaggatgtgttcaaggaaaagaaagatattcagtttagcgaaagcacagaacaaatgaagacacaaatgtaagtgataactgtaggatgataatatattattgaacatttttatgccaaatgaatgaatggaacttaattctgtatgaaactgagagctacagaaagtttttgaggatagtaatgacatctagaagctgggtgcagaactgggaagtaggaagactagttagaaagctacggtaataatcccagtaagaactgatggcctgaactggtgtgatgatagtgggttatcagaatttattaacattagtgtcactaaagttgatacacaaccctccactgctaaatttgactggcttaaaaaaaaaaacctaatggcttgaactcaagtagtgaattcgttttttggcaattactctttgaaatgttaaacgttcacagtgggcagagtgcagtgaagagaaagttccgaccttaccatattctgttcactgttttctaccattgctggtggaaatggaatttgagcaacttttctgttgtacaatctgatgtgactggatgattcaagagacaatggagaaacggtcaaaaagacctgagggctgataggtatcaaggatgagaaaaaagaagctatagaagataattatgaagtttcaagtctcattgtccatgatgatcaaattattaatagaaatgaggaagctggaaaggatggaaaagagcaggagagcagactcagaagaccatgaaggcctgcccttgcttcaccgttgagatgataggtaaccttgggcaaactcacttgaacttagtgtctgtattaacgtgtataaaatggtggcagaggacagttgaaatagattactgcaaatgtactttccagattgacgattttgagattttagggctatggctgtgaatcacattaagcttttaatttcagagaaatctgaacttttaatttcagaaaaatcataaacttcaatgtataattgtacactatttccccaagataaatgtctgctttaaatggcatatttttaaggcttttgacatagtatcagactgtattatgacaaatttgtctagtacacttccatcagtaatataccattgtgtattttgctgtatccctgaaaaaaagacatttttacatttacaaaagtaattcctaacccggggaacatggcaaaaccttatctctacataaagtatacacacccacaaaatga

SEQ ID NO: 913809 - DNA, 4001 bp, Homo sapiens
attttttgtatgtttttgtagagatggggtttcaccatgttgcccaggctggtcttaaactcctcagctcaaggcattcgttcccctgccttagcctcccaaagtgctaggattataggtgtgagcctccctgcctggccacaatgtagtactttaaattgcacctactgtttatcactctatgtgccgtgacggcatgtaatattcctatgaggataatttaagagggatttctaggagttacataaagaggcataggtaagtctgggtggggtgaccctacattcttgtttgctcaggacactctggttttgcctgctggcctggtattattaaagcaccctagtttgctttgatgaaaattatatggtcatctaatgagggaaaccacagggaattgtggagtaccctgtggctaataacaagtgatctattaccaaacagacttgaaagaagaggggaggaagcagttactggaagcccgaaggagaaagttaagctgagataaccaaattgaggaagacagcttgtctaagttgacttcacagggaggaagccagggcaataaaaaatgaaaccttactggcctatttctttccatctcctgctcaccatttccattggctgaattgaactgaaaaccaaaagtcaagggagcttgttgacctgtccttacagttcagcctcttgggcagagagaaaggtgttaaagaacagagagtgagcctagaggggtcagaaaagataccccacctgcagatatacaaagaagaggggaattagtgattactggtatcttctgcgtagaggtttacattccttttctcattaaacttataagaggcctttgagatggaattgtaccatttacagttgagagaacttatgttcaggtagattaacaatttatccaagattatataccaggaagagataaaaagattaatgctaaagtaagtttaactccaaagcttatgccttaatcaaaggattatgcattttcccaagtcagacacagagatgcatgtataaattgtgggctacacagagcaatggtgaagagcccaggctctggagacagactgtgacattgtgaggattatatgtaatatgtgtagaataatgcctaacataaatgctttatagatgattgttcttatcattatagaaggattaaaagctaaaaatccctcatgctagagagagaaaaattatgtgagttcaacagtttggtaggagatcaagggtacttgctggatactttggagagaggaacaagaagagatactaatgaaaaaaaactttggcagtttcgttctttttatggttctgatacaacttgcgtatggtacaggacagcaattgtgcgccgtttatataggagaatggagtatattatctgaatgaattctgtagtagatatttgtcatttggcctttttttctttgcctaacactattccattccacttctgatatgaattcctgaatgttaaaatactttggtaataaacaacagaaaccaacactggcttatgaaaccaaaaaagcatattgggatagctcacaaaatcaaagaaactgctctatcaaaaatctcggggaaaactcaaaggtactctatagagatcatctgtattaagtcatgaaacttctctttaggaagccaccactggatggtagttcaaaccaccaggagatggactattactgccccaacttgggtcagatcttttaattcttggattagttagccatatcaagaaacaggagaggaagcacagacttagtcactggaggaattgctgaaaactaagaaggcacaccagttgtatctaaaatgctgaaatatgaataattccttattttagcatttttttctgaataaatgacttacaatattcatattagcttcagggtttgcattgtttcctttcttgtcataaccatacatagatccaagaagaagcatccagcatgctgctgctaaaagctgccacatttgggatctgcctaggaaaggaaatttaatatatttgtcatcaaagataaattctacgaagtgaaatttggtgtaatctttttataacactgctatgagagagagcagaaacatacttctaggctgtgctttaaccagtagaatactgaattatacaacattcattccatgaaaaatctaaaatgactttttagtaagaaaagaaaaggcacaaggaaagaagaaaagagggaatgaatggaaaggaacagagaaaccaatcaatcaagtttccagtagataactggacaaaagagggaatagataatgtgtagaaaagaaatataatggccaataaattaatcaaagcacatttggtatctctagttactagattggttggtacttttttctgatggtagagttaatcattggcaaaacctttatgaaaaaaatttgttaacatgtcttgtaaatttaaaagtattcataaccttcactcagtaattttgttttcaggaatctatctaaaagaaaaatgacgtgtatataaacactgggtataaaattatttcttattatatatcttaagacagtaaaatttcccaaagtaagagactgttgacctaaattatgggtgagaaaaaatggaattattcagtcatcaaatattatgcttatgtgtgatatgtgaaaattcctactacataatacgtagggaaaaacagacttcaaattgtgcatatattttgagttcaatgatgacacaaaccataatagaaaaaaaaaacctaaacatcaaattttaattatagttatatctagatggtgaatatttggatgattattttctcatttttaaagtgtttttcacactttctaaattttctatatccagtattactttatcataggaaaaacattattatttaaactttttttaaaattgtgaacattgtggagagaaaaagattatgagtatttctcatttgtctttgaaactacttaagtttaaagcaaagaacaactttgcaaaaacaaccaaggggaacatttttcaagagggcttccttttacagttacttataaaatacagatcttcaaattatgttagaaaatacaccctccctgctaatctgttttgctattgtatagtaatataatatattgacatataaattaatacaggttaatatagcttgattctggtgcaactctatggcagcaataataatatcaccttcagaagcaataattattattgctgtcataactgctcttataactatgtattgagcacctattatgtaccaaataatgtgccggacatatatgattttattttattctcaaaataattctaaagggtaggaaatattgggctgggcatgatggctcatgcctgtaatcccagcactttggaaggctgagacgggctgatcacttcagtccaggagtacgagaccagcctgggcaacacggaaaaccctgtttctaaaacaaatacaaaaaattagccagccatggtggcatgcacctgtagtcccagctactcatggggctgaggtgagaggatcacctgggcccaggagtttgagactccagtgagctgtaatagcaccaccactgaacgccagcctcggtgacagagtgaaaccctgtcaaaaaaaaaaaagaaaaaagaaaagaagaaaaacaatttaaaaaaggatgggaaatattgtcctcattttatttaaaataaaactgggtcttacaaagtcaagtaatttgcccaacatcaaacagatggtcatggaggcagaatctgaactcaggttgcctgactctaggaaatgcaaatgaagactgtgctcttaaccactccgtccattcagactagttttacaggggccctctggcttctgtgtgtctaattagtgtttttctaagtatggcccatagaccacaggcatcataatcaccatgaaaaacactgaagactcttagacatcacactgaaaacccttagacctcaccac

SEQ ID NO: 913810 - DNA, 4001 bp, Homo sapiens
tgggccattgccatggaaaggggtactaactcgtgggtcattgctatgacatttgtaaactgtcatggttctggtaggagtgtcttatgctaatgagcagccggggcaactaaaggatgccttccaggccactgctggttcttgctgtttttttttcaccacctgctggtttgtgcttgtttattcactgtatcctgttgggaccagaaagtaagtcctgcccttctcctacctcagaaccagttcaaacttgcaactacttttattctattttgttgaatttacaccaatcgtacgaattttctattttactttgtttttttccaggcatagctgcttaaaggcagagcccaattcaatgggctttagtctacagactcctgaagccccagtagtgtataggtgctgggtacacgcagtgggtggggcccaggaagatcatctctgtctgccactgcagagattcccctcacctccaaaccagaggaattcaagtgggacagtctcagggccagaaggatgactcctgaggactgacaccaatgtgctaactacctagacaaaccacctaatcattgaatagtcaaaagaaacctgatattcagcaccatgcagatacagaatatttctatttcctctcagtttttgaacccatataaggaagcttctgtagaaagggtcttaaatcggtataaatacatgttaaagttccattttctgagagtttgttagataaatctctggaacatgaacattgcacatgatcgtcttactcatctggaggtagcctctcctctttctcacctgggagggtttattgcgtagtatttataattatagactttgtgtttaggcagtcctgaatttaaatagtagctatgctattacattggtatggccttgttcaacttgtttaacctctttaatctcagtatctagatttgaaatatgtgaatgatcctatctactgcacagggcaatgaaattgaaatagaatagtatctctgcttgtgtcataatccctgctatgggataagtgttaccatagggtgaccattactaaaacccagcttagaatttgaaaagctaccaaaaaaaaaaaaaaaaaaaacctcctgggaaaactaaagagatgtactgtcatttatgcattttacttgtaggaggttctgtgtagcactaactcggggtccttttattgctattcagcaaagtaccagtccagaaacaggataaaaagagtagattagaatggtataagatgctactagaagtgtgtgccctgatagcaagaagcaaaggctgacacctttgcaatatggaaaaaaagaataaaagaataaaaggtacagacaaaatggaaataatcaagggactggggtgaacttaaaaggccttaattacttctccactcataggatgaaccaaagtgttcaaggaaaagttaaattgtgtttgaagctcaaagagattaagtcatttgcccaagtttactaaatttgtgtgaggagaccccaggtctactgacatccagtttagcattctttccagtacaatttgctacttcatcactatgctcttctagtatgaatcaccaccatgtataaatataatacataatgtaaataatacacagatacaaacgttaacatgttaagtacctcatttcccagaaatcccaacttacaatattcatgaatgcttctgggtccacagctttagttggcatatgtactgaattcacatttctctggaacatatacgccaccagaatcagaagccacatttccattctgtgtgagacaatccactgtcttgacaaggtttccaacatggtccaacatctgcatttattttttcctgccaatgtaacaactaattctaaagtaagaagaatttgtgggtttaaaaactcttcacatattttcctgctgcaattccctcttccaattctgaagcaaattaggcaagcttagttggtagggaaagaacacaaagtaggctggaaacattgcctaggatgtcccaatactatctgactcctcccattcctccctcacacaacttgtaatccctaatccttcaacttccaggtgtgtagaactttctttgatgtgacctggaattttgtgcatttgatacagcctattaaaacccctgtactttatcaccaggtaataaggagtgtagggaacctctttccttccactcctagattttatctttctttgatagatagcaaaagatggagtctacagaaagcactgaaagtttctatagtcatattctgggtcttcaatgatcactgttttttggttaaagataagtgttgtgataagtgcttttatttaaaatatctaaaattttatggacattttctacttttagggatgggtgagaacattgattagaagaaaatgaatcttccatgtttagcccatttcgtctagttcaattaaatagatatacacaaaatttttattttaagttgtaatcactagttaatcactgggatatgactagatggattatctagtaaataaatcatcagctattgtgtattttagttttttatatatatttattatattttaagttctagggtacatgtgcacaacgtgcaggtttgttatgtaagtatataagtgccatgttggtgtgctgcacccattaacttgtcatttacattaggtatatctcctaatgctatccctccccacttcccccaccccacgacagaccccggtgtgtgatattccccttcctgtgtccaagtgttctcattgttcaattcccacctatgagtgagaacatgcagtgtttggctttttgtccttgtgatagtctgctgagaatgatggtttccagcttcatccatgtccctacaaaggacatgaatgcttccttttttatggctgcatagtattccatggtgtataggtgccacattttcttaatccagtctatcattgttggacacttgagttggttccaagtctttgctattgtgaacagtgctgcaataaacatacatgtgcatgtgtctttatagcagcacgatttatattcctttgggtatatacccagtaatgggatggctgggtcaaatggtatttctagttctagatccctgaggaatcgccacactgtcttccacaatggttgaactagtttacagtcccaccaacagtgtaagtgttcctatttctccacatcctctccagcacctgttgtttcctgactttttaatgatccccattctaactggtgtgagatgatatctcattgtggttttgatttgcatttctctgatggccagtgatgatgagcattttttcatgtgtctgttggctgcataagtgtcttcttttgagaagtgtctgttcatatccttcgcccactttttgatggggttgtttaagggataatatccagaatctacaaagctattgtttaaaataatgggttgcagcctagttattttcatgaactaaatgtctcagttcaactgaatgtgaggcaaatgtgaacaatcccttagcatactaatgattgagcaggtcaggagggttgatttatttgtcgttttaagtaaagaatgtgttaaaagttaaaaaaatattacttaaagtgaaatatttctctattacatcaattcttcagggttgagctaacagcagccacaccaatatgcagacttttggaatgtggtgggtgaaggagccagatgctgaaaccagaaagataagtctgtcagaacatatcttcccacatgactcagcctcctccactttgggctggttgcatgggtgtgaagaggtaagtctgcatccttatctggaccagtgtgaatgtcactaacacagctaatctgatgccagctagaggagccatttgacctaattagaagagcagagaaaacacttatccaacactctgcagagccctgtgtcttcagcaccccatgagttctccctcaaggtaggcaagatgagatttca

SEQ ID NO: 913811 - DNA, 4001 bp, Homo sapiens
tcccataaaagttttctccttttatatttcacagctccttcacacatgtgcctgggattgccagatttagcaaaaaataaaaacaaaagtaagcaaaaagttccaggatgctctacaaaattttataaatagtgataatagtgaataaataatgactttttagtattatcttaaaatgagacttatacaaaattatttgttgtttatctgaccttcaaatttaactgggtgtttcatattttaactagtaaaactactcatatctcactctcatttttcattctgaaactggagataaaagagggagagaatgtcaaacatgacctcagctgctccttaatatgtgtggtgggaaaaaagatgcaaaatgaacacggtaagcagctgccaataaattatttgctattgaaccattgcagatattttggttattcttatcatttctacttcagaggatttgtagttaaattttcccttttaaggagtatcattcccctgctatggcatggctggctcctcattctagaattcaagccttattgacaccatactctttcattctatgaaccgtctgtcccttagatcaaagtgtatgtggatgttaaggttttcagtcctggaaaacttttcagaaatgcgttgtcatttaactagattgttttttatcctgcagagggaggccccttaattttagtgggagcaggagaggttcttcttgggtgccccagagtcaatttcatacaacctagaaaatctccttctgacaatgagaggatccattttcctgggacaaagcaattttccacatgataaatcagtaatgaggtgacaaaatgcaggctctgcctttctgtttacaccctaacaagtacctctggttgcagttagcaagatcagtcttgctgtttgtatttttaggttcctgtctgtcttcagagaattatcaggcaaagagtgagcctccctgataactatttaaagactaatccaataattcaaaccaattttgataaactctgttgatgcatatctagcattaaattcctcctgagaagcaggaggtcaatgcagtccccttttcaggagagacatatcttgtacctgtgctcctagcatgtgttcgcccataaggaattctgttgacaaggagtatatacccatcttcagtggtgacttcatactcttcactggggtagccattgtagatgatgatttcactctgcccagtaaaaatacagtcgttagtggaacttctccaaaggatataaaaaggaatcaaaacaaaccatctgttgtgtgcttattagggtgaattatctgaaatttgtagcaccaggtaactgtaaaattaataaataaagtcttaatacaaaataagtagaattttaaaaaatatctactattggctaatattttggggggttgggggaaaatttagcattgacccattctttctgacaaagctatattatcaagtcaattgtcttttgagacccctcttgctttaaaagtaatagaactatagatcaatagaaggcaatcatgtacatcaacaaatagcttgatattcttaaaacataaattcaaaagaggaggttctatctatagatagatagatagatagataaatagatagatagatacatagatagatagatagatagatagatagatagatagatagatagcacaatagcacaatttggttttcattaccggacagtatttgtttttcagacaaagatctaactagcttgactcttgcagaggttaaaaaccatctacattttatctgttttatcagagattttctgttacaacaggacctttcgtaacctcatactccattagtcctgctttatttgatgttcttcacagttttccatgacttacagtattcatccacacctcaggattcacttcattttccaaatcaaggaatccaccagcatttaaagttccacagatcaaacaagttgttgttaaaagcagccacatcatagaaatgcctggcataaaacatttaatattcacagattaattttaactatcaatgttgattaatgaaataaaatgattagtgaaattattaatgattaatgaaaacttgaataacaccgaaggcagataatgtataaaaaggaataaatacagtgaactaacttggagcactattaatctattttttcatgtagaagttgtcttgattataatccagttcctaaaatgaaataaatttaatcaagtatggaggcatttttggtcttattttaatcaaggttgaattgctttaagtctttgtttgcctacaatttgacaaaatatctaaagattcagaggacaggttttcataccatggccaagtaaaaagtggaggtatcccctagttaagcccagtatcccacaaagtaaacaagaaaaatggatcaataaaactttaaccaaacacaaaagcttatgattagtttctagtgatgtgattatttctcacgtggcacccaaaggcaaattttgcgtatttcaatgtgcagtctcacttccttgccatggtttaaaagtatgtctattcaaaggtagaccaacactataacactaaacagcgtgctcatcatataagtgctacagtcaaatggtctaaatttgaaatccagcctcaccacagaagaagatgtctaacctcaggcaagtgttttagtagctttgtctcttggtttccttgttagtaaaattaggacaataatgtaacctatctcatagggttatagtgaggattaagtcatatataacatttagtgcagtgtaagttcttaataaatgctttcactatttttcttataaaagtgagcaagagataaatattacagataattcactataacaaagtaatatttaacttctagaaatgcagagtttacttctgaagctaaatagctttgcatacattagctatctggttgaagatcatcttatatctgcaaatattatgaaacttttcaaattgtatgaaactaataataagctactgagtccccttatggcaggcattactctaaatagttcacgtatgttatttaagctctgaaaatctccctaattttggtactattattatcctcattttatcaattaaaaaaacaaaggcttagagagatttaagacctgctcaaggtcacagagccaagaggtgagagatctaggatggacactcaggcagcctcactgcagagctcttgcacctgactgccagtgcaactggcaccttccaacctgcctcctggttatgatagatcttcatcttacctagttagatgagcttcacctgctcacaaggactccttattgatgaggaacttctgaacttttgcttttgacatcaggctgaagagtaagagatgattacagtgacagttagaagctagagagatgagaaacaggaagcttgtgaaaaggaggaagctttagactgagacacacacccaaggcgtgtccctgacacaccaaaggccatgatgcacttgcaggttgggaaatagtggtctacatgatgcaaaataaccagtttgacggaatccttcatgtttccactgagtatctgtcattgttgggaagacttagcaacattttcaaaccagtgtgtcaaacagggaagtagaacatactcaagatcttaatggacaatcagagacaatagtatctcccttccccatttgatccttcatgaggatcaaacggagtaacatatatcaaggaactagtgccaaccatgcagtgcgtagggatgtgcgtgactgtaactcatttgagaagatgaggcaaccctgactcctaaatcctgaaaccagaaggaatttggaactagcagtatggcagaggaaactaattcacatgccaaagggatttgggttgctgtcaactttggcacagtaacctttgtttacaccagtggttaaaggcagaaatggaggccaaataacgacaatttacctctaagccccacatga

SEQ ID NO: 913812 - DNA, 4001 bp, Homo sapiens
ccaccacaagcaagaaggcagttctacatcggacaattccaacatcgacaccttctacctggaggtggcctcacaccccacaagcccaagcctcatgtcccaagcctgccctccacttccaatgccaatggcaaggtggtcttacctgtgcttctgacccactggcgttcccacgaatcaatgttcccaggacgcctcctaacacttgaataattcgctagagcagctcacagagctcagggaaaggcctacttacatttactataaaggatgttacagaggagagagacacagagatgcctggggcaagacatatgaggagggcgagaagcttccatgccctcctggggctgtcgaactaaaacgaagaagctgaaagttttgctccaaatgccattgtttatccatttttgaccacctgatctgttccattagcttcaaaagatgccttttcatttgtttcgttttgccttcgatggccttccgcctgccgcaagcaaccctctagaatatgggcctgtgcttggcttttctacacaaacatgagcagccttcaattactgggggacattcatttcctccttccaactagagagcgaggagtgtcccggggagagtgggtccttgagctcctctgggccttgcttgggacttggtccaggaggttatgggaagaaactggtttagaagctgacctcatgggttcgctattcttatgtaacacttaggaagagcagagacccacgcgattcagtcccagagcaatgttgcggtcaagagaacacagtccagctaccaacagttatttcaaaataattcaagctctttgtttatatttctgaaagaaagaaagaaaaaaaaagggtggcccagctggaaactcggctttaagtcccctttcagggggccctcaggtgggcacctgcttggaaacctctccacccctccaaacacccttttcctctctgagtgttcatttgttgatccagattctgaataaatgaagccgtacagaatccacctggcaaaaatggaaactgcctggaggccagggctgagggaaggcctggagcagagccggtgcgcgacctcgcagtgagcagggagggcaggctggggacgttcaccacccagaacgcctctgctccccgcaaccctgagactccaggctcccctgttcctccctccgggagaccctgcccgtcctccccgcggggctccttcgcagttcgggggaagggacgggttgcgtcctcgggacctttctctgcagccacagcagcgcatcccagcacctcctccaggagccccgccacctcctgccacccggactttccccacagcgcagcgtcccctcgtcctctcagggctggaacagcggtacccgcagacagtgcaaaagggaagtccctgttgccttcccatgcaaactgtagggcgcttacagctgctgggagaggaaaggaaagaagaaatacagtgagtgtgatatgggtacaaagaaaccaacacggagcttccgtgggcctagaaaggagcccccaggagaagtacactgggcctgcgtcatcgcctgccttcagcgggctccatccttccccaggcccccctccccacccacctcccacccgcggtcctcccgaggcccccctccccgcccccccttctcgcttccccatccccctcccacccgcggccctcccgaagcccccctccccacctccccacctccattcttcgcctccccaaccccgctccgagtctccccgcctccctatcccgcctcccacccgcggccctcccgacgcccccttcacctccccactcccgaggccctcctgaggcccctgggctcccgctcctccgagttgcctgcggccgagtcctggcgcggcctgggactgcctgttggggggagggggtgggggggggtcgttcccaaagaaggggaaggaggcctttcgtgagcatctgaggagtacatcctcattttgtcttctcactctgtccacccagagcctgtgacccggatccaacccgcggcgcacagaccccggctctgggcacccctggtgagcgccttctgcgccagagctccgtacagcaccagcccgcgctctcccccagcttctgttcatttgctgcagtcctgacgggtcagttgcctgagcatccatgctgccatccatacaaacccaggcacgcagagatgtacatcctttacccagggtgacaccatgtggagctgaatccaagtccgggagtctgatgaccgtgtctgggctctgaccgcgcagccgtctcacagtgaaacaaattgcggactggccttgtcctgagtggccttaggaagctgcagtggcctgcagtctcctggccagtctgtagaatttggcaaagatgaggcaccttatagccttacatgttcttatttttctttccttttctcttctttattttcttttttaaggatttgaattagtatatgtaaagtgcttaacgcaggagctggcagagaaagtggatactcagtaaataacagcaattgttaattgtaaaaagcatgccacttatctggtaaaatcccccattctaagcaccctgttaagtagttggtaattcctcacttgaaagaaattaaaaagaatttttgtcagttttttaaaatattgttttattgtgataaaatattcataacataaatttcactcttttaatactttttaagtgtacaatgcagattaataagagaaatgcatacaaatttattaacgtgtacacgggaaaaataaggtgattacccaatatcccatgaggtccagatacttatacagcgttttttcagagaggagggtggaaggcggaatgtaggtgattctgttgaggggcaataaattattattaaggagaatgaatgggtcaagaaacagagagttattcgtaaatggttctctttgaaaatttaataagctggagaaatggattatttttttgaaagcgtctgttcaggtgtggtcacgtgttggttttcttttctgcaatagataatgagataagagggaggagaaggaaaagtaattgttctctttggtgggtctgcagggtcttcatgtagataagggagaggactcttccagcttctgttgatcttgagggactttaattgaaaatactcataccagggagccatattttggggccaagttccctgcgctccttcaatcctcctgtttggaacttccctagaatttcacattatcaacagctgaatcagtgattatggagagatttgggttagaggaaaagaaggcaaagaaggggaaaaaacaaattgggataagcagaaaagaaaaataaataaatatgttgtcccatatcttcttgaatcagtctcttagtcctaagagtagaagcatttggtcaaacagctgtgtccattctaggaggtggcactacagaggggctgggcttctacagctgatgcaggcaagctggtctttaataagaggcatttctatggaaacaaagaaaaacaaaggtttttcttaatgtctggaatagtccataataaactagtttttctagagtctcagaagtatcttcagattgtagtggtaatcttacagattttcctggattatagtttgaattacgtgttcatgtgaacttcctgagtagcccatacatcagcaggcacaaaggctgtgtacatgtgagttgctgtgctgactcctcctgaagtttatatcaagttgtctaactttagtttgcagggcttcaagaaaagcagttttaaattctagtgattccaagtgagaaaaatgagagaaaagttcaaaagcattagtttgaagacttgcagccaagaaagaattcaggatttagtccaaattgtaggaaaataataaaaactcaaaaacaatgggcaagactagaatctgataacaggcatactgtacttgtcttctgaaatgcaatttttctctcccgtttccccgttt

SEQ ID NO: 913813 - DNA, 4001 bp, Homo sapiens
ccaaacattcagcagtgagtggcacctttaccatcaacccaccatggaaaacttccctggagctctctccttgtgccagggcctgcccatggcatgtaagacacaagccccatgatggtatggatttcacctgcaaggcgcttgccatctcatcgaggagaggaacttgcaggctgatttccatgtaaggtggaagacacagtgatagagaaaagggatggagtaggaaatgagtcctggaattcctgcttcagagggctgtaagccaagactactgcatctattgtcttcagctggatgcgctaatgatctaacagtaatcccactgctttgcatccacagaattctttacttctgaagcacctccacacaccatctctcacagaggtgaagagttgaccaaggtctagagctctgactccaagcgctccttccctcaccccacagtggccccgtggtctcactggtggaggtgaaatccctgggttcccaggccaggcatctgttgctgtgtcaccagaatgaaccctgcctgctgccagcagacatctccggctctggcatctttcagctcaagctgcaaggcttactgtgacctctggaatctgtgctcagaattctcccaggaacaaacagctgaagtatcaaaatgccagtcttcacgatgcaaatggatgcaaaaacagctcttgccagcctatctggaccccagaaagccaggaatgctggggtgccaccccagcttgcagtgtgcccacttagctaagtggaagagcctggcaagggacatggcagggagaagacctagacctggttaaatgggattggacctgccacttagcctcagggaccctttggagacttccgtatgtactgtggacaggggcagatgctctgactcctccaggggggcgctctgctggcaagtcagcaccagggccttgatctccttcttgaagttggtgttgagaaagccatagatgaatgggttgacacaggtggaggccatggcaagcaagtggcacactaagaagatgaggttcccatggcagatggggatggcctcatggtgccagtcttccaggctgttgaacacatgcagaggcagccagagcacggcaaaggccaccaccatcaccaccagcaccacattgacctgcttcatgtgcccagctcgcaagctgtaggtgcccttgtgaaacacgcgcccctgcctctgcaggcgccggtagatgcgtgcataacagaccaagatgaagcccagtgggaggcagtactggaagaggagcaggaaggtggtgtagatggtgcggtggtgagccagtggccaggactcggtacagaccaccttatccgccaggaactccagagccttggagtggttcttgtggaagacattctccaggatgctgttggccaggaagggcagggagaggacacaggcaatgacccagatgagcacaatccccaggtaggcctgtgagatgctgggcttccagcctgttgggttgatgatgagctgatgcctctccagggccacgaggacgagcgagaggatggagaccgtcaccgacatgcactggatgaaggccgacatcttgcagagggtctctccaaagatccagtagtccatgatggtgtagacggcggtcagcggctggcagaggaggcacatgaggaagtcagagaaggccaggttggcgataagcaggttggtcacgttggctttctccttctgcctcacagttacacacatcaggcagaggttacccaggacccccacgacagtctcaatgctgtaggaagtgacaatgaagaccatcacgtccacggaatcctggcaatgttcagagaagttgtatggggtgcccaggggtttgcttctgttttcaccttgtggagattttgggagcagcaaggccaggaggtgagaggtgttcatagtggatgtgaaaagattccaggactcttgaactaagtgatacacttgagggatgacgcctacaaggcaaacagacaaacaatactcagggatcatgcccagggtagaatccagagaggagcagggccgggtagaaaggctctcagctgcttccaacccaaggctggtatctggaggggctattacctaaggctcatggtgagacattggcatccaatgattgctaccttgttagaagcacttgttgcatgctgggtactgtgctcagcactttcgtctattagctagtttattcctagaggtagatattatcaatccgtttcatagatgaggaatctaagaccctgagatggaaagcaacttgcccatagtcacacagctaattagtaacagggcccagttacaaactcaggtcatctaatgccagaacttgttctactaattccctccggcctcaggatgaggctgttctgatgataaagaagttggagtgctgtatgcagactttagtgacggaattgttcagggaacatgggtagaatgccccttgtcacattttatctgaatggagacagcaataaatgccactctgcacaggattgcttgtgtccttccacggcaccccattcccttcaagatagagctaaagcctcggggatccacaatcagtgcaccctcctggtctcagcccctccctgccctggtagccttgttttttaggtgatacctggcaaaactgaagactgcccagtatgcaaagcctggctcatcagcacaccagcttcttcctactacccaccatgtgcacagacatacctggccaaagtcacaggtgcccagtgccctccacagaacctactccatgactatgttcaagtcacttgatgcagtgtgcagctcacaagcacaccagactcttccacatctctatgccctggtacaggctgtcccttctccgaggacctcctcagcacaacggaccccctgccaagactgagttggaatttagactccagagttcccccgtgttagtgccaatgatggatgttttgcatgggaagcaccataccactacatacatcattgtgactcacctctcagattctctagtcattattaatcccacagggttgcagttctcaaccttcagtaaacatcagaatcattctagaagcatgttgaaagtgcacatcccagggcccttccaccaggagatgtagttaagtgaatccaggatgggggccaggaatctgtatttaacaagtagactatgtgattctgatgcacatggcccttggaccccatcttgtaaaacactgtagcagaaaaccctattcgagatattctttaagtctcatatcatggccatatgtattttttacatgatcaattgctatgttaaggcagtttttgcagagcacaaggccaaaatcaaccagagctcagtaaaatctatttgtcggctgtcatgaatgtcacttgctgtgcatctgatctacttataaagatgagtttctaaggtcaggacttcaacacctgcctggccaacatggtgaaaccccgtctctgctgaaaatacaaaaattagccaagtgtggtggtgcatgcctgtagtcccagctacatgggagggtgaagcaggagaatcacttgaacctgggaggcggaggttgcagtcagcagagagtgcaccactgcactccagcctgggcaacagagcgagactctgtctcaaaaaaaaaaaaaaaaagagtctcatttggtcatttaaaagatcaagctgtgaattcacctgatagtttacagtctggttatttaggaaccagatctcgaaggcaggaagatttctccagcactatggtcttcgggcaaaaagggccatttggggctgaacatggcaaaataaactattccagagccaaacacagggcccaatataagataaagaacagtcgcagctgcatgaacctgtggcagaggcactgcactcagaagcagcaaatgggccagaacccaaggctctgggtgaccatcagcaaggcttggccagtggtgtgga

SEQ ID NO: 913814 - DNA, 4001 bp, Homo sapiens
caggagttggaatgcttctatctctgccgccaaattgtgtctggagtcaaatattttcctttctctgagtctcagctgaaaaacctgtaaaatgagggggtggcactagacagcccccctatccgacatgctctgatggggcccagggtaggctgggcaggtctgctgtttggctcctggctgaagtccctgacacactgaggaggtcttgttacaggctgtggacagtcccaggccagcagctccttcctctccaagggaccaacctgagggcatgggagggcttctgctgtaggaccctggggtctgggccagggaagctcccttccatgaacgctgctggaaggtggggggacggcagcgggaaccaagagttagatgcagggagagtccctcttattggccttcctgcccactataggcccccgagagcttttgctcacaccagactatagccttcgtctcccagcctccaagcctttgctctcactgttcctttccctctatctaagactgttaaactcctacacatcccacaaggccagctcaaatgccaccccctccattaagccctcccacaaagccttccacaaagcacattgtgtgtttgcttcctgaccccacaaccagactccacctgtctgttcccctagcactgagcacagaggaccaagctgtgcatcctccctcagagaaggaagcggcctcgaaagtggccgttactttcccaaataaaggagaaggggacagaagagggaaggaaggtggaagggaaagaggaggggagggaagtgaggataataactatacattttaaaatacggattaaatacttatctccattttacagatgagaaggtaaggtccagggaagtcaagtaacttgcccagccaggattcaaacccaagcagcctggctagacgccggactctcaaaaccaccaagaatggatgttggaagagggggaggaggaaaggaaggccgggagccgactgaaattccaccctgttctggtggatttatgacccaggccgtggtgtgagggcactgggcagggtgctcttcgctgaatgccgagtgacagatccaagatcttgccagcttgaggcacagaggcacctgctccaggtgtgccaggagatgctgggacctggcctgacctagcgcaggtagggagggctgaagacagcaaatgcccgagtattcaagagagagcatggggggtgctgtcctgagggtgcagcaactttaggatggctcatcccttctctgccgttgggcagctcttctcagcagcctcctctcagccctgtagcctccccggggttactgactctgtggacctgaagcagtgccaacaaatggtctctgagctgtacctgtccaggctaggaaagagggggcttgaagtcttctgcccccttcccttcggtgtttctgtcacacgccgaccccccaacataatcagctccggtctggatagttggagagcccagatcagccctggttcgttgtcccccaagtcgtaagtgtgacatctgaacccgccttgccccttccctgtctcctccctggaagaaggcagagcaatggttacacacggcgtgtacacaaacaagacacgcaggcacccctgaggcctgggcgcaccactcagggcgggccttgggccaagctccccagcgtggtcacttgtccagttggaagcaggttggtgagcgactggagggccgggctgagggtccaagggatcccccatgcaccctaggcccagtctccaggaaccctcagaggcctgcagactcacagagagacagaaggacagatgggacagcaagaggcagaccaagaggcagacgcgcggccaggcgggggctcaccagatggagcgcggacagtccggggctgggcgggcgccgcggcggagcagcgctaacgggctccctccccgggcgccctggggcctttttatccgcctcccgcccgcggccccccagccccgagctggccgcggaggaggccccgcaggccccgccccgggcgggcctggagtccgcgggcgccccgcccggccttccgcgcggcgccccccgtcgggacacaggccaggtggcgggggcgcccagccgcagccggcggggccgggaagtcccggggggcggggggagcgggggggcggcggggggtcgcggggagcggagctctcgggaaagggcggcgctgggcccgcggctgttttgcagggagggccgcggcggcctcgggagtccctctcccaggcagtttcctcttttgcagaacaaggtaatgacgcccacctagagtcccagtctgtgagtcctggtgggtgccagggcccccggcacagcacccttcgcacgggagcgcccggctgtcacaggggccgaatctcacgagctcggtcacttaggacaatgtagacgccctttctgggaggccggggctcagttcagagaggtcgaggtggcgcggtgcagcggtgctctcctgcaggaacaggcgagtcacccagagtttactgaataccgcccccccccccccccccgccctccgtgtgaaactctgcgctgcccattgtgcagctgggaacactgagccccaggcgacataacttgctcctccaggcaatacacagtgaatgggagaaccccttcacagagctgaatgatgcagtcctggcccttgtcagactcacgggaggagggtgttagtgcagggagcagggactgtagaattaaagaaatgtggacatggctgacagagaggagtcccatcagctgaactgagcacctaggtgcctgaaccccagtccaagcccccagtttctttcccctagacctggtcctgcccttagcctcactggccccatctgtaaaatgggcagagggttccagcctcccggtttcctccctaggcccacagctgcccaacctggttccccctcttgcccccaccttgcctaaacgtccttccaaaggttcattcatcccacaagcctttattgattttctcctacatgctagacagggtgctggagtgctagacgctggagggggccttcccagtctggtgggggaggcagatgtgcaagtaagaataagcctggacaggcagagtgtgatagagctaggatgtcaagatggaccttttcgatcctgggtgacagccaggtcttaatgaccctgctgccagggacctgccatccactcctggctgcccgtgtccaagatgtccccccagtgcccctgccccaccccagctgggcccaaaacattccccatgatgaatcagcaggaaagaatgctcccagcctcgggtcagtggcagcagcccagctcctcccccagggacaatgaggcagctgtgggcttgggtgccaggtatgcctaagccctctcctagggcccagccacctctcatgctgagccagaagcaacacagagggttcggaaacgtgggctctgcctgctgccaatcactcaccaggcctggctgcccagaactaaaaataccctggagcgcaggggcgggcggaggatagagaccagggaatgaatggatgttgcccggaagtcctttaatttgcacaactctgggcagaggccaaggctgggaagcagtggaagtggggatctctaaggcatgcgctgtgagcccccaaccctgagaagtgaggggctctggtcccagccccagcccatggcgtactaacagtgggattttctcggctgagttgtcatctcctcatccttaaatgtgattgctgtaggggtcagatgggaccactggattcatctcaatcagctttcatttgattgagaaagccctcttcttccctcctgcctggctatgttcacccggcctcagcccagcgcctgtgaccctctccatactctttatataatggtctgtgtctgccttaactctggacacccccacccacccccgagcttcttatttatctctaaacccagatcct

SEQ ID NO: 913815 - DNA, 4001 bp, Homo sapiens
tttgggtattgcaaggaggaaggtctggatgtaggtgagagaaagacaggtgattggaaaacttatcttgaacgggagagaaaacggtaaaaggggcatttaaaggaaaccataagaactcaatgcaagcctacaccacagctcaaacctccagcacaactccgggtggggtaaaaccagaggcaaactgggacaaacagcatgggcacaaatccattcagatgcatagcccagctcctcccaggcaaccccagtgcccacaggcacacacttcacgatacaacagctcagacataaaggctgggctctctgagaggcccaggttagagagggatctgaggaaggcttctgacatgcagaacgagctttggtctaactgcacagtctgtgcccatagccacaggggacctcagggcccgctaccacctttcatggcctcataggaccctccatgcagatgggctggtgcatgttagccatgggatagtcaggcgggtagaaccaagagctctggcttcagagaagggaatgcccactgacttacattagcggccctagaaactcattttccatcttaagattaactctgctgcctggaacttaccactggtccctgcccatggcagcatcaccagataagtgttctgaaaactgaatcggaatgcctgggttccaggaccggttttgtcaatgatgctgtgtggctttcagccctatgccttctacgggtggtgggaggctttttgtcactccagtgacactgcccaggctgggaacagcaggctgttcagggctcagcctggcttctactggggacaggacccttacacttcatatgagttgatgccttggacacttgggctacagtggagctcattctggttctcagatcatttgaggtgtcttttcttagtggttcttctccattctcctctcatcccccaatcaactcgacattcattgccaagattattaaaagggtagctccaataacattgttcccaggatcagaaaccatcagtggctcagaaaccatgcagaggtcattaatggataagctaaagaagttggagaaaagatgatttaaacgttgctaaagaaaagaagaaaatgagcagtagtggaagagcaagggtccacaagccacagtggcatgggaatgtcccatgaaaggagaggaggagagaatggaggtgctctgagggatcagacagagggtggggaaagtcaaggaaaaggctggggatggaaggaagcatgcttgtcatgggatgggcactcctggcttttggagcactcataaaaaggtattgaggctgaggctcctgggatctggccagcgaagatggagaggaggaagagaatgagaggcaagtggtcccatcatgggtggggttgtaggaaatgcctgggatatgattgaatattgtagagaggtcaggcaagagagtgcaagtggcctgggaaagaaggggctggggaaatatagaaaagaagagggaatagaaaaaataaaagagaagaaaaagcagtaagggaggagatttcctggacctttaaggagggctcttcaccaggagcctggaggaggacttaggaaggacttcttagaactgacatacttgtgcctcaccctcgggcccatgtgtatagatacctggtacctctcgaatagagtcacccccttgcctgctggaaaacaatgcagcacagtccaccccataggatccctggtcctcaagggccaagggagatgaagacctcacccagggccccagctccaactcctcccaacccagcctagctggcaaagcaatggaggctgggctgcccgtcccacgcacccggtaccatacctggccttgctgccatcacccatgatatggaggctgcagctgcattgagaggggcagaagccccgggcctgggggggccacgcaagggccaagagccagagcatgcctaatgccaccctcatggctcctggctcctctctggcccaggcaggggcctgtccctggaccgctccgtcccaccggcccagcaagctcagcagctgcccacttgctcgccagccccttacaccccctcctgaggccatcggataaacatggacagactggggattagggaggggagtcccagccgcagcactcagaggcttattgctttctgaatcactcagtcctgagggtaggggcgggggacccccttccatagcaatatccacaggcccagagaggccagggcagggcacagcaaagcaagacaagtaggcagctttccagaggcgagcagccatgggactgtcatctgcaaagcatcccatcccaacaaggccacggacaacacagaccccactggagtgccagggaagatggagaaagaacccccgcctcagtaagggcctttggaaattctttcctgtgacactgtctcatagcaaaaaagcagtgaaatgaagcaactcttcctgatggtgctaaaggcattggaaggaggctaagctctggacccaggcttcctggggtcaaatcccagctgctccattaaggggctgtgaccttgggtgagtcacattatctcttggcctctgtgtccttatctgacaaagagaaataaagttacttcatgcagggtgtttgtgaaaatcaaactcaaattccaaggccttgacagcctgtgggaacagaagctctctcacaagttgtaagtgcccagtttcactggtacttataagaccctacttacagaagaactggacagattcagatattttggggagacatcagaggtgtctctcatgagcccacaaactgtcccaggctgccaggcaaacagctgcctgccttgagtgccccatggatatggactcaacacactactatttcagctgagcccttctgggcattgctacgaatgccaaaggtggagatgtctccacataagggacaagggcacccctctcctcaaggtgccctactccaaggagggccccagagaggtagctcagagaggtcttagagaaggcactttcaggtttttttggagacaggaccccaacctctaataagggcctttggaaattctccatccataaagctttgttttgctttatagggacagggttgctctgtcactcagagtggagtgcaatggtgtaatcatagctcactgtagccccgaactcctgagctcaagccatcctcctgcctcagcctcgcaagtagctggaactgcaggcaaccaccaccatgtttggctatttttaaaaaattattttttgcagtcagggtcttgccatgttgcccaggatggtctcaaactcctggcctcaagcgatcctcctacctcagtctcccaaagtgctgggattacaggcctgagccactgcacccagactaatttcaatttttacttattctctcctaaccctatctcgccccaccatatctactcaagatgccagtggggactgaccagggatgattcccagcagtagacactcagtcgactcattcattcattcttcacatttgaccctgaggcattgttctctggtccagcatgccctacctatgttgtttggcttttctagaaggttccccagtccttcatgcctgtggctccaggcaggcctagaccagtgaggtatgacctgcaaagatatctggggccccagtgcacacataaaatgcctagctcggagccaggtctgtttcaacaatactggcttctcattctttccttccttccaatgcagccagtaggattttctcagtgcttcccagctatacttccacctccccaaacccagccgtcagcttgcctgttcccacatctctgcttcttcctccttgtgtcttttgcccaaatgaactttaccctttaatcttggccttgccctgctttatctcctctcatgaaggcttttgtgatctcgaaggcatgaaaaaaggactgacatatgtattaaccaacaccataaggtagaaattgag

SEQ ID NO: 913816 - DNA, 4001 bp, Homo sapiens
gtcttctagacagagaacagaagacaggacacgaggaatgtacgaagatttttcttttcagctttgggatacccccagggaggccatccccggctttgtgatatgcccaaccctacagagtagcattaaaggtaatcccagctgaggtatgaaaacagagcagagggttccaggaaggaagaggcaggtttgaattccagccccagggcccacagaggtcacttcctttccctgggtcccagtattacaaattcaagccaataaggtctgaacaattttatgtcagtgttatttcaaacaagcaccccaggtgattctgctcaggcaagttaaggaaataactaatagatcatctctaaaatcaatcctagtaaaaaattctagaattctaaaatacatagtccagtgttttgcatctagaagattcccaaagactatatctgctcatataaaattttataatatttgcataagatattaaattagccctgaaatatgtgtttatatatgtgtatatgttctgtatgcaaagagatctgtatgcaaacatttaaaataatgccaatagtggaacactaccttgaaatcttttctgttctagtgagcataattcagggctatcccaatcttacttgcacccacccttcgtgactgacccagctttgaatctctctaatgaggatgggtttgctacagacctctccattccctccagatacactgagagggtgcatgtggcttaccatcaaattctctccacatactcaggggataagtccatgcaatggatggtgaggggctggcctgtgccaagcatcgcagggtcacattctgtcctgcccggatggtgatattggcactgggggttgagatctgtggcttcatgcaagcactaagctcagtttcatgaaaaagctgccctgccttggacagagggccctgacatatcaggtaggaattcaccaggatgactgggagggtaatggacttgacaaactggacaagcccccttaggcgacagtcacatacccaggggttgtcatgcagggccaccaccaggctggagagaatctcagccccacagtcaggctgccggcatttctggtaggctggccagttcaggaagacactcttggatacaactgtaagcctattggaggataggtcaaggtaggtcaggctgaccaagaattgaagagccagctcagggagtgcatcaatcttgttgcgtttgagatccaagaccctcaggagaggggtggcacggaacgctgtccatggtactgagcagagcttgttcccctccagtctcagctccctcagttctggcaggtgttccagggctcctaggtggatcacactgatattgttaaaattgagccagaggtattccaaggtgctcatgttgatgaaagacccttggggcatctcaaataagggtgaattttcaattctcacttgcttgaactcttcagaaaggttcccagggatctttcccaaggagacagatgtgcactgcagagtcctgtacaagaaaccagaacagctttaagataaacaacaggggactgaaaagtggggtcaggctgatcctggcattagacatgtgaatcagaataaaaatattattattcattgaaataaaagagttagactcattttggtaaaaatgcacagttcagcaaagttcagtcccaactagaatgagtctcatagagttttgctgatttcctgccaattctaagcctgcttccactccacatcatccccaaagaaaacccattccccataaccctctaacatctggccagcagagcgcacctgccaaaactctcctctgagcaagtgcatcctggcagacagaaaggctgagctgcgtgtgtatccagaaagaccagaactaacaggaagtaatgaaaaactgaagccatatttctctgtaagaaaatacgttgtgagttttgaataagtatcgccccagcttccgagtggcaaatcctattattggtaatccatgatgatgtaagtcacacagcagcaggaaagcccatgggagctctgaggtctgttacagcccagaccacaagttcagtcagaacacacgaagggggatcaatgtctcttaactagggtcaggaaattcaacatttgtgtaattcttgagtctgaaaagcaaactccaagtcagatgtccaattccatacagattctacatttcttagagtcttaaacagaagtctgagaaacaagcaggcagtgctattctgagcaccactgttcaggggatgtggccagaatccatctaatgcttcatcatttgcagttgattcctgaaacctagaatttccaatcattttctcaaagtgaaaataggtgatgagtaacaaagtaattctgtgttcattcctatcatttgttctcttcccaacaccacgggtggtgtagtcatgctcctactgcatcaagacagctgcttctgcagcttgggtcaccagtttcaaatacaagatggtattttctgattaaaccaaaagattgttttcttggacttcacaacctttccttaatactgtgcatttcacttcatcaaaatgggcaacctacattttaaaaagagatgtatacaattttatatgcttgctctttcactcttcatttattccacaaatatttactggtcatttgctttaagctatactcttgcccaatgaaaggaacagggtcaagggcaaacctattatagaccctgtcccaaggagtcttctctcttgtttgtgcttctgaatcttgagatctttggaatgtaatttaatctctgtgagtcttttctgtatcatgagaatattaacaaatacctcatagtgtttccaggaatttatttctcattattttttaatttttgtattttttcagagacagggtctcactctgttgcccaggctggtctcaaacttctcagcctcccaagtaactgggattacaggtgcaagccattgcatccagccatatttttagaaaagtttgagattatgttaaatacaacacctagcacacagttggtgcccattaatcctcctcccactgacaaactctttaagatccgaaaagtctacatctctattaactagggcacttccagttgaatattgaaattccatgagttcctttaagactcatgatatacattgtaccctacaaaaggcctcaggaaagaaaatccgcttagctaaccagtgaggggggaaatgggtcaccagctaagctgattacactccaggctttccatccaagccagaaatatttgcaggagtttccaaacagtctaactctaaaacctggggggaccactgtgtttgtctaaaggtaaaaatccaaaacaaagagagagctatcggcacaaagtttgtcatacatatggctatgtgcttcctagatcccccttcaaggtataagtggatgctcagctgcaaggagtgcttgcatgaggtcacgtccttcccaaagcagccacatcccacattcagtgactgagggtggtgagggcctggccagtttgccctgatgggggaaaactctgatgagcaattatcactccagagtcccctaccagctttgctaaggctttgtcaggcttgtttcatggaaatatgtgatttaattcatgactattccaaaccactagtggattcctttctctccccttaccccaaaggataaagatcttaagagtcctccattcccccacaatttcctctctgtccatctcatgccagccttttcaaatgaatccagctccatccaactttcaagaagtttgcgggaagcttgtgaagcacacccactggcatgctatctctagaatcatctaggccacttctctactgccccccactcctttcctgaccccctcattctctggtttccttatttggcatatgaacagagggagtggctctcttggaaattgaggcaggagaccaggataattgaagttagcatgg

SEQ ID NO: 913817 - DNA, 4001 bp, Homo sapiens
tcagctttgcaatgaactaagttatggttctggaagaaaactggcttctgctgagtacgttctccatgtgctgcctgttttagaggcacagaacacttggagttcagtgtggcattattcccacttcacgagtgagggaacctaagctatgttaggtgcccaaggggatgccaagtcagaagcagagctgccatggacctagacctgtccaacctcagaatctttggcttttctctttgccaggccagccctgcacatccacgactgggatctcctgaatgcctcagacagtggtgctctgccccatctcatttcagttgctctctcctccagcttgcaccaggcaagccaagctttccccaaagggacacggcccctgcacctagcatggtgctgagtaaggtgttgatttattgaatgcaccaatccatacttgccaccattatttcgtttctcctatgaggatctggaaaaacactgaatgtaataggatgggagtgcaacttcattcattcacagccagtcagaggtctgcaggtttagccaagaaagctcatagagcaagttatgcaagctcagttcagagagaaaacattgctttgggcctaagaagctatctgcctattgatgccttaataataaaacctgcccatttctgtggtccagctctgtcccctacccaacaccaagtgctcatctactttcttacaaactcatgctctgagattccttgcctttgaagcccagacccaaaacatttccattaaataacttcacatttgggatctggcagtgggctctgaaatgccagtgatagtgagtgtgtggcggcattagctgcttaggccacagtggtagacaagagagatctgggggcaagagtaggatggacatggacaggcccttcctgactcactgtgcctgtacttgtgagtgtgtgtgcagaggacagagaaatgtgtggaatggcaaggaatcaaaagcccttcaatcaacacaatcacacgccgagaaagtaaggaaaggagttttatgggcttggctgaaagagctgctgcagccacaggggagcccttggtttcctgtggaggtagcccactgccctcttccctccctctctctttcccttctgcctcagggtcaggttccaagtcacctccagtcttcccaggagtccttggccatggaattgggtgagatcagattgggaaagatggtctttctcggtgtcgtcgtggccatgttcttgattctattcaggttgtcccgggcgttttggcattttctcaggcaagccgcacacagatccttctcctccacaacatacaagttctccagcctcctgatggagtctatgaatatttccgactcacctggctttggaaaggggttccgctttatgttgagctttttcagcttggggagcttggagatgctcacggggatgttgttcagtaggttgtcatggagccctacctcgtggagctccttcagggcccccagtgtggtgggcacgctgtccaggtggttcaagcctaggttcacagcgcggatgttcttgagttgcttcagctccacgggcagcccgttgctggtcagccggttgttgctgacgttgaggtagagcaggctggtcatctggccaatggactcaggcagcttgtctatgtagttgctgtgcaggtccagccaccggaggttctggaacttggagatggagtcagggatcttcctgataagattccggctaaggtccagctcgtccatgtcactaaggcgcagaatacacttggggaaggtggtaattcccatcttgctcaagtcaaggcgctttttcccatcaaaagtgattttgatgcaattcctggccaccttgagggtgatcttcttgcccttggggcctttctcacccttaaccatgttcttttagtaagggagtgttagaagtttattgttctgattggatagtgatcagtgtgaggaaaaatcatgaaaaactgctgaaagataagaaaacatctggttaggagatgccagagggcactgggctcccccacgtcatgacgctttgctcttcagtggtttaaaaagcaagaaagaggattgcggagagaagtcagggcaaagtggacccagcccagccatagattgtcagcaaactgtgtgacttcttcagactttgattttcttggatgttaaaataggaggtgcagggtcagcctgaaggacactaaatgtccctctagctgtgccatgccccgacttataaatactctccactgtcccagactgtcacgtacccccaacccagagccatgtgtgtgtgttcttggatatctgccccttcctagacccctgcattaagctaggatttcctgaagttttcatacaagttcctggggagggactgctgagttttccagccaacataagcctggatcttagagaataaggtgggtactaagaccaacttctcacatccctcttcccctcatggacccagaggaactagtgaggccttggctacagtccaacagtagccatgcagaaaagcctgttgctcagcccagggatatcagggtgtgccattgctgggcccagcagcaccataactccccatcatgagcacacagggggatggggggtgcgggcaaagctcatggagaatgctgccttttccatctcctgcccattctctcatccttcacactggacttcaactcctctgcacagaaacttgataaatggccgtgactgcctcagtgcagggaagcagaatgtcaatgtgatgtgatggggattctggcttctgcatgcttggcttagaagtccagctctactctactcacaatcttcttaaattcccagtgcttgtgttttcttatttgtgaaaacagacacccttacagagctatgagggggcgtaaattatctaatactataaagcacttataacagtgcctggtacatagtaatagcttgattaatgttagttattaaaaattgctacacatattgtttctaatcctcaataacaaggtccacagcattaccctatcatagcgagactgaggctcagaagtgaggaaggtctgcagccaggaagaggacgcaactctgttctgtttggttctgggacccccttttctttttaaaggcctcctgtgcctcctgcttgctgatttttttttttggaccaagatttccaaaccaggcagaagtatgcccttgggagacacaaacttgcattgcctctgttccctgcagggatgggcagggagaggtgctctacagtttctgtacttcatcacctgtaccttttattagaacccaagttgatatagcacatgaatattgagcaatcaggctgtgtgggaatatagttgtatgttttcctcacccagtgtcaaagggaaatgtgtacaagcctgtctcacacctactgaaaatcccactgtcaccactcatagctgaagggtcagagggtcctaccctgcgaaaggcctgatggatcacagccgcctgggatagatggtggtctccacagtaaaccaatgacagttcttagctcttggcagcattgatgttcatttacacaggccttgtaagctgaccctagtctttaaaaatagtggactccccattttcgggcataattggctggtttccagagccagcaccatgttcaccaatactgaactgtctatatcattcagctctgagaaaccagataggataaaacagcttaaaaaacaaagtggagtccaagtccagttaagattttgtatgctcacttggtcccaccaaactcctgaaagcaagtaaagccttgggcagaatgcacagagaagcactctggggactctgagataagtgatatcaggcagattggagaagaaatccataactcaaagtaaagaccaatctggccacaagtttcctgaactcctttttctcccctcaaccgtttctcttggcttggactcaagggcagcccagaa

SEQ ID NO: 913818 - DNA, 4001 bp, Homo sapiens
tccaaatcccagagacacttcagcacagggtcgaagctcatactcacactgcctacatcctcaaagcatggccctctccacacaccctcaaccccattcctcagagtgagcatcctggtccggtgaaatgtttaaatccagcaaacgtctcctggacaccttccataaggcccccactgtgggagtaaaggggcagagactgggtatgggctagaacaagcttcccactgggaggcaggatgagcctgatagtagtaaggctacagggccaggcctaggggggcatgaaggcacatggcatggccagggggaagggacaggggtgagcagcaggtgcacaaagagattcaggagagagagagacagggagccaatgggctcccagattactgaggaagggaactgcagccctcttacaaggctgtcctctgcttctgtgtagcgaactaagagaagttttttgaggaaggcagcctaatccatagttttgcaaagttaacagtgttgtgagcagtcccatttgtaaaatggaaataccaccttcctcaccggattattgtgggaagtaactgatatgtaacttttgggaaaggactttgcgaaccattacatgtttcccacaccaaggcattaccagtaggtaatcaaacaggtgtagagaggaagtttggatgtaataaattcaatgccagacaaaaacgttgtcctgctttgggggagctggcaatacagccctcctgtccctataacctggtttcacctggactcaggctggctgggggaggggtgatttttgcttaaaccctgacctggccccctgactccagcccttaccatcaataactctaccttatctgcagtccggagacctctgcaaaggagccgctgcgacagcccgtccccaccatctgctcctatatttagttactggtgttgtcagttgggaacgttagagcctggcaggggctcggatgggcaaccggagcctccggagccatgtgtgcaagctggccctaccgctggctccagcccgggctctggaccatgccaagccggggagcgggtggggaggtgaggagcgacccaaatagtcccaaaccccccttcagatcagaacgaagttgacccacttccccaccccagggaaagaagcccgctgggacgtgagcgggacctgctggcgccttgtttttgtggcatggggttcgggaagctcagcgcgtgctccctcgctaacatctaggcatcctcggactgagcctccagcactacgcgcggtagccaggcaagggtcccccagccccgcgtgccaggatccgcctcacccccggtgcctgcagccaatggcacctcgtccgctggcccggcaggcggggactgggagaataaagctggcagagggaagaatggtagtgatcgcagaggccccggggctcccacgctgcccggaggccgagaggcacgctctggagcaggcgtctgcagctccccagagcggaagcaaaccccgaaagtgtcgcttcggggacgaaatgcacagcagcctctccaagcaagggcgcctcccgcgaggaatggaggcccgcctgggagcggttctccgagctccctattccctggcacctctgcacccactcccctgaaccatcggggtccaggtgcagtgagcaagcaagagcccgcgcatgccgagccccttggcaccgccagagcctccgctggtgcaccgctgctcttttccaccgggtgacctgggggaggggaggggacgctgcaaaaatcggaacacttctcgccctctctcccccagcccctgcaacgcttgacctcggactacatttactttgcggggcaagaagcgtgtggtcccgctccgggccgcttttggctccacttacggcgacaatgcctcctagcgccctgcgcagcgcagtcacgctccctccgccgccggcggcgccccaggcgagttccgagccggcggggcggggcgcgcggggctgcgggatctgcgcgcgcggccactccgccaatcccggcgccaggaccggcgccgcggcgggagcaggctgggctcgggatgcgctcagccaatcagtgggggagcggcgcgcgcgggggtggcgcgcggaagggcagcccgcgcgctcccggccgcagggagtaaccgctttgtgtgctgcttctagagggagaacgcctgagggggcggagatacagagtgggacgcgcagtacatcccaggatctctaggaccggggctccagattgggttttctcgagggaatggagttgaattagccagatcagggatactttgaaacacgtgaacatggagcatagggaaattttcctatgatgacttcgggtgcccattgaggtttttagtatatgcaaggccctgtgtctcggccctgcgtctccaatcctaatgttctcatctataaaatatgacttgagggcggggcgcggcgactcacgcctgtaatcccagcactttgggaggccgaggtagacggatcacctgaggtcgggagttcgagaccagcctggccaacatggcaaaacccccgtctctactaaaaatacaaaaattagccgggcgtggtggcaggcgcctgtagccgcagctactcgggatgctgaggcaggagaatcgcttgaacccgggaggcggaggttgcagtgagccgagatgggcactccaacctgagtggacagagtgagactctgtctcaaagaaaaaaaaaagaatatttaattccgcctctagggggtctaggcagtcaaagaacacacattcccttgggcctcgatggatgttaagggttacttatgccctctccacccccaacaatatgttaaagttcatcagaatgtgatcttatttggaagtagggccgttgcagatgtaatgagttaaggtcatgctggagtagggcgggcccctaatccactgagactggtgtcgttgtaagagaagagacacagaagagacgcacagggagaaccacctgtggtgatggcggcagggatcagctgatgcatttccaaggccaggagtgccaagcactgccagcagggaccagaagctaggaacgggcagggaataattcctccttcagagcctccaaaaaggaactaaccctccagacaccttgattttggacttaatagcttccagagctgtaagtgaataaatttctgttgccacccagtttatgtccatttgttatagcagccctaggaaaaaactacaataggttagtaggaataaagagaagaggatgataaatatctccaaagtaagtcttttgaaactgattgcttagtatatgcaaagccttgtgtcttggggtatactgacatgaatcagacacagaccctgccctcaaggggttaccagtcaagtggatacttaagcagccatgttttctgaccccttgtgccttcccagggaaaactatggagatctctctcaacccatcaacaccacatccctgccagatatatagcaagtaccagatataaataactaatgggtagagtcccattctgcccaagccgagatgctgcttgccactgtggacaaagcaggcatagctacttctgttttcactgaaaaccagcatgacacttctacccaacttttacacgtggatgtcttctctcctctgctagtccatacgcagacttgagacagccagtacagtgtttctgtacccatggtaagggctcagtatatactgctggctgatggccccagcctggggtttccaacattcatactttccctcagacagtcccctgtcccaggcagttcatcctggaccctctaactccacagagacaagatccctccctagctcaaatccacctcttctattcctactgtttttgcttctccagagcacttagtgcattatacccattattctatcatctctgcacaagtctttactcccgagagtctgcctgattgcaaataccagagcttgacg

SEQ ID NO: 913819 - DNA, 4001 bp, Homo sapiens
gcaaggggaagggcttaggtctcgccaccagcttttgggaatgagcaaaaattaaaaataatagctgccatttattgagctccctatgtgccaaacaccttacagacattccaattactcttaactaccttgatgaggtagacacaattaccattcccattttatagatgaagaaactgaggctctgagaggttaagcaatctgctacagtaccaggtgagtgggtggcagagtagagattcaaatccaggcccatgtgactcaaagcctagctctgaaccgcagtctcagtggtagagagccttaaacaaccatattactgaccagtacaggattccggaattccttcactgagggctcacagtcatcagctcactagcttaaggctccttccaaaggcttccctccaacaccaatgacaatcttcagcgagcctgctgatagaggaaatgcctctcgccttagctaagctcagcaaacacttccacacgtttacaaagtgcctgacactgcgctgggctctggggcagggcagggggaagcaaacaaccacagggtccctgtgctctacagatgctgaaggggtgctacagaggagaaagggagcaaagggtggatgagggaaggcggagggcttcctggaagaggcagtgatcaagctcatcctgaaggctgagtgtctctccacttcctggaccacctctctgcctctgactgcctttccagtctctgtgactttgctaaggcagtaactaccatggaaggaagcgctcctttgtgagacagacagacagacacacacacacacacacccctacctgcctgtgaaattcctctccatgtacctaactccaattctgcctgcctatctgcaagatcatccccaaggcaggactgtgctccaggcctctacagtggtgcctgcattccatgggtgacatacatgcacatgcacacatgcacacaaacacactcgggcacatgcacgcacacacaggacacacaggtaactgcactgtatcccctgctgccccttgcacttggtggacagtcaataagtatctgctgaattcgattaaatgggatggtttgcctaaatgcttaggagtcttggggtaattgatggaataaaatgccctggccaattcaaagcaaaaaaatatataagacacaattcaagaaaaatagtggagtgtaaaggggtctcctagctgggcaacctcaaagaaacccattttgccgtcccctttcttcatgggatgactgaggctaaccacgcccagctggcttcattcaccccagggagcctgtgaagattcaacaagataacattcaggaggcgcccagcacggggcctggcacacagatgctacttggccaggaccagctctgtattttcacctggtccaagggcacacacactcagtcatcagcagtcaaaggacaagcaggcaggcgccatcactcagtggttttcaaacctctttgaccaggacccacagtaagaaatgtcttacacaaattacacactgttgcaatgaaagttccacaaaacacttattctcaggatgaggttgcacactgacgcttgtgtctttcatctctgtttcatttctaagctgatctcacaactgcttccagggaagttgggaaaagccctgccctcactcacccagagtgtcagagccgctctccaccgtctcgttgaccttccttgctactctggccacggcctcacccatcttcttcagcatgcagacacaggtgtcctgccgccagcccccaggctggtctgcttctcacaaaagggcctgagcctggggaagacgcagtgccatgaagtgcccgcctgccagccaggggcccacccaggcatccccctccagcatccttctcccccaggacccaggctgtcaggaagcctgcagggagggccccaggccactcacctcctcttgcagggccgagagctcaggccacatccagcttggcctttgcacaagctggtctgccagtctggcagctgggttctactggttttctgggaggatcaacatgtgtgacctcaccagacatggggaccaggtctgagccagcagccagggaggtgtgaggactcaggggtgtgctggcctgtgattcactctataggcagggcattgggaaggaggtagggcgcagccaactgcaggagaaagacacctgtccctccatcccacagcctctaagctggtcccctgtccacaccctgcccaggacaatttccccagctcccctgttcaccccacccatatctgccttgtgcatggcaggaagtggggacacgaaggcaaatcagagccctgtgatcccatcagaacacacggactggcggtgggtggtctctaagaattcctttcccatgtgccaacaggaaggagaggttacagtactagcctgcagacctgattatcagcctgatgctgagtttatctgcaagaaaagcgggcaggggccggggggtggagatggaaatgagagaagagaaattggatcactagaggaaaagagactgaaagaaaggtgaggaaaacaaaatgataaggtgttaagacataaggacttgcaaacaccctcaactccctgtttattacagagaaggaaatgagcacagagaggggctaggtgacctggccaaggtcaaagtgagtaagcggcaagaatagggtcagcccagctccatagccagtgctcacttttttataaaaatagcagcaccccatagagagaggaatgagctcaagtccaaggtcagcaccccttctttgcccccagaccccagtcccagcttcacagacagctcaagaagctccagtgaactcactccaagggccaaaggcagaagaaggcgaagggcagagagaaggggcatggggacagtgctaagagctaacagtcaccaagaaaaagttcccacgtggtcaactggacaagcagggcaggcaaggccaagccagggctggccaagcccacccatctgcttcagggagttactgtgagtttagtatgtgtgtgcatttccactaaagaggctgacactaaaggtttgagacacacacatacagaacagtgggaaaacactgattttggagacaggtcaaatgctcaacacccccatttattggctgagaggccttgggagagtttcttaactcctctgagcctgtttcttcttcatgtgaataggagatctagtaatacccaacttgctaggttaatatgaggattgagagcacaaaatgtatacacctgtctagctcagagcccaggacacgtaaatactcaataaaagttaagaggataaagcagtgcatatgtggatgtaacagcagcatataaccccagtttaatactcatgtgagtctgaacaaaacactgagggaactcatctttgaggaatgagtggaatttctatctgtccacctccaggaaatctcctcttattgcctcagtgttctctccttcctctgagtttcagtagcacttaatgacttagcacaagtcacctggattatttatgagcttttaaatatacacttgtcagccgggcgcagtgactcatgcctgtaatcccagcactttaggaggcctaggcgggtggatcacttgaggtcgggagttggaaaccagcctgaccaacatggtaaaactccgtctctactaaaaatacaaaaaaaaaaaaaaatggtcgggcatggtggctcacacctgtaatcccagcactttggaaggccgaggtgggcagatcacctaaggtcaggaatgcaagaccagcctggccaacgtggtaaaactccatctctactaaaaatacaaaaattagctgggcgtggtggcgggcgcctcgggaagctgaggcaggagaatcacttgaacccaggaggcagaggttgcagtgagccgagattgtgtcattgcactccagcctgggcaacaaagagtgaacctcgcgctcaaaaaaa

SEQ ID NO: 913820 - DNA, 4001 bp, Homo sapiens
cctagatccatcgcattcgcagttcgcaatagggttcaggctcctaggagaatctaatgcggccgctggtctgacaggacgcagagttcaggcggtaatgcttactggtgctcacctcctgctgtgcagccgggttcctcacaagccacggacctatgccatccacagcccaggggttgaggacccttgccttagaccactgatgaaaactagtcagattaaaaatttcaccactggtggcaagttcagacgtcctattgtgtgggtcagagtgtacacaggtacaggaacagaaacaacatgtaaagtctaggtgtcagggcaattcagtaggaagaagggccccttccttctatgccagaggatggaggatgctctgagtacagcaaaaatgtgctcgggacccccaaaaggttcccgctgcttaaaatcaccacgcttattaactagctaggaagccatcctcccttcacctaaaactgcccctttctccacaaggaagaattgtttcatgaagtccagctgacaggcctgagctcctcagggtacctggtcaatgccatctgcagggatggtggtagtggagagtcacagagtgttccaaaaggcagaaacagacaccatcagcccacatgggccagatcgccgcttggggcaccccagccagctggcactactggccccagccagtcccaggcaatagagggtaggccttagaaaatgtcagggaaagcactccaaatcccagagacacttcagcacagggtcgaagctcatactcacactgcctacatcctcaaagcatggccctctccacacaccctcaaccccattcctcagagtgagcatcctggtccggtgaaatgtttaaatccagcaaacgtctcctggacaccttccataaggcccccactgtgggagtaaaggggcagagactgggtatgggctagaacaagcttcccactgggaggcaggatgagcctgatagtagtaaggctacagggccaggcctaggggggcatgaaggcacatggcatggccagggggaagggacaggggtgagcagcaggtgcacaaagagattcaggagagagagagacagggagccaatgggctcccagattactgaggaagggaactgcagccctcttacaaggctgtcctctgcttctgtgtagcgaactaagagaagttttttgaggaaggcagcctaatccatagttttgcaaagttaacagtgttgtgagcagtcccatttgtaaaatggaaataccaccttcctcaccggattattgtgggaagtaactgatatgtaacttttgggaaaggactttgcgaaccattacatgtttcccacaccaaggcattaccagtaggtaatcaaacaggtgtagagaggaagtttggatgtaataaattcaatgccagacaaaaacgttgtcctgctttgggggagctggcaatacagccctcctgtccctataacctggtttcacctggactcaggctggctgggggaggggtgatttttgcttaaaccctgacctggccccctgactccagcccttaccatcaataactctaccttatctgcagtccggagacctctgcaaaggagccgctgcgacagcccgtccccaccatctgctcctatatttagttactggtgttgtcagttgggaacgttagagcctggcaggggctcggatgggcaaccggagcctccggagccatgtgtgcaagctggccctaccgctggctccagcccgggctctggaccatgccaagccggggagcgggtggggaggtgaggagcgacccaaatagtcccaaaccccccttcagatcagaacgaagttgacccacttccccaccccagggaaagaagcccgctgggacgtgagcgggacctgctggcgccttgtttttgtggcatggggttcgggaagctcagcgcgtgctccctcgctaacatctaggcatcctcggactgagcctccagcactacgcgcggtagccaggcaagggtcccccagccccgcgtgccaggatccgcctcacccccggtgcctgcagccaatggcacctcgtccgctggcccggcaggcggggactgggagaataaagctggcagagggaagaatggtagtgatcgcagaggccccggggctcccacgctgcccggaggccgagaggcacgctctggagcaggcgtctgcagctccccagagcggaagcaaaccccgaaagtgtcgcttcggggacgaaatgcacagcagcctctccaagcaagggcgcctcccgcgaggaatggaggcccgcctgggagcggttctccgagctccctattccctggcacctctgcacccactcccctgaaccatcggggtccaggtgcagtgagcaagcaagagcccgcgcatgccgagccccttggcaccgccagagcctccgctggtgcaccgctgctcttttccaccgggtgacctgggggaggggaggggacgctgcaaaaatcggaacacttctcgccctctctcccccagcccctgcaacgcttgacctcggactacatttactttgcggggcaagaagcgtgtggtcccgctccgggccgcttttggctccacttacggcgacaatgcctcctagcgccctgcgcagcgcagtcacgctccctccgccgccggcggcgccccaggcgagttccgagccggcggggcggggcgcgcggggctgcgggatctgcgcgcgcggccactccgccaatcccggcgccaggaccggcgccgcggcgggagcaggctgggctcgggatgcgctcagccaatcagtgggggagcggcgcgcgcgggggtggcgcgcggaagggcagcccgcgcgctcccggccgcagggagtaaccgctttgtgtgctgcttctagagggagaacgcctgagggggcggagatacagagtgggacgcgcagtacatcccaggatctctaggaccggggctccagattgggttttctcgagggaatggagttgaattagccagatcagggatactttgaaacacgtgaacatggagcatagggaaattttcctatgatgacttcgggtgcccattgaggtttttagtatatgcaaggccctgtgtctcggccctgcgtctccaatcctaatgttctcatctataaaatatgacttgagggcggggcgcggcgactcacgcctgtaatcccagcactttgggaggccgaggtagacggatcacctgaggtcgggagttcgagaccagcctggccaacatggcaaaacccccgtctctactaaaaatacaaaaattagccgggcgtggtggcaggcgcctgtagccgcagctactcgggatgctgaggcaggagaatcgcttgaacccgggaggcggaggttgcagtgagccgagatgggcactccaacctgagtggacagagtgagactctgtctcaaagaaaaaaaaaagaatatttaattccgcctctagggggtctaggcagtcaaagaacacacattcccttgggcctcgatggatgttaagggttacttatgccctctccacccccaacaatatgttaaagttcatcagaatgtgatcttatttggaagtagggccgttgcagatgtaatgagttaaggtcatgctggagtagggcgggcccctaatccactgagactggtgtcgttgtaagagaagagacacagaagagacgcacagggagaaccacctgtggtgatggcggcagggatcagctgatgcatttccaaggccaggagtgccaagcactgccagcagggaccagaagctaggaacgggcagggaataattcctccttcagagcctccaaaaaggaactaaccctccagacaccttgattttggacttaatagcttccagagctgtaagtgaataaatttctgttgccacccagtttatgtccatttgttatagcagccctaggaaaaaactacaataggt

SEQ ID NO: 913821 - DNA, 4001 bp, Homo sapiens
caactgtctaacatcaaacctgtgccctcacagaagctttctctagaaatcacatggacaagacagcatctactgcggactgacccggagaagggccgggcacaaagtaaaaccagtgtgtaacatgagcaaaatcatgggtgagaacaaagtttttaactgctcatgttgcctgattttctttaaggttttgtgttttaattaagagaccaagcgtgtttggcagtagtttctaccacaggttttgagagatgaactgcaaggaagagaacagacaccttcatctaaatagatgtactatttccattggttggtccccatcatgaatttcccattttgttgtgattggcgtatgaaactatgagttaacctttcctctatttaattttagaattcatcaattccaaagagaaagaagcctacaaataaagcccaggggtacattcccatttctgtctataggggacctgtgggcacacagcctgaggagcagccccacttacttgaaggctggggattctaaagacctcctccaaacggcacagaccactttcactcaagtctaaaatcggtgaggaggaaaagatgatgcctccaacacccttgtgaacatctttggagggggtggcaggcaagctcctagtctgaccagcaccctcctccagatcagcagcagccacagagggaacttcgtaggagctgcttccctccatccgttctcttccagggacagcagctcatcctccttggtctggagtcacctggagacacgggaaagggaaacgtagaagcaactaattataccgaggcaaaacagaatagctgtgtggcagatctactgtaatgtaacttgctttaaaagctatcatttttcctaagcagtagcaaaaatttgacttttaaacatgtaaaaaaaaaaaaaaggaatacaaagaggttcagattaaaattctctgctctcactttgtacaatggagttccaagatttaactcctggaaaacgcaaaggcgcacaatagtaatgatcattttagggatgtaaacagatcggaacatttcaaagcctgtaaatcaactgcaacgcttccatgaaatgactaggggcgggtggaaatttgcactgtttcttacctctggtgtggttctgtgccatttgaactatgtttttagtttcttgaggccaggaagcctgtcttttgtttaccattttgacccagtgaccagaactaagtctggcttacacccagttaagcaccggggaaaaacctgttaaattaatctcgaattttcgttgtccagcaacacttttactcagaagtattgttcaccaaaatctcattcagcgaggcacacttccacttgcaatttccaaacaatttattcggcaataagaatcaacgttggaatgcatcagttcacctaattcaagtcactcaacagcccaatgattggcatatgaggcgcagatcagttagggaactgttccaggggcgcagttaattggggggtagaggcgacaccgggacccagcagggttcaaccccaggcagcctgcattccatggaagcccgcgggctttttcacggtcagttcacttgttttctccgaatcacggaacttaaaacagaggaggggaggcttcaaacctcagaacagggaaagtatcttaaaaccagaagtgaaacaacagcctggactcacacagggcccaggcagcgcaggctccgtggggtttccgaggctgccttcaagggatccccacgcacgcccacccccgctccctgcctcgatttccccatccgggcgaggctgagttgggtccgacgctctgggcctcacattccaggcctcagaagggcagcctttgcggtcagcatcgcggctggagctaggcgacagggcacgacgggccgaggcaccaccttcctgccgccgcccgcctcgagggctcagcgagctggccgtacccgccccgtctcacctgccgcgtccccgcccactgaagcgctggcgagccccgccgctgagagcagcagcccgacaatggaggccacccagccaacgcggtcgccatggagacgccggtacggaatcccgcaggcgccacgctgagcgcgagtgtgtctgtgatgcgcctgcgcgaggggtgtggtgcgcctgcgcgcgggggtgtgcgtgttgtgggggtttgtgcctgcgtgcgggggcggggtgtgggtgcccctgcgcggcagggggtcgggtgtggtgcgcctgcccgggagggggcggggtgtggtgcgcctgcgctggggcggggggttgcgcttgcggtgggggggttgtggtgcgcctgcgcgggggtggcagggggtggtgcgcctgcgcacgcacgcggccaacggtagcatccgtttttccgcgcccgcggccttgaaggggtggtggtcgacgggcaagtagagaccgcgagggtctggaggggcgaccggcctggcacagaggggaaggaagagagcgggatgctaagtgccgtctggggagccggagggcccggggcgggcggggctgctcgaggacagccgagcagaaaagaattgctgctgaggcaccacctttggagcggtcctcgctgcctgtccttcccgctgggctcactccccgcgtctctcctggggcttcctggagccacttcccacaggagctgcttgtccccaaatcttgcctcaggacttgctgccaggggaacgcagactcagagcgtcctctttggagaagtaaggctgcctctggacggaggagtgaggggggcgaggaaacgcagtgagtgtcctgaggaagggttttgagaatttggaagaagatgaaatgacaccgggcgggaggggaggtgctcgcgtggtcctgtggaaccctggagtcccgtgcaccttcattccaggatccaactgataatgaaaagtagcaccctctgtcccacccagaaacactctggaaacccggacagtttagctggagtctgccatgatttcacttttttttttttttttttttttttgaggtggagtcttgctttgtctcccaggctggagtgcagtagcgcgatctcggcccactgcgacctccgcctcccaggttcaagcaattctcctgcctcagcctccccagtagctgggactacaggcgcgcgccaccacgtccagctaatttttgtatttttagtagagacggggtttcatcatgttggccaggctggtctcgatctcctgacctcatgatccgcccccctcggcctcccaaagtgctgggattacaggcatgagccaccgtgcccggcctgattccactttttaaaggaaacgacataattatgtggagaaacgactatccactttgaggggatttacgttttatttttgtgaagagatcacagtaagaaatgttttttaggccggacacgatggctcacgcctgtaaccctagcactttgggaggccagggtgggaagatcgcttgaggccaggagttggagaccagcctgggcaacccagtctctacaaaaattaaaaaaaaaaaaaaaaaaaaatgctgggtgtggtggcacacacctgtagttccagctgtgtgggagggtgaggcaagaggatcgcttgaacctaggattttgaggctgcagtgagttatgattgtgccacttaatgtcagcttcggtgacagcgagaccctgtctcaaaaaaaaagttttcgtacatacccaactatctaccaatcaggaagctgaaagcacaaccagtaccttctcaggagcgtggggaggccagccacccgggcagagcaaggagagaatgaggagtgacatgggtgttgccgtgagtggcgaaggggatggaagatttcagcacgatgctatttctaacaagtttcagcattccagtatctcttttcacaaataaaacatttactaaccatttgagcgtattccctcttgcttgttattgttgcctcaggtttttgtttcacat

SEQ ID NO: 913822 - DNA, 4001 bp, Homo sapiens
agcaaaatcatgggtgagaacaaagtttttaactgctcatgttgcctgattttctttaaggttttgtgttttaattaagagaccaagcgtgtttggcagtagtttctaccacaggttttgagagatgaactgcaaggaagagaacagacaccttcatctaaatagatgtactatttccattggttggtccccatcatgaatttcccattttgttgtgattggcgtatgaaactatgagttaacctttcctctatttaattttagaattcatcaattccaaagagaaagaagcctacaaataaagcccaggggtacattcccatttctgtctataggggacctgtgggcacacagcctgaggagcagccccacttacttgaaggctggggattctaaagacctcctccaaacggcacagaccactttcactcaagtctaaaatcggtgaggaggaaaagatgatgcctccaacacccttgtgaacatctttggagggggtggcaggcaagctcctagtctgaccagcaccctcctccagatcagcagcagccacagagggaacttcgtaggagctgcttccctccatccgttctcttccagggacagcagctcatcctccttggtctggagtcacctggagacacgggaaagggaaacgtagaagcaactaattataccgaggcaaaacagaatagctgtgtggcagatctactgtaatgtaacttgctttaaaagctatcatttttcctaagcagtagcaaaaatttgacttttaaacatgtaaaaaaaaaaaaaaggaatacaaagaggttcagattaaaattctctgctctcactttgtacaatggagttccaagatttaactcctggaaaacgcaaaggcgcacaatagtaatgatcattttagggatgtaaacagatcggaacatttcaaagcctgtaaatcaactgcaacgcttccatgaaatgactaggggcgggtggaaatttgcactgtttcttacctctggtgtggttctgtgccatttgaactatgtttttagtttcttgaggccaggaagcctgtcttttgtttaccattttgacccagtgaccagaactaagtctggcttacacccagttaagcaccggggaaaaacctgttaaattaatctcgaattttcgttgtccagcaacacttttactcagaagtattgttcaccaaaatctcattcagcgaggcacacttccacttgcaatttccaaacaatttattcggcaataagaatcaacgttggaatgcatcagttcacctaattcaagtcactcaacagcccaatgattggcatatgaggcgcagatcagttagggaactgttccaggggcgcagttaattggggggtagaggcgacaccgggacccagcagggttcaaccccaggcagcctgcattccatggaagcccgcgggctttttcacggtcagttcacttgttttctccgaatcacggaacttaaaacagaggaggggaggcttcaaacctcagaacagggaaagtatcttaaaaccagaagtgaaacaacagcctggactcacacagggcccaggcagcgcaggctccgtggggtttccgaggctgccttcaagggatccccacgcacgcccacccccgctccctgcctcgatttccccatccgggcgaggctgagttgggtccgacgctctgggcctcacattccaggcctcagaagggcagcctttgcggtcagcatcgcggctggagctaggcgacagggcacgacgggccgaggcaccaccttcctgccgccgcccgcctcgagggctcagcgagctggccgtacccgccccgtctcacctgccgcgtccccgcccactgaagcgctggcgagccccgccgctgagagcagcagcccgacaatggaggccacccagccaacgcggtcgccatggagacgccggtacggaatcccgcaggcgccacgctgagcgcgagtgtgtctgtgatgcgcctgcgcgaggggtgtggtgcgcctgcgcgcgggggtgtgcgtgttgtgggggtttgtgcctgcgtgcgggggcggggtgtgggtgcccctgcgcggcagggggtcgggtgtggtgcgcctgcccgggagggggcggggtgtggtgcgcctgcgctggggcggggggttgcgcttgcggtgggggggttgtggtgcgcctgcgcgggggtggcagggggtggtgcgcctgcgcacgcacgcggccaacggtagcatccgtttttccgcgcccgcggccttgaaggggtggtggtcgacgggcaagtagagaccgcgagggtctggaggggcgaccggcctggcacagaggggaaggaagagagcgggatgctaagtgccgtctggggagccggagggcccggggcgggcggggctgctcgaggacagccgagcagaaaagaattgctgctgaggcaccacctttggagcggtcctcgctgcctgtccttcccgctgggctcactccccgcgtctctcctggggcttcctggagccacttcccacaggagctgcttgtccccaaatcttgcctcaggacttgctgccaggggaacgcagactcagagcgtcctctttggagaagtaaggctgcctctggacggaggagtgaggggggcgaggaaacgcagtgagtgtcctgaggaagggttttgagaatttggaagaagatgaaatgacaccgggcgggaggggaggtgctcgcgtggtcctgtggaaccctggagtcccgtgcaccttcattccaggatccaactgataatgaaaagtagcaccctctgtcccacccagaaacactctggaaacccggacagtttagctggagtctgccatgatttcacttttttttttttttttttttttttgaggtggagtcttgctttgtctcccaggctggagtgcagtagcgcgatctcggcccactgcgacctccgcctcccaggttcaagcaattctcctgcctcagcctccccagtagctgggactacaggcgcgcgccaccacgtccagctaatttttgtatttttagtagagacggggtttcatcatgttggccaggctggtctcgatctcctgacctcatgatccgcccccctcggcctcccaaagtgctgggattacaggcatgagccaccgtgcccggcctgattccactttttaaaggaaacgacataattatgtggagaaacgactatccactttgaggggatttacgttttatttttgtgaagagatcacagtaagaaatgttttttaggccggacacgatggctcacgcctgtaaccctagcactttgggaggccagggtgggaagatcgcttgaggccaggagttggagaccagcctgggcaacccagtctctacaaaaattaaaaaaaaaaaaaaaaaaaaatgctgggtgtggtggcacacacctgtagttccagctgtgtgggagggtgaggcaagaggatcgcttgaacctaggattttgaggctgcagtgagttatgattgtgccacttaatgtcagcttcggtgacagcgagaccctgtctcaaaaaaaaagttttcgtacatacccaactatctaccaatcaggaagctgaaagcacaaccagtaccttctcaggagcgtggggaggccagccacccgggcagagcaaggagagaatgaggagtgacatgggtgttgccgtgagtggcgaaggggatggaagatttcagcacgatgctatttctaacaagtttcagcattccagtatctcttttcacaaataaaacatttactaaccatttgagcgtattccctcttgcttgttattgttgcctcaggtttttgtttcacatttttcatgctacattaatttttgtagtcagtagttaattgtatgtacgagcatgttttgccctttactgtgctcagtttttgcccagccagattgtatccattggtagccttttggcaagtattctt

SEQ ID NO: 913823 - DNA, 4001 bp, Homo sapiens
ctggccagatcaaacctctctgtagtacttttgccacagatgctgtagttcttcactgcatcgatcacatttactccttgcagctctttgggactggcacagataattgtattctcccttagacctttaaaacttttcagccagtttacaagggagcaaatatttctgctgcattcccatatattcccagcaagactgatgtcattgagggatatccaagaatccaaaatctcttgaccaataaatgtgagcttgttggaatccaggttgaggcgctgcagattcgggacacactggaaaacactgggtccactgaaagcttcgatctcattgcctgataaatcaagcctttgtaaggagctccaggtccaggacatggtctgtcctatgacactgattttattccactgcaagtaaaggttctgaaggctgaccaaccttggaaaaagggccaggttgagcttggaaaattgattgtgctccaggtgaagttctttgagtctgatcatgccagcaaagacattcctggctaaacttcggatccggttatatcccaggtccaaaagttccaggttgcggcagtcttggaatattcgcacagggatggttctcagggagttagaccgtaaatgtaaactcagcagcttccgcaagccccgaaactgttcagatcccagagaatgcagctgattataggacagatccaagttccgtaaatttgtcacaggtctgaaggtattgttaagaaaataggagattctattggaactaagaatcagctctttgagtctgcgtattccattaaaagcattttcgtcaatattgctgatatggttatggtcaaggtatagccaggtgagctggttgagccctttaaattgattatacttaagtttttgaaggctgttatagcgaagggacaaacctaagcaaccagcagatatacttgagggtatctcctgtaatttctgagattcacaatataccattttgccttcacacctacagcccttagggcatcctcgttcggcagaagaaagcattgtcagtaagacagtgggggctataaccagtgctacagctgatccgctcagtagcctaattacattgaaacctggaaataaaaacaacttagaaaagttatccccccaaaaaagaattaatccttaatcaagcaaaaataggcatatatttttcatttttaaaaatttaaatctaaataacacttaacatcacatattatctctttgtaattaaagagaattgtctttagtgttttgtttttttaaatagttaaacaaggaaacatgccactaagcaaataaattcatagtcttagagcagagcaaggtaatctctaaaataattaaggcagaattattacacacactagaggttttttgttttttgtttttaagaaggaaagaagaaaaatgacaaaacatacccatcctttgtattgttcaaaggtcgtccttaggtcttttgctttggcttaggggccagttgcatgacagcccctgtcagctgcactgtagtgagtcagggctcgctgacacccaggaagaaaaattggaccccttgggagatggaccgattttggaacattattctttgccagccacgcagaacactccaagaacaaataaatcccaacaccgcattcgcagcaaaacatcaaaatcttcctaggtaataggatcttcatggatattacgtttttgcatctttacagttttttggggggtggggagggggcggttaaaaaaaaaactggatcctacaatttcttcttatcgaaaaacatgatgtattcttccaggcaatttggggctacctgagctgccacatctgtattccataccccagcagttcccgtgatgagcacccagttcagccacagagctgcgttggagcccagaaggcaggagagccccgtaccgcgcacacgctcagctcacttctgcagactgtcattctgaaagctgctcggactgttgctttggtttcagtgaatgcagtcttatgtaaagctgcccccagtggtgaagaacattatgggcatgtgcagaaatgtctctcttttatcttgcaaatgagcaggctctctgctggaaaatgaatgattcttttgggtggctcagtaggaactgaatggtcaccgtgatcaataactagcaacattttctgtgatttccaagtcttgttttacaatttggcaacgtctttattgtctgtgtccacttaattgctaaacatgtgctgcccagagtttttctggagcttgacattaagttcacagaccgaacgtcaatttttcttaacctcaacgcaggctttaaactgaaatttataaaatgaattattgagcttttcacagagaagcattaactgcctgcccatttgacctcttggagtcacagtgattatattatgcaaggtgtctcaggatgttagaacacaaacattttggaatagaggggatgactgatgacaagtgaattaatgtgtccaatagcctttccggttttctcacagacgatataattgattttatggctatagtttcgtttgttgttttggttgttgtaattctcttttaattagaagggaaataaaccatttttagtgttaggatacgaatcaagagatcatttggttcatactttattgatgttgctgctatttattacactaataatatttatggagcactttctaagtgctttaaatgggctacgttgttttctctttaaacaatagtatgatgtgggtcctattataacctctcttttaaagatgaggaaacagacttggggaggtaactttctcaaggtcatacagcaagcgagtgctagagctgagcttcagaagcgagtcattcttatgccgaaccactaaccactagatgatcctgttcaacaacattgttatcttcatttaaaaaagaagtcagtgaaaatgaagccgattaaaggattggggcaaggaagctgtgattagcaaattcttgcttgttctattagaattgcctaaatttcttttggtctgaggttcctaaagaagtataaaaactaaggcagcgtagtttagtgattaacagcatagattttggcacctagattccaactcctggctacaatttaccagctatgtaaccttaagcgcgttacttaccttccctatgcctcagttttctcatctgcaaaacgggcataaaaacaaaaactcacttcatgttttgagaattaagtcattttaatatctgtatgttacttagaacagtgtgttgcatgcaataagcctgtgtaagatatttgaataatattaactttatttgtacttgctaggattacgtactgaatattgactatactgaccttcattaactcacaaagaacaactttagtgagcatttttaaatattgtacatggtggatttctgagatttactcagtcttgccttctttgatgagataacttcctttatgttcatcatctgaactttatctttaaaataaatcttctggttctgtggatcatgactaataatgttcgattcttttcatctccaaagtagaacataataacatctgccatgtagaggcattttatttaaaaataatggtattcttgaaaaagtttgccttgttgttttttgttaggtgaactgtctgtggaaaaccgtggagagctttcacattctccaaggatgagatgtttgataaaggctagtaatgacaatcaaaaggggtcctacagatatagtacaatggatattaccaattccttgggcagtatgttcttaatagggcagtgctttcccccagagttacctaagctgtgaatgcacatgaaacatccagtgagtttcttaaaaagatagactgcccaatccctcccccaggattctcattctagggggatggaagagtgtgtgcttttcaatagtctctgatgaaataagtttaagaaactcactgtgaaggaatgattaaaaa

SEQ ID NO: 913824 - DNA, 4001 bp, Homo sapiens
tttgttcaaggatcaactggatgtgtagaaacagacagcccatttcagccacagatgaaagacacgtgggcctgtatggaaaactttaagggttattgtttgggggtttatcgaagagtgaagattaagcacctactctttcattttcttttcttgattcagttccaaatgtgggagctttgcttccaaagtatcagtgcttttatttatttatttattttttgagatggaatctcactctgttgtccaggctggagtgcagtggcgccatctgggctcactccaaactctgcctcccaggttcaagcgattctcctgcctcagcctcctgagtagctgggattacaggcgcccaccaccacacctggctaatttttgtgtttctagtatagatgaggtttcacactgttggtcaggctcatttcaaactcctgaccttgtgatctgcccacctcggcctcccaaagtgctgggataacaggtgtgagccaccatgcccagcccaaaacatgagtgttttatcttagattgcaaatgcattgctttgctaagcttcaccaccagtgctccggggggcctcctaaaagtctggcacctgactggggagcaagagggatggaggacaaagcctcatgaaaggaggaaagcacctgggggagcagaggggcaataaagagacccctgcggaatcatctgaaatgggagtaggatcaagagagctgtctcctgctgcctactgattttccacaatctcttcccctcttgaaataatgtcttccccaaatacaacagccttgctgggatggggtgaagtgaaatttctgacaactactcgggatcctgaacttgatgttcttacatatgttcatcccgtgtcattttctgcacttgcctagaaacttctccagtcattagtttctctccctggggctggattcctgcattgaaaggctaggcccaaaacagggataagtagtcatcagcaaggccaccgcaccaagtaacaagcagggctttaaggtgactaagcaataaggtaaggaactgcattgcatgaggggcatgtacattacaaacgtgaatagcaagcgtgggcaaaccaggcccgcttttgtatgtaaagttttattgaaacatagctacacccatttggtaatatatcattggtggctgatttccaactacagtggcagagttcagtaattgtgtttgaggccgtatagaccacaaagcctaacatattattatctggcccttttcagagagagcatgccagtccgctgtgtacagcactgtgttaagctgtgagggacagacaaacgaggtttaagatgcagagctaaggccaggcatggtgggtgatacctgtaatccaagcactttgggaggctgaggtgagcagattgcttgaagccaggagtttgagactagcctgggcagcaaaggtagaccctgcctctacaaaatatacaaaaattagccaggcatggtggtgtgtgcctgtggtcccagctactggggaggctgaggtgggaggatcacttgaggctgggagtttgaggccatagtgagccatgattgtgacactgcactccagcctgggcagcagagtgagagaccctgtctaaaaaaaaaaaaaaaaaagaaaagaaaaaagaaaaaaagatacagagcttacaaatagagttggtttccatcccctgccttagaattttactgatctcaaacaagtccaaagaaaacccgcagcaatgataaccccaagcatcatgttctacatccttcaagaacctgccattgctggttctcataagagtaatttaggtcttactgaaaaggcagattcctggtgcctgccccagaggctgacttctcagttgagtctgcggaagaaacactgctccacttagtcggtgacaggcagctcaggggagcgtcctgcatcccctgaagccatgtctgattctaacgaggcgcgagtaatcctttcctagctcaagaacatttctttagagtgttagagaaagaaaaattcttaatcctttgtttctcaccacctagagatgctagaattctacttcttggcactaaaagctgtatcatcctgcatgcttgtgttctgaggcaggtgataactgtcttctggggcttaatacctcttgttttttgtcttttcccctcaacaaccctcctcattacacaacttggccagggcctcctgtccaagtgagagctcttctctgaggcgtctgcaaactttatcacaaattccattaataaagaaagttaagcatgtatcctctttagatgtacattgagttataaatcatacttctgtacctcagtactaatatgctacataaattatcaacatacataaaactaaaatttgaaaattaatgacatagaggtgaaattaacattaaaaatttattaacagcacatttgctatagtcaaattattattaataaaatatttttgtaataacatgattttattatttttgaaaaatttggcttaacactttgtgaatcaataactaaagggctgttttcaaggtctatttatttcaatgttcagatttagtgacacatttgaaatgaattctcattagaatatgtagatctaagtagaagtttattgttggctgcacctaactaatcgttatattttcttaaattccatctgccaataatgcaaaggttttgttgaaatctattttgaagttcatatagtattgcattatacagatacaacatagcatacttagccaatttcatattgatgcacacttattttattcttctattgtaaacatattacaaccagtaattttgtacatatgtcatttgtaactttacaagaatatcttgctggatcaaagggtataattttgtaattttgctagatatttgccaaattgcctttcacatgggcttgtatcaggaagatagcacactgtgttatcaaatgtttcaatatttctcaatattagagatgaaacataatttttcagcagagtttcaatttcaactttcgttatttcaagctgcttgagggtcttttttatctttagaagccattagtggacttcttgtgaacagtctataatatgagaaaatgtataggtttttccctcaaacatctttttcaaaatgctttgaaatagggatcttaccagtgagaaaatagagacggattgtctttttctttttcaaaaatgcttgcttagcaagttttcagatatgacgtaaatatacaaaagccatttacaatcttatatactaggaatagaaaataagagtttgaaataaaaaaaaatccatttacaatagtacacaaatgcaaatgaagtacttaaatttaaacctaacaaaatatgtgcaggatatatatactgacaactataagacagacggaaaattaaagaagacctgagtaaatgaaaaagacacaccatattcatgaatttgaagagtcaatattattaagatttaatacatagatttagtggaatcccatttaaactcccagaaaaattgtttagaaaatatcaataagagggtcctaaaacttatatgaaaaggcaaagggactagagtaggcaaaactattcagaagaataataaaattgaaggactcatattgcttgattttagaacttaatataaagctgtagtaatcaagacaggatgatatttgtggaaacagacacataggacagtgtaacaaaatagagagcctagaaatagtgttacacatatgtagtcaagtagctttttataaagatgcaaattaaattcaatggaaagatgatgttccatttaacacatggtactaaaataagactgtctatgtgcaaaacaacgaaaacaacaaaaataaaacaaggcataaggcatattgaagaatacataccttatatctcatacaaaaattaattcaagatggatcaaaagcctaaatgtaaaaagtgtgaaacgatgaaattctttaagtt

SEQ ID NO: 913825 - DNA, 4001 bp, Homo sapiens
gtcaaaagttacatgcagattttcaactgagcaggcattggcaccccgacccctacatttgttcaaggatcaactgggtgtgtagaaacagacaccccatttcagccagagatgaaatacacgtggacctgaatggaaaactttaagattcatcgtctaggccaggcgcggtggctcacgcctgtaatcccggcactttgggaggccgagacgggcggatcacgaggtcaggagatcaagaccatcctggctaatgcggtgaaaccccgtctctactaaaaatacaaaaaaattagccgggtgtggtggcatgtgtctgtagtcccagctgctcgggaggctgaggcaggagaatggcgtgaacccaggaggctgagcttgcagtgagcggagattgcgccactgcactccagcctgggcgacagagcgagactccgcctcaaaaaaaaaaagattcatcgtttgggggtttattgaagggtgaagattaagcacctaatctttccttttcttttcttgatgcatttcaaaatgtgggagcattgcttccaaagtactagtgttttatcttagattgcaaatgcattgctttgctaagcttcacaaccagtgctccgggcggcctcctaaaagtctggcacctgactggggagcaagagggatggaggacaaagcctcatgaaaggaggaaagcacctgggggagcagagggacaataaagaggcccccatagaatcgtctgaaatgggagtaggatcaagagcgctgtctcctgctgcctactgattttccacaatctcctcccctcttaaaataatgtcttccccaaacacaacagccttgctgggatggggtgaagtgaaatttctgacaactactcgggatcctgaacttgatgttcttacatatgttcatcccgtgtcattttctgcacttgcctggaaacttctctagtcattagtttctctccctggggctggattcctgcattgaaaggctaggcccaaaacagggataagtagtcatcagcaaggccaccgcaccgagtaacaagcagggctttaaggtgactaagcaataagataaggaactgcattgcatgaggggcatgtacattacaaacgtgaatagcaagcgtgggcaaaccaggcccgcttttgtatgtaaagttttattgaaacatagctactctcatcatttggtaatatattgttggtggctgatttcctgctgcagtggcagagttgagtagctgtgttagaggctgtatagaccacaaagcctaacatattattatctggcccttttcagagagatcatgccagtccgtggtgtacagcattgtgctaagctgtgagggacagacaaacgaggtttaagatgcagagcttaggctgggcatggtggcccacacctgtaatctcagcactttgtgagggtgaaaagggcaaattgcttgaagccaggagtttgagaccagcctgggcaacaaaggtagacctctgtcactacaaaatacacaaaaattagccaggcatagtggtgtgtgactgtggtcccacctgtttgggaggctgaggtgggaggatcttttaaggctgggaggttgaggctgttgtgagttgtgattgtgccactgcactccagcctgggcaacagagtgacatcctgtttcaaaaaaaaaaaaaaagatgcagagcttacaaataaggttggtttccatcctctgccttagaatgttaactgatctcaaacaagtcaaaacaaaacccgtagcaatgataaccccaagcatcatgttctacatccttcaagaacctgccattgctggttctcagggacaggtggcttcataagagtaatttaggtcttactgaaaaggcagattcctggtgcctgccgcagaggctgacttctcagttgagtctgcggaagaaacactgctccacttagtcggtgacaggcagctcaggggagcgtcctgcatcccctgaagccatgtctgattctaacaaggctcgagtaatcctttcctagctcaagaacctttctttagagtgttagagaaagaaaaattcttagtcctttgtttctcaccacctagagatgctagaattctacttcttggcactaaaagctatatcatcctgcacgcttgtgttctgaagcaggtgctaactctcttctgggccttaatacctctcgttttttctcttttcctctcaacaactgtcctcactacacaacttggccagggcctcccgtccaagtgagagctcttctctaaggcaacagtctgcaaactttatcacaaattccattaataaagttaagcatgtatcctctttagatgtatattaaattataaatcacacttctgtacctctgtactaatatgctacataaattatcaacatacacaaaactaaaatctgaaaatgaatgagaggtgaaattaacattaaaaattaattaacagcacatttctttgctatagttatattgttaattaataaaatattgtcaaaggagggccacaaaagaaataaaaaatttttatgtataattaacatgatttcattgttttttaaaaatttggcttaacactttgtgactcaataaagagctagtttgaaggtccatttatttctgtgttcagatttaatgacacatttgaaatgaattctcattggaatatgtagatctcagtataagtttgttgttagttgtacctaactaattattgtattttattaaattccatctgcaaataatgcaaagatcttgttgaaatctagttttaagtttatatagtattacattgtgtagatataacatatttagccaattccatattgactcacacttaaggtatttttttcttctatgataaacatattacaattagtaatcttgtacatttgtcatttgtacatttgcaagaatatctgtaggatacattcctggaaattgaattgctgggttaaggactgtaattttgtaattttgctagatattgccaaattgccttccacgtgggcttgtatgacgaagatggctagcataccctattaccaaaggttaagatatttgctaatattagagatgaaacataatttgtcagcaaagtttcaatttcagcttcccttatttcaagctgtctgagcatcttttcttatcttcagaagccatttgtggacttttttctctctctctctctctttttttttttttttaattgagacagagtctccctctgttgtccaggctggagctcagtagtgtgatctcggctcattgcaacctccacctcgcaggttgaagcgattctcgtgcctcagcctcccgagtagctggtattacaggcatgtgcccccacgcccagataatttttgtatttttagtagagatggtgtttcaccatgtctgccagactggtctcaaactcctgatctcaagcaatctgctcgcctcaacctcccaaagtgctgaaattataggcatgatccacggcatctggcctgtgtgctttttcttgtgaattgtctataatacgagaaaatacataggtttttcttcaaacatctttttcaaagtgctttgaaataggaattttatagtcaatgagaaaatagagacagattgtcttttttttcaaaaatgcttgtttagcaagttttcggatacatagtaaatatacaaaagccatttctattcttatatactaggaatcaaaatattttagattcttctaaaataaaaaatatcatttacaacagcacacacaagaatatgacgtacttaaatgtaaacctaacaaaatctgtgcaggatatatattctgacaactgtaagacagatgaaaaactaaagaagacctaagtggaaaagaaataccatgttcctgaatttaaaaattctatgttgttaagatttaatctatagatttaatggaattccaattaaaatcccagaaaattgttttgaaaatatcaataaga

SEQ ID NO: 913826 - DNA, 4001 bp, Homo sapiens
atcggagaggagcggcccctggctccccaacaatcactggggcgaaccggtgcaagcctacagcccaaacctacaccagcctcacggcagacaatattccacttcctcagggtcaagtagtctcaccttctcgcacacaatacagtctccctaacacccacaagacctttcccacatgcagccgcagtctcagccgtcacgtgggtccgcgttccttctttccataatcttccagtccacctcacacacagacacggtgtcacaggcctgttgggcacaggcttccacaacaatccgcagtccttcgcacccagtcacagtctcaagtgcacttagtctcctaaccatctttcacgcattgacagcctctattcacagtcactcacacagacaacttcttacacgccgtgcttcacaaatattctaccgcacagcctttcccctaggggtctcggtgacccggtcaggtcagctgatgcctgcatccctgggcaaaggcagcctttctcccctaaccaccccctcccccgcagggccaaggcctgccggagctcgcccgggccccaggaaggagcatcccccccttccaggccacagccctggccggctctcagctctatttttagctccatggacagggttgtttttctttctttttccctggaaagggaaacacagcccagccaccctgactcaccccagaccctcagcctcacaagaacagactgagcccctctccccagcagagccccctcctctggccttgccctgatccctgcctcctggggcaccgagagcctcctcctctttctggcagcctgcccagctcaggcggcagctgggctcagcgtgtgtgtaggggtagggggtggggcgaggaggaggcatcgggctactgcccactccctcattccctggggggaggggctcgtcctcctttttctaggggggcaggcccactctggtattgagggagcgtttacactcatgcattttctggggggaggagactccgactcccgcaaggagtggaggtgagggtaggaaggggacccgcaggcgctcaggcagctgctctctgggctggcggtaacaggcgggggcagctgtccactgccatcaagggcctgtctccgaaaccttcagggatgcagacaccaagaatgtgctggggagaaggacgtccaggagcccgagttaaccccagccctgcccagcagccgggccctcctgctccgccccggctccagggggcgctgtgctccggttcccgggagagggcttatccccgctccaggcggagaatggaacgccgtccggcctgggaccaagcaaacgcgccccggactagggtggatttccgccccgtggttgggttgggggcacaggccactggtctgcggagctgtcacgtgctcggcgtctgtttacgtcttggtcttcacctgcgggaggccaggaagcaggaacctccgggtgcgtcccacccggcccgcccccgtcggtagtcacagggctgcccctttcccgcacccaatacgcgaccgcagagtgccctgcccgctgtgggtccgcgcgggccggctggcgctgtccctgggagtgcaagggtggccaactgggcgcgtcctttccgagtgcatgtgtgttcgcgtgtcccaagtgcgggcgtgggtctgtgcacgcgtgtgtggggcccgtcggcgtgcgttttcgtgtcacttccctgttcggactcttcgcggggaccccaccaagtgcggacccccctcctcaccccaacccctagcttccctagaagcggaaagttcgttcaggagcggggatgagcgggaggcgggagttcctgcacctccgccgccccaccactcacccagcgccacctgcgcctcggctccagttccggccccgctcctgctccagcgcgcccacctcctcgccgcgacaacgccggctccctagccggctccgaactctaggttccgaactctgggctcccggctcccagctcccggcgcccgcctggcccgacctggtggagcggggcggggcggggcggctcaggccgcgccccccacccagggaggggagtggtctgccccgcactccaccagcagccgacccagtgcccagcctaagagtgactcgacggtggccgaggctgcccctctggcctctgacttcacagcttactggatttggtttttgacctggggaagggggcgagcatcacgtgaccgagaattcggctacctggctgccttaaactaagcttaaactaagagcttgactctgccaccctccctgctccgatgggagcccaacccggtccactcttggcccaatccccaaatacagggacaacccctgggaagcagacaaagaaggctcaagtttcaccagagcagctcccacctacccctaccacgcacacacctcagcgtggggctgcccaggcagaaccagcacagccccctccctagagtaggtatctgcccaggtgagcaggcctgcgggttctgacccccacggggcatggctgggcttctcgaagactcataaagtcccacccacaggcacaaacaggaagttggcctgtattgcagggaggccccaagggctccctcccaccatggcactcaaggcagcatgtaggaaggtctacaggtatctggcccatatgggctacaggagacctcggtgagttgttttttgagacggagtctcgctctgtcgcccagaatgcagcggcacgatcttggctcattgcaacttccgcttcccaggttcaagcgattctcctgcctcagcctccagagcagctgggactagaggcgcgcaccaccacgcccggctaatttttgtatttttagtagagacggggtttcaccatattggccaggctggtctcaaactcctgacctcgtgatccacccgcctcggcctccaaaagtgctgggattacaggcgtaagccaccgcacccggccgagttgtttcttcttaaacccatccacagcagagaggaagctgccagaggaccaaagctgtcccctcatggccaagtgtgacatacattatcaattagaggacaaggctgtagatccaactggacctggcttagccaggcctttcctgagatctcagggaaattttttttttttcctcccaatccaccgaacctgtgagtcagggagattcttaacatccagttgggtgtagacagaccagtcctatcccagggaatccgcacaggccctagggaccccccactgctttctagaatccagggatctgaacagactgggtggaatcatgatatggggtatttaaggcaggtatggaatagaacgtgtttgtgcagcgggtagggctggggggagtattagcttcccctccccctcatcattctggtttgtgctgtgtgggggtgtctgctagaagggtggggcaagacaaacagccaagtctgtatctatccctctatccccagttcacagagacctcacaaaggtcccctactggaaacccctaaaagatctcctgagaacccaccaggcattctagggagacaggaatgtggaacccacatccttacaggtatgactgatatggtattgtgcctctggaaggcatggctgccgttcagcgttacagactctggatgaggcctagaccagccaacggctgggaatgattactgcgggattagggaggcctggctccagccagtctgggagagacccccaagaagggaggccctggaggagctctccccacccccccaggttcttcctcacagagagcagctttccagcagccttgctccggatgtttcaggagacatttgtgaccagagttctcacactccagagaccacagacccctccatcggccccagaagccccttcataggttgaaaggaagagcctgacaaggcagccctgcttccaaacggagcaggaaaccttcccccaacccttacaaaaggattctccccag

SEQ ID NO: 913827 - DNA, 4001 bp, Homo sapiens
cctctttgctgctcatcaaggaacagtaagggctcttccagacagtccagagcaaggtgcaacaagcccacagttagcgtctctggggaaattggacaaatacaaatgaatctttgcccttggctgaacttggtattgaatggttactgagtagtaacagcatgacagccatcccaaactaagagaaaaatattattagcctgtttcattctacagagaaaaaagttcttcagtaatcactcttctggttttaatgtaatagcaactgaatatataaatggaaggtaaacaatggcaaaatcaaatatgtagaaacttattttagcagaaaagaatgaattctgtaaacatgaattgatattttatctgaataaaaaaaaaagaaggccgggcgcggtggctcacgcctgtaatcccagcactttgggaggccgaggcgggcggatcacgaggtcaggagatcgagaccatcccggctaaaacggtgaaaccccgtctctactaaaaatacaaaaaattagccgggcgtagtggcgggcgcctgtagtcccagctacttgggaggctgaggcaggagaatggcgtgaacccgggaggcggagcttgcagtgagccgagatcccgccactgcactccagcctgggcgacagagcgagactccgtctcaaaaaaaaaaaaaaaaaaaaaagaagacatatgtttgagttaagtgacctacaataatagaattcgtgcctctggataattaaccgcaccaatagctactatgaactctcaatgagcccctggtaattttatgaaaatgtggtttatgaagggtgaatgtgtgtaagaatgacactagtctccattgctgaaatatggtgaaccctgaagattgcatattgcaatagaaatgacaggaacgtacatgtcattacacacgtcttcccttggtaagcttcttcctgttccttagtgttctcccagtatgccatggggcattttcccacctgtgagagttgctttatctcatctcatgacctcttataataaaataaagttcaaaatcacaggagatttgggtcctggatgactcatccaggacataaatctaggtcttgcattctctgaagcttgtgcccttctactactctgaaatcaaaggacaaaagccagagttgtatcccacatgcaattggtaccaacccacttgatagcagtgttctgtaaatgaaaataaaatctacccaaccaatctaaaattcatttcaaatatctccacattaaattcacacgtaagctattgatctccatcatagcattttacagctgcattaatgagttcttttaaattttgtttcactcacgtaacattaaagctatatctttgtttagcactccttcttcataatcagtaaaaactgactgaaaaatatattccatcaggtgaatatcttcatgatttgataatttttttatatggactcatctctttagtaaacaatatatcttagtttctgatctacactaaaggtatacaagatacaatgcatacagagccaagtatctagccaaatctcccagactgctcagaggccctcgtttcaggctgtacggggaattgaaattggagaaaggagaatgtcacttacagtgccgttcatcactgctatccccacactgatctgtgaagtcacaaatgctgtcaggaggcaaggagactccattgtcacactgaaagctttctgtcccttgctgagccagtgtagaattgaaaacacaggcaatccaaaggcaacaaaaagtttcattcatggggaatgccaacattctgtccaggaagaagagcattacttggtattgtctattagagatcaagcagttgtaataagtaagtccatcattggaaacattcttttatttctctattcttcctttcccagatttgcttcttataactggatactattggtaactatctgcaactctaacaaattactccccaggcagttaatttgctctttcaaaggagtgactttagaaaatatttaacttgagtaattacgctggttctttatctagctaactatagatgattattgccccctgtatgccatatttacacaatttaagcctttatggtcttgctatctcctgaaagacatttgtaaaaaataaaggccagctaaataaacagcaggggagaggcaaccacaataaagctataaattacataaaaatggtctgtcttaattcctatactcaatcacatttgtgtaatttagaacattattgtggacactaaaacatattcaaaatttcaggcccaattattagaattgctctatgaaaataaaatgcttttccattattatgaaatagaaaactcaccttgcttgtttttgtcttcttttgtttgtttgtctgtctatagcccatgggtgctagtaagtgcttcttgagataaattaagaaccatagatttttaaaagttgaggggacattggatgttattattttataaatcatataacttcaacccaaggaagttatgagatatatgtgagaaaatacaataagttggtataagaaattagagctcaaatatcctgctgctaagaacagtgttccctcttctatagcacaagaattcacctgtcaattcatcacgatttacttttacaagtgaaacacctgatttcaggatgcatattcagaatgaacaatatattgaagttgagatcacacagacataataattacataatcttatgagcgtgaatattatagaaattatgtgatgttgaatgttctatacattgctttatatttgatttcttaaggggatgttaaagttctttttcaactattttattttaatttctgcagtgtaaccgcaagaggcaaaaataaccggagaatgtagagtggaaaggagcatagaccaggggcagaaaaggcatctgagcatttttttaaatgttctaagaattacccatattgtaggggaaaaagtatatacatacattttgtgtagacattctggattctggggggcagggggacaggaatccacaattctgcctttcctctgagcactccacataatctaacattttgttgcactgtgcttcagccctgtttcatatatttattcttcttacccctctgttttgcaaacaaatactaataaatccttcatctacctctttttctttgcttgtcccttaaatgctgactatccttatagttccattttaagttctcctttctcctaagattatattaataaattttttctaggctctctcttcactctcatgatttcaagtaagatctctttatttttgtttcctcaatctcttctacaatcctgatatgcacttcttcctgagaacacgcagacacacacacacacacacacacacacacacctaattaacacatctacttttatagaaaactaaactcattttcctttcccccaccgccaaccagctcttactcccatgttccatatttcaatgaatggtaccttcttctgtccaattacccaagtaaggaacctgtagattgttcctggactactctcacctatcctacctattaatcaccctgtctggtattttccatatttccgttgaagactctatccattctcatctcagcatgtttctggtactcacaactcatttcctagtcttagagtagagtgatcattctaaagcacaaatccactcctatctatttccctctgaaatcagtagaactgtcatactctgaatgtagcttacaaacacagcttaccctgcaaggctcaatgcttccctatgctctccagcacagccttactgagtgactgtgctggcagttttctaaacatgccatctctcaactccagatctgaaatcccttccccaccccaatcaccaggttaatcattattctttatttttcatcttaggagacttcctctaagatatcttggctgatttacccaggctgagttacgtttcatt

SEQ ID NO: 913828 - DNA, 4001 bp, Homo sapiens
cgaggaaattctcttcctaaacattaacataatactcttggctgcctccatatacagaaacaaaatgtgagtgtttcctggcaagtgtgaatgaaaatggccagcataacagcatatgcttctgcctaacaaagaatgactattacttgtgttatttctcatttaaaatatttttttaggccgggcacagtggctcatgcctgtaatctcagcactttgggaggccaaggagggtgcatcacctgaggtcaggagttcaagaccagcctggccaacatggtgaaaccctgtctctacaaaaattagccgggcgtggcggcgggcgcctgtaatcccagctactcgggaggctgaggcaagagaatcgcttgaacccgggaggtggaggttgcagtgagccgagatcgcgccattgcgctccagcctgggcgacaagagtgaaaccccctctcaaaaaaaatttaaaaattatatatacatatatacatatgtgtgccaaaatagtacattctccctcagggcacatttctgactatgtttttgctctcaaaaagccccggattatgcgtttcaggcgtatggaaggaaggaccgacactctgcttcaaaacctctacatgcctcaacgttcccatttgctttacacgacaaagtcctcatgggccgtatgccagacgtcctgcacacaaacctcaatccgtcgcagagagctgggggcgtcagctggaagtggattacactctccttggcacaaacgactcaggccacaggtatgtaaagcaactgcaagagcctttctgtccctgttttttatcaagagcagcctttaatcttgtcttcccaaaagtgaaatagacaagcatcgcaacgtttctctcttacaggcagccggtggccttcccctgttaactatggagacaatccctaggcgtccttctccgcccagagctagaaaaatttcagagtcctgatcatgcactatcgctcgaaaacaacttccgtgaaaataactttttttttctcctagtattctttcttagaccaaaagcccagccttcgtgttctgctatgacctctttagtcatgggatagagtccgggttacaaacttgaatttagttccagccattcacaagtctctgggctccgccaacccacactcccactcctttcctcctggttctctaagtcaagggagcctaaaaggcttataaattatcaaagcacccagcatttgggaggatcgggtcctccagcctccgagctgcactcaccgggtctcgggcagggagagtgcggccgtccaggcggcgtcggcagcgggaggcgcagtgacagcgggtccccgcttccccgcgcactgcccagaccagcactgccctggcgctgcggatacgggaaggaggaggaagggggaggagtcgcgagtctgcaccccgtgagacccttgcgcaaggtgctttccagctgtgcctggtgcagccggcgacccgcgagcgcagctgtgggcacgcccccacctcttcccacgccagagttttcccctctgctgggggcaccctccatttctgcatgggaatccccggggcacccaggcgggacgcgacccgaaagacacgccggagacccccaaccctggattacctgcggccttggcgctcccacgccggccgagcgctccagccgcggccccccgaaggttcggtgcgatgctggctgcaggcctgtgggagccgagcacgccgggccactgggatccggcggcggcagcggcagaagcaggaaccagggcgccggaccccagagcgtggcgcgcagtccagagcggagcggacgagtgagacccgcgtcgcccgcacgctcagaccgccctgctctgcccctgactcacggcgtctgagcctgcccaggggcggcgcagcggacgccagccaccgcctccccgacttttccatttcccctttctctccgtaaacagaaagagactgcccggttgcagggtaagccagagcccccgcgctgggaaattccgcgtctcccccccacccgccaccccgccgcccctcatttgccctctgggcgcccgggcggagctggaggcgggactagggaggagcagagcggcgcgcagggaggagcgcgggacgtgagctgcggcccgaatcgagagcctgggacggggacgagttttcccccgggcctggtgacccaaggcgtcttagtggcggagttgcaagaggtggttgtgcccttcccggtccccagggaaggtcgtatatcttagtgtactcgcgccctcggcgcttctctggagtcccagggtccggcgggagggcacgctcccggggggcggcggggagggcagtcaccagacctttttccgcgcgccccacgctctggggtggggacagaggcgccgtgtgccctcccagcagtgctgcgggaagccggggaagcttcggggcttcttggaaccgcgactgtgggtccgattgctagtagcacggccccgcctcgcccagatttcgcttcaaattcacacacaaagagggcagtgacccgtggtgcgcacgcacacattccaacttagagatttccaagaggctgcggcagggtgggcccggaacctggttgttgggcgctcggctgggagcctgtgcactccgccagcagaacctggttttcttctctgcagtctttattaaaattggttattttgcggcaccgcctcattaggaagcgtacttgtactatctccccgctcccgcctaccgctaaccctcagtcctagctgctcatctggggttttccttctagagtgtcaagcttttactccaggtgtaaccggaagagagttctagagaaaagcgccactctcccgaaatccactctgcgggacattcccaatgccccgccaccccctccccctacatttcccacgtatcaagcacccactaggaaccaggcattcggctagagcgcggagagctaggagccatgtaaggtcgacatcctctctctctctctctctctctctctctctccccccccacctacggcccaggaggtggggtgtcccaggcacaacccagattcaaacgcggtcacactccaagtccacgccctattcttcccagtgcccaggtccgtgctccctctgcagtttctagattgcctccgcgcggttgcgcacgcctgtaatcccagcgctttggaggccgaggcgggaggatcacttgaggtcaggagttggagaccagcctgggcaacatagctaccccgtctctacaaaaaatctaaaaattagccaggcatggtggctcacgcgtgtcatcctagctcctcggaagctgaggtagggggatcccttgagcccagcagttcgagtctgccgtgagctatgattgcgccatggcactccagcctgggcgacagagcgaggccttgtctcaaatttaaaaaataaaataaaacaaaaaaatttttgagactgagtttcgttcttgttgcccaggctggggtgcaatggagcgatctgggctcaccacaacctccgcctccctggttcaagcgattctcctgcctcagcctcccgagtagctgggattacaggcatgcgccaccacgcccggctaattttgtatttttagtagagatggggtttctccatgttggtcaggctggtctcaaactcccgatatcaggtgattcgtccgcctcagcctcccaaagggctgggattacaggcgtgagccaccgcggccaaccaaaaataaaatttaaaaaaaaaatttgccttgtaccttctctagagccctccacatttctgctatggaaaatgaattacaatacaacccgaggatgtattgagagaattgctggaggagataggttagttgaggtgacaagccaggggctttttgcaggaccttaactcgcagacaacaagcccaggtagcaaatccaacgtcgagggccgattgactgaatgggcactgtcat

SEQ ID NO: 913829 - DNA, 4001 bp, Homo sapiens
taccagtttatgagtgcctgtgtgtggattacgtacatgcacacacacggacacacataaactagcacatacacagaaacacacactccacaacctactttatttatcatattaaaaaaatatttagacaagattttattttaggacagtgaatgacctacacgtgattcaaaagcccatgtcatcataacagataatgtacatgaactgaccatttagccatctgatgcgacagttgcatgaagcttccaaaactttatggagaacattacggttttttttaaggcttgattttaaatattatcaattacaaagagcttttcatcaatccgacttttattgaacacttactatattccaggctaggtggtggagaaacagatgcaagacaggcctgccctcaaggaagtcccattttgattgcttgcttttgtcaggcacagcactaaacatgttcacttagagcatctgacctcctaggtttaacgttaaccacagcaggggaatctgaggtaaccattacaaatgactgtaaggctgcaagactggaaaaaataaaatttagaaataaataaaagctgttgtatatttagaccaaatctaattctacttcctattacacttgaacttccagatatactgcttaaaaaatgacccagaatataaccataccttccttaacagacatcacttatgtaactgtctcatttaaaggtccatctattatacttcagtcaaagcatcctcttccatgaaaggatactttaccttcacaccaaacctcttcatctgagtacggtactaaacagctgctgaatgaatgaatgaatgaaaaaacagatgttctaattgccaaggaggtacttgctggatgcttatctcaaaacacaatggactgacggaccagaattctactggaaagatcgctggatttcagaggtaaaaatagtaatcactggacaatgccatgtagtcaacatgttattaaattcgcagtaaagaccaagcagggaactttcagaaataaaaacggaaagtgttcatcagggtactttaaaatggacttggttctaccatctctgaatcgggaacacaaatgcgagacaaagagatgggagggtggggtgaaaaagtcaaaaggtcaccaccgatgaccctcaagagaaatgcgcgctgaccaccgaagctcgggccaagctggatggacacctcccacccgagccacgggcctgggctctctgccctgcagcccagagctgcaggccactctggcccttttcagcgctgctgcctgcgttcgcccagaacgttagcacaaagaaagcatcgagaagcaaaatacggtccctatgggcgcggggcaggcttggggacctgccggcagaagcgctctccccggctccccgccgccccggaggcagccagggcgcggcgggccgcaaagacacctccgtccgacccttgccgaagtgtttcagaacttgccacccacccccccgctccattttcttctcccgccgcggaggcaggacccacgcgaagaggacgcgagaggacaggcgggcggggctcgcggcggcaggcgggctggcgggcagcggagcgcacccaggtcccgcagccccacgccccctcggctggcccccgcctccgcgccgctattgttcccgcgccgcccccgcccaccgcgcgctcccgcccccactcccaggagggggttacggctgaggagaaggcggcggcggcggcagcggcacaataacataaacacgacggggccgcctgccgtcccggccctgcggcgtccgccgcactcacccggcagcgcagcgaacggcgacagggaagcccgccagcggggacaggggccgtccggggtggtcgccgcggccgttacccagcgctgctcgcggctccgcaatccaagccgcgtcgtccggcctcggccgctcggctgagtaacagagacgcgggccgtcaccgcgcacgcccgcgcacgtcatcgcgcagggccccgcccccgcgcctcccgagcggccggcggggcggggcagccccggggcccggattgcgggggcggggccgccgcccggggacggcgctactccaggggttacgagaggacttgcggaggtcgcttggaggcggagccgcggagagagcctccgagggctgtgggtgaggggcgtggcctggagcgggaggggcgggccctgtggcggcacgtggcggcgcgtggccccaggggaccgcatctggttggcggcggtagccaggtcagagcttaagccttcgggcctcgtcggcacagggttgaagggcaggtgcgcttaggcctaacctgcgcagcgaacaggcacccccttccggtacacacacctgagtgatgaagagctggttaccttgaccgacaatatgttccattctgaggacacctgtccgggtcccagaaacctacagagagataagtgttctcttcagctgcccgggaaaagctgcctccagtttttccaaaatccacctcctccgagattccttgcaaatccacctcttcccagattccttgcattacctggtttacttctgaggccccacaaagcgtgtaaatgttacagaagcgataaattgacaagtcctttaaatatccaacaacgggtggaaaggcgtttgaactacctacaccattcggtagaatacattttagcaatttaaatgccatgtgttcaaggaattcttaacaacataggaacatgttcacaatgtatcattaagagaaagaagcaagaaacaagtcatatatagaatggtcccacttagatactatatatacacatagaaaaaacctggaaagaaatacaccaaattatgttaacaatggttcatcattggactatggaataaagggtgacttggttctcgtttatactttgggtattttctcatgttttccgagaggaatagttatgttcacaatcagaaacaagtaagttactttaataatgaatatataaatatttgttgaataaatgaatgatttcaggtaaactactttcctattacatgtggggctggcctgtttctggtgattctgaaagggaacatacagatgattattcattcattctcttcccatttcctctctccctccctctcaaccttcttaatttccttcctgccatcctttgttcctgcaataattatttattgcatgcccattcagtgccaggcaatacagtagagtttacagatttaatcactgtactatgaaagtaataatagtaaacgcaaaattatcactgttttataatacaaattgttaaggatacataatactatgaaaccaattaatacactagttaataaggccagaaaagatttccctgaggaactgtcacttgagctgggaataggtttgactagacagagaatattttagaggtagctttgcacgcaaaggtcctctgatgagattaagcaggataagatggagaaattcaggaaaggccagctctgctggaggagcaaggaagaaggagctatgagatgaagtcaggaagattggtaaagggaccaaacgtaggacatccatattggccatgttgaaaatctttttatcctaagtgcaatgggaagcccctgacatattcagcaaagggtgtggcatggtcagaatagcttcttgaaaagattccttattggaaagagcccaggtggatgtaggagtagcctagacggtaagaggtggaagcttgatctagggtgatggtcatggaaatagttgatggacatggaaagatctgtgaattatttaggaggtccaacgggcagaacttgcacattctccaagtgatgggttatgtggggcaatgaaggagagggagtcatcaaggaaaactcaaaggtttctggcttgtggccaaggatggatgttagtgctggtttaccaagatgggaatcttggaaaaggaccagactggcattaaaatatcatgagagcaggc

SEQ ID NO: 913830 - DNA, 4001 bp, Homo sapiens
agtcaaaacggcttacaaaatgactccaacttctataatttttgatattgtaaattacttcaagaatgcaggaaagataataaatgccattctattatgcaaatttattaaatcttaatacgttaccataattgctctgattttttttttttttttagacggagtctcactctatcacccaggctggagtgcagtgacaccatctcagctcaccacaacctccacctcccgggttcaagctattctcctgcctccgcctcccaagtagctgggattacaggcatgtgccaccatgcccagctaatttttgtattttgagtacagacagggtttcaccatgttggccaggctggtcttgaactcctgacctcatgatccacccacctcggcctcccaaagtgcggggattataggcgtgagccaccgcgcccggcttgctctgaattttttagaaagaaatataatattataggtcaaacctcctttcttttctctattttctcagagataaacaacatcctaagtttggtatttatgcatgttttaatcttttgtacatatatataatccataaatatatggtactgctttgcatattttaagctacatgtaaatggtataatgatgtatatatatattctacatcttgctttgaagcccagcactacatttctgaggttatccttgttgacacatatggctccagttcgtttaaaatgttatatagtatttcacagcatgactgtatcacaattttttattcttctgttgatagatttgatgctatttccaatttttgctgttataaatggtgctgcaaacaccaatcctatgcatgactccctgtgcacatgtaaaacagtttttttagaacctaggagaaatactggattataaatacttaacagtttacattttgtttagaatagattctgaaatttgtttcaagaagaggtaataaaaatataattattcttgagtgaggcttataattccccaaaacactagtttattattatgctaatttagtgatctgcaatcagtatcagaactatcccaaagagtgatctgcatttcagtttataaagaattatgctgatatagcctgaggcttttgtagaaattagctaataaatcaattttaaacatatggatgaattttgaaacacacacagtgagatattagctgacttcattccccagtatagaataagatttctgaaattccacgcttcattatagtgtgaaagtgatgactaagtgaagcttcttattaaacaattatctatgggaatacatgtatacatgaaattaacaagcatgccacttattctttgctgatagagatatttgtcttcaatggctatgcccaagtatttaatcatagtttatacttaaagatggcagtgctagtttatagagttgtatcttatgaataatacaggttattatcccaaatctgaaaatatgaaatctaaaatgctcgagaatctaaattttgggggcactgacatgatgctcaaaggaaatgttcactgaagtatttctgatttgaatttggaatgctcaaccaatgcaaatattccaaaatctgacacttctggtcctaagcatttcagataagggatactcaacctttaataataataataaagaaaagaccattgatcctgaagcaaacaatttactgtggaatagttttcgtttaatttttagttttaatttaatttttcaaagcaagttaaatatttgccaaggtatctaaattacgagaggagaaaaggtagcagttaatgattctttgcctaatttttggaagtaaacacttaccatactattccttgagctcctgagcctataggttttaaattctgatatcgtttcaggactgtgaatgtagaatctccaatctctacactataaaaattgttgtcacgcttgcttctgctcatgatggcaagcaattaatttaatggcttcatccaaaaattcaccaagaagctgcaagatgcaacaaaacatgatgttaacaaaatgaacttgttttaatcttaaaatttgagtccttactgtttacgtactgatagtaacacagactgctagatcatgaaaagagctgcttcattaaaaaacataagaaaaaaaataccgcagagccttgattagcatatgccatatgaatgactgatagttttttttaaaaaagaaacattaggataaatcattcctccaatctagaagttaccagtattaatacattaataacttacaagacgaacaaaagaaagcaaataattaaaattaaacatgtttttacgtcactccacagtttaaaatttaaaaccagtctttctcatgtgcttattatagagaataaaaaccttaatttttgtaagaaatttataaactttgattcaaaaatggttaagtctcatttagtgccaagtggagggaacaacaaatggaaataagttgactagcatgtgtcatccttgcctaaaaaacaaagggtaccacagtgccttcactgtgacagatcctctgacctgccaaggcaacctcctggtgtaacacacatactgagactgtaatgggtgaaaggatgagaagcaaaacagaaaggagagagagagaagtagttaggcatattgggatacaaaacaaaacaatactattctatcctgcctgaggcattaaaagtacgattcaacttctgactaccattcctttactacttgtaggattaaaaatcaagacactttttttctacccatgtgaatactggttattaacaaacttatccatccttactagacaaaagagactattccaaaatgtatgcaaagcagctttaacctattcctcgcctcctcaataagtcatgaaaccaattaggtctaaagttattgttttttgtggttttaagataatgctaacccccaagaaatcctgatatgacttacaatacaaagaattaattcagcagatattaattgcctactaggcagtctgcatgtcctggggccagatcacaaactaggtaagaaggtgagccactggagagagcatgagaatgccttgacctgatccttggctgcgacatgtagattgtactgcaggagaaagggggagcaagagtggaatatgaacttttgagagactattataatgactcagatgaaagagaaacaatgaagagtcttaggcctaaaggagttaaaaataaacaaaactaaacaggaaactccaaactatgtaagctgtaaaaccgaggacaaataaactagaaacaaatgaggaattagacttggatacattttaaaaggtccagagaaacatttctaaaatcactaactggactagtcatgtagtgctccagggaagactgtctgaaatgacaagactcataaattcttcttaagtggacagcccataataaagaaaggagctttggtaatgatttaaacactgagctatgttcacacaatgctcacatacagggattgttcatcctaatcattttcctaccataacctgaattccctcttacctactacagtagtgaaataaggaagaagagaagtgggaagagtggaagaggagtgttggctgtcaagccctttattaattattctacacatttatcctggaaactgggtcagcgggggacatggagacagtaataatgatctctgataatctgcaaatatgagcagaggctgagcacaaagttgatggtgttttcacctttgggaaggttaaaccttccacccaagcattcagactacctgcagattaggattcctaaccttacttggaggagtcatatgtctctctcaaaaagattaagataatcaggagacaaaggggtactctggtgcttcacaggaggtgatatattgttaccaaagcaggtaacaaaacactgtgtttcagagtttctccacttgctggaaaaaaagaaaaagcttgagtagatccaggaacatgcatgcagtagg

SEQ ID NO: 913831 - DNA, 4001 bp, Homo sapiens
aatgccactgccactgccactgcattccagtctgggcaacagagaccctgtctcaaaaaaagaagaaaaaaagtcactatgtaaaaatgaaaagcaggaggccctcaaaggaaaaaaattaactacaaaataccccacatcagaacagggtctcaacagaatagaactggcagtggcaggtggtttcctctgggcatattttaatttgccacaatttgccaatttacaatgaaaggaaaacctggtaaattatcagaccccctagacaactggggaaactgacaaataagtttgtgcattagttcatacaacaaatacttactgattacctactgagtaccaggctctgttctgggattcaagataaacaatagtaagtttctgcttccaagagcttataaaccacacacatatcacacacatatatatataaagcagtcaatacaattgtcaggatgttgacctgaaacaagggctggatgaatcaccagttatctcaactgaaaaaaatcagtgacataattcctattaactgagatggctcaaaattctaagctccaaaaaaatgtctgtcactctggaaggatgtgtacccttgggtcatttgtgttctgggtgtggcaggcccaaaagcatttaactgggtataaactcaattaagggagggccttcatttaacaccttacagttggaattttactgagtacaaagagttggtaccacctgctgaaatgggtggcaagtggtgtctattgagaattgtaagcaaccacaaacatcatgaattagcttgtacaacttgctatgccaggaagtaagacttggctcgggggaaatgtggatctagagtctccaaaaactcatggtaggacccacggaccagaatttcaacagcagagggcggtgcacccgacttcacaaagagttttaccgactggggccccccaagaatgggcaactggactcctgtacgagctgaaacgtcttcaatgaactcaacgatcgtcaagtacactaaatgttcagcgttggactcatttggctgttttccataacctctactctggtctgaccgttaaatctcccttgcggatactctgaccttacagttcggaggtggggacgggatggggcgggggggacggggggtgcgggttcagggaaagtgggagaatgaaatcagcctatcaggctttccaaaagaatgcttatcattggttctcagacagagacttaaaattataagggggtcattcccctgaaagataacccggttcttgccagtgacatcgctgacaaacacttcacaagttggggagggggaagggggaggggaagagggtaaggaaaactaattttgtggattaacaggagtccctctcaggtcaaaacggggttccaaggaaaccagacgccactccttagctaagtttcacccaaagtctacgacccaggccgctcgctctgtcctcccccaggtctagactccaaactttttgcccctctcacggccccctggccgtggaactcctcccggcacgccgggttctgctcaccaagagcctcgagggcgggcgcgggcagggccagagcgagggtcggcggctcccggtcccccccacagctgcccgtacctgtccagcatctgctgtagggcttggtccggcatcttccgcggagccggcgcacacggccttccccagtggacccgctcaaggccaggcccagggacaatagcactgagaggcggcggagtaggccgcagtccggcggcagccgcgaacccgtcacccagcttcccggggcagctccgctagcctggcggcggcggtgcagggcctgcgggagtccggcggaggcggcggagagcgaggaggaggagcctgaggcggggaggcggcgatcgcggcccgggttcccgtccgtcggcccgaggttccggtccatggaccgcgggcgccgagttgctgccggcggaggagctacctttgtgaggtaagagtcgccgcctccgtgcgcgccagggttacgacgcagggcggcccagagcagcctgggagatgtagtcttcggaccgtctccactagaggctgcacagcccgcccggaccaacgcctccgcgcctgccgccgtctggccggcgccctcccgtttccttcctccagggggaaaaaatgtctttcgggccgctttccaggaagcagcaggatgcgccgctccactgtcggtagcaacaaggtcagccctccctgcctgtttgtttttgcctccgctcttgccctcaggtgggaccgagccaggtgaggggagggggctgaagggccatttcttatcagggtccccggccccggccgtggcgtcggggcggtcagtggcggcagtgggggtggcagaaactccttccgaagcccccggcgctggagccagcctctcctgcggcagagcccattttgggggaattacaccacctccgcgaggggtcggttggtttggtgcgtgaggttcttcttgagggggcgggcaaatagggactgcctggaccagacagcttccacccgagtctctctgtgtgtttggggctggggagttgggggaaggaaagatgattctctccctctccaggaaccttctcaaatgtgcctgggctttccagggctcgccgacagtctccaaatggaacacgttggtgaataaacagctcttgcttactcagctgtgggttgtcagggatgtttgtttctctctctgctgctggtcactgttaaccgtttctagtcgcgttgacaccttcaagcaggtggattgggagtggcgggggtggggaatcaaaaaggagaaatcatcagtcactccttgggtcagcttctgacgttcgagggatagctttggcgggaggaaagagctgtcggctcaaacgaatgcgttttttggacgacctgtggcgttttctctagggctgtgattggtaggacgctggtagttttcccttgattatgtctaatatctgctacaaggtgtttgattttttaaaaaatgaaaatgtgtttttaaagctctttttatatgtagaattttacaatcaacttttcattatctgttcaaaatttgcgaagtatatttgaactagagtgttcattgctgggaaaaaacaacaaacccaaaaaatgtgaccagaagcttacttggcctccaatttttgaaatatgtttttgagaaacagcacccacccccccccaccacacacatacacacacactcctcctagggaaagaaaatgagtatttagtttaatcggggtgtctaatattttatatatatttgtattatatataatatatatgtattatataatatataatacatttataatatataatacatatatacatttataatatataatacatatatatatatatatatatatatatttttttttttttttggtagagacgcggtctcgccatgttgcccaggctggtcttgcaactcctgggctcaagcgagccacccgcattggtctcccaaagtgttgggattacagatgtgagtcaccgcatgtgaccagtgtctaatattttatttaattaattcatttatttaattaattcattgattttgagagatggagtcttgctctgttgcccaggctggagtgcagtggcgctgtcttgactcactgcaagctccacttcctgacttcaagtgatccttctagcctcagcttcccaagtagctgggactacaggtgtgtgccaccacacccagctaatttttgtgttttttagtagagatggggtttcactatatgttgaccaggctggtctcgaacttctgacctcaggcgatcagcccgtctcggcctcccaaagtgctgggattacaggggcgagccaccgcgcctggtctattttatttttttgagacggagtctcgctgtgttgctcaggatggagtgcagtggcactatcttggctcactgcagtctcctcctccgggtt

SEQ ID NO: 913832 - DNA, 4001 bp, Homo sapiens
agttacggcaacataaatgtttggtcttcaaaaacaatagaagatgaatgtctaaggggaaaattctaacatttctcataataagatgggagcacctgaaagaggcaggtggatcacgtacatgtataatcagagatataatcttccattggctacttaggattaaaacaaagcagtgccaccatttattttaagaatatttttgaagttaaacttttttttttatcatgaccaagcatttgtcctgaaataagcagtgatctttccttaaaaccactgtctgtgagtccacataatggtgagatcagaggttaggaagtccaaattaaactcaaggtatctatgatccatacttaaccttccaaaagtagagactctacacgagctgttggcaaactattcctataaagggcaagatacatattttaggcactgtggtccaagtgtgttccagctaattaactctgccactgtagcatgaaagcacccatagagagcatgtaaatgggccgggtgcggtggctcatgcctgtaatcccagcactttgggaggccaaggcgggcaaatcacgaggtcaggagatcgagaccaccctggctaacacggtgaaaccctgtctctactaaaaatacaaaaaattagccaggcatggtggcgggcgcctgtagtcgcagctactcaggaggctgaggcaggagaatggcacaaacccaggaggcggagctcgcagtgagccaagatcgcaccactgcactccagcctgggtaacacagcgagactccaaccccccaacctcccccccaccaaaaaaaaaagagtatgtacatgaatgagcatagttatgttccaataaaactttatttacaaaaataggcagcaggctagatttggcccaccagactatagtttgccaaacactgccgtaaagggtttcctagggaatatgaagggtcaccatgacatgcctaagaaccatgagaaaggctgcctttaggtaaaataacagtgtatgcataaactgtcttcagtgattccaggtactcctgccctgtttctggttttctcttacgcatcccccaaaatgtctaataattgaattgtgtgttgttctttctccccacttacccactgagatctatcccactctgtatacaaaaccaattaaacgtaaattatccagaaggtttaatgtagtaaaatgtttcatgttgttcaaattttaacagaaaatggaagccttcaaccaaaagaatgaatctcgaatttggagattttcatttattaaccatgtgctggggtagggggtggggacaggtgaggcagtaggaaaaggtagggtaaacaacagggcctgacaaccccaaggtcacatttgataagcagtcacttactctacctctccccaaactctactctggatcaaaggcaggtgtttgtaaggctggtgccaattcttagtagtgtcactaagcaagcagaggagcaccaggaatcacgaaatggcttccttcacacaactctagaatcaatgaacaacaaaaaggaacaaaaactgggagggatcaacacatagaagaaaattagctaaaataataatctgtttataaagtctagttttacagtaagtgagtgaccattgataataacaacaaaaaaaggaaaatagaataggggatgttagtgtctaggtatcacacaccacctactctatttcaagcctttgatgaggctggcataagatggagcactactgtgcccaagaaacagtctgaatgtttgtattcaagcacgtcacacaaaacaagaggcacttactgcggagctgccttatactccctgggagatcacaatagtcagtggtaagcagttttttcatcactaatgcactaacgtcctctattacagatgacaaactccatggggcctcttggaatacttggtcaaactgacgatatccacagccctatacctaccatgccaaaagctacctgtggtgcttctgatataatcatcattattacatcattggtacatgcccatgacaagcctgagaagggctatttatggcacagaaacacagatgcaagagggtctcaaattttttacagttttgaaggacatccctcctcactgtcattgaagttagtcttttgatatgtaccaccacaacaaagcaacagacctataagtttgcctgaaacaatctccctcctatgccacacatatttaggataaaaatgagtttacaaacaaacgataaaacaggccatgccattttttatgtgaagatttacatgaaaaatacaaatcatatattacattattttctttgcataatttccaaacatcttttatatcaactaaattaatctttacacagaataacagttaaacctcagcactatgcctcacaatccaggcatgagggcttcaatttgactaatgctaacttgcaaaatacagcccacctaacatgaacattcacatctagaagagatactgccaaagctggttgttgaagaaattggaaatggatgtccatgttcatggatcagaagatttaatattgttaaaatggcaattcttcccaagttgacatagagagtcaaagcaatctctatcaaaaactgagctgacttctttacagaaatttgacaagctgatctgaaaatttatataaaattcaagggactcagatctgccaaaacaaccttgaaaaagaacaaagttggagagctcacatttccagattgcaaaacttacaacaaaggaacagtaatcaagactgtgtcatactggaatatgaatagatatatcaatggaatagaatttagggcccagaaataaacccacgtatctatagtcagctgattttcaagaagggtgccaagatcacttcttggggaaagagtactgttttcaacaaatggtgctgggacaactagatagccacatgcaaaagaaatttggatctcttcctcacacaaaaggaaaaacagacaaactacacatcatcagaataaaaacttttgtgcttcaaaagacaccactgagaaagggaaaacacagccagtcataatggttcacacctataatcccagaactttgggaggccaaggcaagagaatctcttgaggccagaactcaagaaaggcctgggcaatatagcaatactctacctctatttataaatgttaaaaaaaaaaaagtctaaagacaactgacagaagaaaaagtttgcaaatcatatatgtaataagggacttgtatctagaatatataaacaactctcttacaactcagtaacataagggcaaggccaggtgcaagtagctcacgcctatcatctcagcattttcggaggctgaggtgggaggactgcttcaggccaggagttcaaaaccagtgtgtgaaacatagcgaggccccatctctaccaaaataataataataataataataataataataataataataataataaagacaaataacccaatgaaaaatgggttaatcaacatcattagccatcatggaaatacaaatcaaaactattagatattactttaattatgttcataataaaagacaaacaagtgttagcaaggatgttgtgacactgaaaccctcatatactgctagtgaggatctatgcagtcgttttgaaaaatagtctggctctttctcaaaaggttaaacatgttatcatatgacccaacaacttcaatcctagggtatatacaccaaagagaaatgcaaacatctcctcatatgaaaacttgtccatgaatgtttctatcacattactcatgatagccaaaaggtggaaataacctaaacgtccatcaaatgataaacggataaatcaaataagctatatccattcaacggaatcatattcagcaataaaaagaaataaagtactgacacatgccacaatatggacgaacctttaaaaagttatgctaagtaggccaggtgtggtggttcgcgccta

SEQ ID NO: 913833 - DNA, 4001 bp, Homo sapiens
attttaaaaattttacaaaaattcactgtttatctgaaattcatatcaactaggcatcctgtattttatctggcaaacctagctggagccaaaaggtagaatagtaatcaatccaatttcctcatttttcagcagaaactgagaaccaaagaaaggaactgacttgcttaagcttaagccaaagatcagggaagtaagttggttttgaaaagagaaaacctttccactaggtcaccttgggtaccacttacagtacattccacttccaattcttgctcaactcacagaagcaccaagcagacaaggtgtaaaagagtatggtttccctcttgtaacattaaacttcaagtttcagtacatctcttaaaaccctagtctccaaaatcaattaggaaactatgtgctactcttaaaaaaaaaaaacctgataattttgtctacacactaccacctcatactgtttatattttcactcaccatatgaaacaggacatccttctctcctgaactcagttctctcaaaatccaaaattctcttgctccagggtctcaagatttcacacaagagcatgttcacattatttcatgactctcaacgacttgagttcgtatactccttcagttttcatgctttttagcgttttcatgtttttcagatatgtcctaacccattcggttggcctcaaaagtctcccattcccattctgtatcggagcaactaaatcagcaatgaggaatgaagtctcactattataaacatacacttacttccccagggactgggatgcaaggaaacatggaaagagaaacgtctttatcagaaattttggggccaaaaaggccccgaagtatggtatgtgagggttatgctagctgtctaattacatagcatgcaatcgaacaaaataaagagaaaaataacagaaaactccacacatgcaaagaattcattttccagatcccatcaaattaaaaaatacacaaaacatttcctcaactccatacagagctcctcaacctatgacttgcaggggtcctcaagggtagttagcgtggggatgggtggtgagaatagtgatagtgaggcagaaaagggttccatttttatttatttatttttacaatttgggcttccaaataggttttaagaaaaaaaggttttgttgcattaaagaaacatgaaaacggtaacataaaccattataacccccacccaataagttttctattaaaaacttcacccaggtggacaggaatacgaatcgtttaagatgaaaacagatttaaagaccaaagaaaagttagcaattaaaggacaaaatagttacctatgctttccttctggcaccccgaatgtacgcaggtctctcgagatcacacgtcagacgtggaaggtcctcacggatcactagtccgagcttccattttacagatgtgcacactcaggccaaagacgacggctgacgggccaacgtctcacagccggtcagggaaaggaattcacctggcacccggggcggccggcctagagccctgggcgctgaccgtttctgcgattcctggttccgctcggcccggccccaggggcagacgcgagcaccggggcagagagacccactgcctggagtcgcgctgcctctccgcgggctccacgccgggcccgcagcgcagggatgggtccttggcggccgcccccacccagcccagcccagcccagcccagcccagcccacctgtagccgacgcgctgccggcagccacaccccctgcccgggccgggggctcggccgcccttattggcggccagcggcggcggctgcgcgcggcgtgggggactccgatcctagaggccgcaggagttacctcaggtgggctctgagctggcggcgctaccgccctggcccgcctcgagcatgcccgagacgtggacgcagcaaggccgcacctcccccagcgcgtcgcctgtttacaccctacgcccctccgcgggaggacaccgagtggcaggtcacgtgacgcgggcgtcacgtgtccggccgagttgggtggaggcgttgccccggcgactgcagcgcgctgggggcgggctgcagcgggtgccgccgcgcggcctttctgtgcttccaccccttcgcagtgcccaggcgacaacccactgggcttggaaccgaaaagacttccccagctctgtgtgtgtcgtttagtgtctcctggccctgactacatgttattaatattagtgttttggaaggaaaaggaaattttgtctggcaaaaggatgttttacttggagaagaagatggaaaatactttcttacctgaggctatcaaacgggaggaaaagcgaaggaataagtaataacggtttttgccttgacagatttttgtttgctttcgctccctaatctggactgaaagattcccacagcatagcctctcagccagagaaagcacgtgaaggaggtttatacgacttcttacttttaagttgtattttaatttttatgggggaatcatctctgtgtacatacagacgtctaaatatttgattctgcattcatctcttttttttttttttgagacggagtctcactctgtagcccaggctggagtgcagtggtacgatctcggctcactgcaagctccacctcctgggttcacgccattctcctgcctcagcctccccagtagctgggactacaggcgcccgccaccacgcccggctatttttttgtgtttttagtagagacgaggtttcaccgtgttagccaggatggtctcaatctcctgacctcgtgatccgcctgcctctgcctgccaaagtgctgggaatacaggcatgagccactgcaccgggccagactctgcattcatcttttgtccacataaaactctcattattcctctgtcactttcatcactgtctaccaaatccaattttcctacatcaaacttcccagaaatagtttcaaccactgccagttttatttctcccataatcatgcataaaagatgaataatttgtatttcttagtaaattcatgagtgaattataagcaaatcctctcaaatattccatagttgttctgttgtcccggagtgatctatcatatagctaatcaattcctccctacaattctgaccactttgaatttttggctaagtaaaaagcagattgtcaggttcaaaacagtgtgctcaagatatcctctggatcagcaaggtcaaaacatctccatttctataacacacttacaatacagtattacaaagagcagaaaaatgatgaattttctccatttgtcttttactgtggaaaataggttatcaaggccagttgccacaacctggttggctctactgcttctggcagcaggtgttccatgaaggtagtaccaatatcttccattggtatagcttatgcctagaccaggcttgttgagccaaagggttggctgactgatgaatggatatggaatcctgtcatccttctacaggaagcggcagaaccttcgtagttcaacagggatctgtgagctatgcagggctgataagcagcactcatggagacaaagctagggtgagtcctggcgcaaccattactgtctaggcaatttccttaacctttccgagcctctcttcagctttctgaaagatatctactgaatagagtggttatgagacaaaatgaggtaatgcctgtataacacttttaagtgcccaatacatacagtgttgggtaaatgttaaccaatatggtctttggcgacggggtattagtataggaggtcagagtcctgagggaaagggagctgacaacttgaacgtgtccaggtcctgggtccagattcttgccacctggagtgtagttcaagaagggattgccagccaggcgtggtggctcacgtctgtaatactagcactttgggaggccgaggcaggcagatcacctgagctcaggagttcaagaccggcctggccaacgtggcctagccaacatga

SEQ ID NO: 913834 - DNA, 4001 bp, Homo sapiens
gaaagagaaggcgccccccaaatcttcaaacagaacacagccaatgggttgggcccttcggcatgaatgagagccgggacagcacagggatgctgggaatcttaaggtgggaatactgctccaggcccaggagcagttaatacagcaaactaaattatttctgtaacagcgggacttctcagtctttgataagctaatgagcatctccaagaaagggagacagcaccgttgacaaacccatttggccttgaaaccctcttttaggagaggcggctcctgagccaggggtcctgactcacccacccttttaatgcaaacagcgctggactgcaagtctgggttccaatcttactctggctgttcccaagagcaggctctgggtccccatctgtaagaaggggtggggttcaccttaacattccaccatggtcgtggaactcctaatgcaaacagatatgggggagggtggagatgaggggggcggcagaagcctgtgaggaaggctgggaagagacttgtgtcacggagaggccaggacagttagtgtgtgtttggcactggcctgcaaaaaccttaaggacaaaggcggagtaggtagaggcaagaggagactccacaagtgtaagggtacaacccaccggcttctcctatcggtccccacctcggcggatgggccccaccccaagacaaccgagcacagagagaccggctgggaggagcttcgcaggatgccagcacaatccccagctaaaaccaaactcgtcgctcatcctgggaccagccaaggcctgtcctcagctccgcccgcggcccagcgcctgcgttttacagcaccggaggctggatgaggggccagggaagggagtgctcttccgaccacggggcgggagggaagggggcagccagaagcctggttccaatttgggagcctcccccggatctgcgcggcccctgtccacgtcttagtctcagcagggaagggaagaggaaccgcgaggtttcgcctcggggcggctcgtctgcgagtgtgtgtcagcccctcggatcgcagcctgcgcttgtcccgggagacggcgcgtccggcgcggcggtcgggattctgggctgggattctgggcggcggcggcgctgccgtcgggcgggagctgagcgtcagggttcccgggcgcgggcgacagtggaaacgctggagggcagggagagggtgccagggcgcacccgcgcggggcggcggcgggggaagggattaaggaggctggtctccggggattcccccgccccgatcggggccgcggcgggcgcgggcggcctcacgccacctcctgcttgccctggcagcgacgcccgcagccatagagcgccgaaagcaggtagaggccgtggcagacgccgccgcagacggcggccgccaggaaggcgtggtaggcgcaggggagcgggtaatccttgaggttgcagtagctgtggcgctgcatctggtcgctcatgatgccggtggcggcgccgtagagcgcggccgccagcacatcgtgcgccacgttgaccatgagccagcgcgagcccagcacggggaccagctcgtgcttgcccagcagcgtgaggaagtagaggcccagggtgagcagccagaagagcacggacacgaagagcgcgaagtgcacggggccctggtacttgctggtggcgatagtgatccagaaggcagcgccggccagcagctgcagcagccgcaacacgcccagcgggctgcgcaggaagggccgctgcaggcgcaccgcgccgcgggccgcacgcgcctggggcggcggctggcgcgggggcggcgggagcatggcccctgggcgcggtggcggcggcggcggcgccccgagcagcggaatggcggcgccttgctcgcgggggcagcacggcccaggtgcccgctgcgcccgccgcggcctcctcgccttgctcccctcttagtcctctcttcctctcctcctttccccacccttcctctcctctctcctcccctcggccctcctcgccttctgtctccagctctccacccttcccacccgcccctttcccttccccttcccctcggctgtctcctcccccgcgcgctcctcccggcttcctgccatctctctttccatctcgctcaccaccctggcgcccccctttcccctctgcgccaggcccccagctcggattccttcgtcctcgggccagggcagggcgcatctcccagcccgacgcgggccttccgccctgtccgcccgtgcgctgctgcgccaagtttgccacatctggggccgcccctgcccgccctgcctcctccttttccctctttcctgccatagcgcccaccccgggcctctgggctcttcctgggcgcgggaggagagcagtgctggttttgaactggcatccactgtcacctggacatccgcagtctcctgccagggcccgcctcgtcctgtccaaagctgtccgagttacccatgtcggagtaagagtccatcacccaccagaggcaccgccactcgttccactcggcacaagcttattgtccacaccctcttttatccaacccttccttgccatccttctgtcttgcccacattcaaaatacgctacctaacatggctgggacacaaacccagggccaagaggaagcaaagcccacggacttaactactaggccgaactgcctgtgatggaggctaacgatgctttacattattattattccgtgccaccgctttacctgagttctcatttaaccctcaaaacaaccacagagatacacgcaactcccctcattttgctgaggaggaatgaagcctacctgggttcagaccaggaagctggtaactaccaccagtctctcttctctccttcatgctcaacctttgtgcccatggcatctttcttttttctttttccttttttttgtgggggggggggtggggggcggtggggtagagtactgttctgtcgtccaggttggagggcagtggagcaatctctgctcactgcaacctccgcctcccggcctcaagtgattctcctgcctcggtctcccaagtagctgggactacagtcgcgagtgccaccacacccagctaatttttgtattttttttagtagagacagggctttgccatgttggccaggctggtctcgagctcctgacctcaagtgatctgtcccccttggctcccaaagtgctgggattacaggcgtgaaccaccaagccaggtcatgacatctttctaaaagacagacctgatgtttgttacactgcttcccctactgagacaggacagaagctgtctcttctgtgtggcctatttcacaatttgtccccaaccaatttccaacttcctggcttgccacttccttccctgtcccatgctgtcacccagcatacaacccactaatcctttccaaatttcccaagtaagctcagaatgccctcattcccacaccccacttgacagcaaaactcctatttatccttcaaggctcagtttaaatgctgcttccttttggtccagcctctgaggctgctcttctaggcccccagttggaccatccctctgcagcagtgttgagtcggctacatcataactattggatatcatgtcttatccatctttgcctgtgcctggctcataggagaccctgagtaaaatacgtggagcagatgactgagtggctgcaggggcagcaatggaactgagggtgcccctcttaccctggggacagtgcatgcctcagacctacagctgaccccacgctgcagagctagtcttcatctcccggtcataagatgagtcctctggcctttggcctggctgagcaggtcctcttccagcaggctggctccccttgggagagaaaagctatgtggcttctcagcgggtaatgctctcactgccaactcagcccacttggagaaggctctgaatgtattaaaaaaaaatagagacggaatcttgccatcttgccca

SEQ ID NO: 913835 - DNA, 4001 bp, Homo sapiens
agcagggcagggcgcggtggctcacacctgtaatcccagcactctgggaggccgatgtgggcgggtcacctgaggtcaggagctccagaccagcctggccaacataaccaaaacaacctggctaaattcaatctcggctaaaaaaaaaactacacaaatcagccaggcatggtggcgcgcgcctgtaatcccagctactcgggaggctgagacaggagaatcgcttgaacccaggaggcagaggctgcagggagccgagactgcaccacagcactccagcctgggcgacagagaaagactgtcttaaaaaaaaattattaaagacttctcagaaaatagtaatctttcttctggttaagaataaaacttaaaaagttatcagtgcctacagattaatcactcttctgtggtagaaaaatttcgacgattctgcacgtcaaagcaaacaaggtaaacaaaaccactaattactaaaaaccttttggatttagaaacctaactcgccgggcgcggtggctcacgccagtaatcccagcactttgggaggccgaggcgggcggaatacgaggtcagggaatcgagaccatcctggctaacacggtgaaaccccgtctctactaaagaaaccccgtctctactaaaaatacaaaaaatcagccgggcgtggtgacgggcgcttgtagtcccagctcgtcgggaggccgaggcaggggaatggcgtgaacccggggggcggagcttgcagtgagtcgagattgcgccactgcactccagcctgggaaacagagcaagactccgcctcaaaaaaaaataaaaaagaaacctaactcaagccagggtgagactacgaatcacggctttggctttaagtgcctgttgtactaagaccgatgtaatcacctcggtcaagtccctttgcctttggcctcagtttcctcatttgctaacgctgggcagggagaagagagtcaaactttgctgttctcactgggcatctgagatatggagggaagggcggaacagaggcgagacacccgacccgaccgctgatgtcgccccaaaaagaagtcagctcgcagggctctggaggcttcagcaagccaggccacccagactcctcgctccagcaaccccggggcctgcccaagccggtggggcaggaaggagggccgaagggcctaaccccttccttgctactcgttgacttcctacctttactgcatacaatttgccgcctttctgccccagatacactttcccgaaggcgccccggctaatgggcttcactatgctgaattcctcaatggagggcggttttggcactgcgatcctattcacgccctcctcagtcgccgcgcctcctccaggctccttcttgcttcccgcggtgggatccatcgctggacagcatacagcggccccgcagacactgcccctccgcgagcagccactcccgccaactgggttcaaagtgaggctccgcccacgccgcgcgcggccgtgacgtcaccccgccgccgcgccccgccctcgtcacctcccctacgcagacgcggacggagggggcgtcgggaaagccccgacttcgcagccttacactcttcgtgggcggcgaccgcggccccactgacatcattcctcatgagggaggaggcacaaacagttctgggccgaccagaaaaaggacgactgggacttgactctgaatcgcaggatttgaagagatttctcctggcttcccaacgaggctggtgggaagcggtcctcctcccatacacgacctcccaccctcgcgaggcgtagaaaccagttctgactgtacagtaaagcgagggccagggctgaggtctggaagctaatgaaagcacagaaagtgtcgaaactggatgagcaggaagcgagtggcctcccctgtcatctgacgttttcccaggatgtaatttgcctgactgaaacagatcaggaccaacagggagagttttcgatttagtgtgaggaaaagagcactaaattgtagcaaaagaccttattgctcaaggcccagtcagaagatttcataaggaagctgtagaaagtcttaagaggaaatcagccgggcgtggtggcgggcacctgtaatcccagctactcgggaggctgaggcaggagaatcgcttgaacccggggagcagaggttgcagtgagccgagatcgcgccactgtacgccagcctgggcgaaagaacgaaactccgtctccaaaaaaaaaaaaaacgaagaaaaagtccaaagagggtaaaggctgttctccccttaaaaaacagctaaagacctttgggggcgctgctccttgtaaatgtcaactacttccgcgggaaagaacgcgcaggcacttggccttgtgggcgctcacttgccccggaagtactgttgagttagcgcctcgccttccggggcggattgtctgtcgttgcagtagctgtaggaaggggaggccattttccgtttctgggaggagtgaggggcaacgggtcggagaaaaaggaaaaaagaagggctcagcgcctccccgccgggccgtggacagaggggcacagtttcggcaggcgggtgaggtcgctgagggcccgccggagatgttttccttgtcgagcacggtgcaaccccaggtaagccaggcattcagcccattttttttcctcccgccctgcccgtggctgtttgcaaattgcgctcgtggaagcgatttctcagaagggactctagaaatgaagtgatgtactcaatgcgaatcccaggattgaggagtggatcaggggacgacgctgagagtgggccggagacttcagtgctgacgatgaagctgttgagggcagaggcgggatgtgagctcagtgatagagagagaccctggcttatcgaactgattgcgtggaatttctgctagagaatccgtccggcattgttcagtgtccggcgttctggggtgggaaaatgtctgtaccatacattaaagggagcaggtaatgttcccttttttccgactttccagtggctttagtgttcacagcccctatcccctgctctttatttccttttaaatggaatttaaatttaacccaaacatggtataatatttcggatggccagccatgcaagtttttttctcattttgaccagaagtaactaaaatgtgtatttccgagtcgtaaactgtttgcagttaaaattttgattcagcctcatcctcatcgttttgtaaaacaaaaggtagtgaagagaaaaatgatttcaagggttttcattacgctcttgggcaatcacttgtgacaatgttttattcttgcttcattccagtctctttttttgatggtaacattttaatagattttttgagagttcctacagttttgcaaagaaatagtttttaaaacattgagtttttttaaaacataatttttaagaaaatcgacactcttaggttcttgatttaagcatatgattgtgttcctttgtgtaacttttactccccctcattttaagaatttttaattttttgtgctagtactggctaacaaactgaagcagctgcttgttattgggcatcagttatgtaccaggtgagcaaagcaaatgtggaatcttctcttaatattgatatgaagtaaatatgagtaggacttagcaaggtgaagagtgaacaggtatcacaggcatacagaaaaatacctggaggtcctgagttaggaaagggtttagcaggttgaaggaacaaaaataaggctagtgtggctagaacatagtagttaaagggggtagtgacagaagaggttggagaaaagacttgaggcagatcatacagggagtaaaggatatattatggctgatttcattttaagtgtattgggaaccattgaaagttttaaaacatgattagattttcatttttaagagatgactggcttttgctatatggagaataggagagggcaagagtggaagatgttatcagctaaaaatacc

SEQ ID NO: 913836 - DNA, 4001 bp, Homo sapiens
atacatgaggctcatagccatggagctgatcagaatgtgtcagaaatcagcaatgtatctgagattgaaaatacagtaaacctagatactttatacagttatgcacaatgaaagaggctatttacattgaactgagctaagtcacataaaaaactcaattcaattcaaggtttttcaacagctgcactattaacattttgggccagataattcttgagaggctgtcctgtgcactgtaggatgcttagcagtgtgcctgacctctactcaatacatggcagtagcaccttacccccacctcctatagttgtgataactgcaaatgtctccagacagtacaaaatgctcttgggggttgtggggcaaaactgccaccagtcaaaaaccactggctaaagtatatggaaggagtagtgcactgaggtgtccaaagccaagttacaaggtaggaaagataaatatctttgaggaagaacaagagcaaggaagatggaaaaaggcagacttggcaataagttagcaaacactcgaatgaattttgaagagggacttaactatagaagtctgtacatctatcccccaggggtctccaagagcagtggttctcaccccagagcatcagcatctcctgggaacttgtcaaaaatgcaaattctcgagcctctcccaagacctactgaatcagaaactctggagggtggggcccagccctctgttgtcttgacaagccctctgggggattctgaagctccctgaagtttgagaaccactgtcctacacttgaggctctgaatgtcctggtcctagttctcaccgtcatcaaggaagcttctctcacttccgcacatcacagtctacctacttttcagggaccaaaatcaatgcctaaattttcttcctgtttagaaggtcttctattctgctcttagagaacgttactgagtccccagcacctagaggtctaccccagcagtgaccagggtgcaggctttcatgcctaagttgcacatgcttcacatgcaaaatttagtcacccatggtcttgtttcaggaacattccctgttgacttaaattggccatggataatagattaaagctttcctaaaaaaaaaatacatataaaaagttaagacctgatcatatattttgcatgtgtcatactcttagccagccagctgctactccctgtcttggacccactgtgctggcgtgctggtggtgggccacagcacggcttcatcaggagggactgttttatgaaactactccatgctgtttctctagagatcccttctggtaactcacacacattgctctgaagagctctggtaaaagtgactcctacaggtacgaagttacagtcagataggaggaatgagctctggcattccattgcgcagtagggtgactgaagggctagaagagggaattttgaatgttttcaccacaaagaagtagtcaatgtctgtggcaatgggtatgcccattatcctaatttgatcattaaatgttatactcatggatcaaaacaacacacggtaccccataaatatgcacaattattatgtgtcaaattaaaaccatttgtaagtgactccctcagtataggcttggaatgatcgttttccagtcagtccaagacagcctacttacccgggtgtccctctcccacagactccgatgtgaacatgaagactccttcacttagagagtggtcacacaagccatccaccggtccattcatcttctcacacttctccactcacgcttctttcagtgaacaattttgaggctgtgactttgcctgagtttttttttcttcttcttcttcttctttcaacccaacaggcttgtctttggcagagccacggggatcacttctgcctaactgcctgtgagcacgtgagaacaggcgaggactgctgagaagggagggagtggatggaacacgggatgtgtccctccctccagcttgccacagcttgctcctgagcgactcctatatatggaaaagcgaaagtgcctgaaaaatcatgtgagaaaattggaggagtccatttcctaagaggggggtcttcttacctggaggaatttcaattcttatccctgactttccaaactctaagcacctggtcaaggtaaggtaaagaaggctgtatagttctgcagaattgaagctcctttgggactctccttcagctcttagccaatcttggtagtgctccagagttcacaacccaccttggagagcaggggtctgtgatcacccagagatacaagcaggcaacaagaaactctttctcagagatatggtttaggctaagattgcaacagtgcctttgctgttgggtgtcccctcctcccctgcgtctcatctggattggtctcttcccattctatcttctcagggagagcaggagcacgcacctgtattctgagccagctgtgatgttacacaacagattcattttagaggaaaagctttgagtccacgtgtttctgctaacagaaaccacctaacctgtcaacttctctaaaaggctggcaggcattttaacaagcaagatctttaaaaagtatctatctggggaggttacagagaacaatgtgtgtgtgtgtgtgtgtgtgtgtgtgttttttttagaaaaaaatgcttttgagaaatggattcattacagggaaattatcaaagtccagtttcccaaagcttccggattataaacatctacatattcagttctatacatgtaataaacatcgtgttcacataactcttgcattattttttgctttgaccaaaaaaagtagtaaacaggattatatctttagttcatgtactaaatgacagcgtctcacactctcagatccagctgcatcctcagacccaaggaacaatggggaattgagaccacagaaaatgaggatgggtggagaaaccagttcccactagaatgcaataaaaagtaatcaaccataaccttgtgcatcaaagcttggactgtgggaagcaaaagttaggaagcaatagcctcacctaacaattctggtgaccaaacccccctctgagtttattatcaagcatttggaaaaattttttctggcacacattctggtgctccaaagcttgagttttgctaactgatgaccaaacatcatcccttcagggaattaaagcagtattaaggtgacctcttctggaataaagtaagggatgttacatatgcatagccaatcaacggcatttaacaaggagtgaactgaagtgcttaggcacaagactgttgaaagttcagagaggaaaaggccactgggaagggatggacaaacgaggaatcaaatagggactttagacaacatcgccttgtcattgccagcacacaggactcctctgtttgcacttaagctatttcaacattgctggcccttagtaaatttcttctgggtacattagttttaaacctagaggcaatatgagctaatgtttaatttgaactgtagaactaggtgaccttagcagttaaaattgtatgataacaattatggtccaaatttgatttaagaacaagatgatgtgtaagtagcaggtactcttcaaggttcctagagttatcaggaagacagaaaacaaagcagtagctgccttctgaattccataagtaacagcaccatggggtggaaggcgtcagggtggggagacgatctgttacacagatatgtgtgcagggggctttggcagcctggatgccaattgagggtgtgagggagggatctgagaggcacctcgttaaaaactcatctcaagtatgagtttcatttaagaccccaactaaatactaggatgccttatattcttctagcaagtaaatgttaagaagcagtacacggagcatggtggatggaagtgcaggcttctggactagggtccaacttttgcctgtaacctcccatgcagcatggagaaggcttcctaacctttctaatctgttgtttcttctgctgt

SEQ ID NO: 913837 - DNA, 4001 bp, Homo sapiens
aaaagattgcagagtttttgtctttggagaggttttgcttttgatgtcttttgttttgtttttgttttttccaggtttgttctgttagtcaggaaaccaagatttttgtgagttgcccattatccaagtggggagggcatgagcaaatcacttgttgtagtagatggcaaaaatggcctcaatagggtacagctcctcgcattaagacatgagtctattaccccactccttgaatctgggctggccttgtgacttgttttgaccaatacagtctgacagaaatgataatgtgctctgagtcttcaagaagcctaaagcctatcttatttctactcttgggaatcctgtaatcactgctatgtgaacaagccctgttggatgatgagagatgtggttcaattaccctcatcactccagctaacattcagacaacagccagacacatgagtgagactattggccatcagttgaccacagacatgtgggtaagcccagcttaaaccagcagagaaatcacatggccgacccacagacttgtgatttaaattgacggctatgtttttaagctattaagctttggcttggtttcttatgaagtaaaatatgacataccatggttacatgcttttgtaaaaataggtataataagcccacacttagatggcctgttttctccctctaggaccagggcctcacattagactgtttcagctgatggagaatccaggctcagctcttacagggagtgcctgatgagggagttgtcttgaaaagtttgtaagtctgtactcaggcacttataggaattccctaaggctctaagaatgaagagagggctgagggcactgggtcagaaagcaaatttgggtatcttcctttgaaggaacaggagaaggggcacctcttaccagatactcaaggtctcagaaccctgggtgaagtcagctcagaccttgctggggtccttacccggactttttccagggtctcctttttggccctttggtcctggtgacccagaaggccctggatttcctggaggccccaactttccaggggggccctgtaagcctctgagcccttggcctgttggaagacaaaggaaatgtgacttaatatctatgttcttgctctctctcttcaagagtttgatgcccaatcccttctcaggagaaaggagaccttgacccaggactgacctttctgagcactgctctcaataactgtatggtgggcacctgagagcaataacttaagaaataaagttgccacgtggaggttgctgcagggagggtgcaaagtgaaaattaactgcatttgtttttaccagtagttgttgttctcctgtccagcccactgctgctggatctccctgtaaacagattcccccagtaaaacctatgtttgtttgctgactccatctcttctttggcctcttgaacctggtgccatccctactgaagtgaataggggtctgacatgacaatgacccagagaagaaaaattcatcctgtgtcccacgggatggcctgacctgtgggccactttcctgggctggcaagacaactattagtcacaaactgctgtgtggaattctgagatgccagagaatgagagctgaatctctgttttgagttacagtatagttgagaaaaatatactcaaataggacatcagtctcctcatatccccaggcagtttcctctggaaggtaaagaattgcagagacagaacagcccaacacgtacctggttcccccttttctcccttggtgccatcacgcccatctttgcctgggaagccgttgatgcctggagagctacaggcaatcactgcagggcaggtcttttgggcatcctcacaggtcacagtttctgagtaagacgctgccaccatactcaggagaaggagagggagtgatggaaacagggacatggtcctcaccttggtgtgagaaaactcagggaaggttaatctcagttaatgaacacatatttaccgagcatgccctctgtcctacaatctgggtgcaggctatatagaaatagatgacccatccctggcctctagctggggatttggaaaagtaaacattccttgtgacactgcgtgactagtactttaacaaaggtaggcactatgatgagcagtggggatcctaaggaggggttcatctgtgcctagacacctggcgttgctgctggaagactataaacatgctttcggtggcagtgagaacaaatgggaccgtgcattgccagctggcttatgcctgttagcttagggaatgagaatgagtggaaacccaggtgtctgtaggagcttcctctttctctccatgtcctcttcgggtccatctgccacctgaatcccatctttgtatctgggcagctgattcccctccaggacctgttaactatcatttactcattggcaggccctgagctgaaagctggtgatccaaagaggaaggtctcaacctcagatcaacctcaaccttagtcaccaacccagcccagaattaactggagtttgcttccccttggtgttttagacaggcttgcctgggtaagcattttctctggaaatttcttactacgttggccctggcagagtgctaaatacctctctactttctggcaggaattccccatgttctgtgagtcaaaaaccactggcaattagaaaacttgccttgaatcctcctcccatttctcagtattaacctttcatttgttcttcagagctttcttccagctattgccccctaagaaacctcagcagcctagccccataggtctaagcctccaagtttccctttgaaaacaaagacagtctccactgcagatgaacagataatggaggaaagtcacagatgctccagcacaagcagaaaaagagacatcctcaacctgatttctgctttccatcccactccccccacccctagaaagcctcctccatgcctccagggtcatgtcagctccccaaacccttgatccggaaacccagatttattcaccagaaatgacttactggtgtttctgcagagcagggactcagtgacaaggacgctggccctctagcctggggctctggcagatgcctcagagtgagggaggaggctgggctcagcaatgtagggcccaatcaaccttgtgaacaaggatatcctgggcctggccttcaactccagattaataaacagctcttctcagaactatgagaaatttaggagcctccaatacagtgctcggcagctgtctgctttaatacagcacaattcctctttcaattgccatccattttggcaaatctcattgctgaactaccacagctaggttcacctagttagtcctgttgacatccttgtttccaacagaaaaacaaagatactcacaaatgcatacacatgctcatgcacaccaactatacacacagacacgtgcatgcacgcacacacccatccatgaaaccacatagacctcttgctgccattaatgcattaaggccattcctgcctcagactcttcatttgatgtctccatgcctggaccccttacgggcatcgccagctagctctttctcttctattcaaatattccaatttcagagaaatcagtaccttgatcacttattctaaaatagtcctacctagcagtctctatcctcttagcctgaattattttctctcatgttacttacactttatgatattatagtcattgactttacttttccagtttttcattgtggtaaaatagacataaaatttaccattttgaccattattattaagcacacaactcagtagcattaagtacattcacacggttgtgctatcatcaccacatcatgggatgattttcatcatcccaaactgaaactctcaactcattaaactagaattctccatttacccctacccacagccactggtaacttctgttttactttctgtctctctgaattcatctatcctaggtacctcatatatgtga

SEQ ID NO: 913838 - DNA, 4001 bp, Homo sapiens
attcaatactagtcagcaaagcacagagaaacagcgtagctaattaagacaaagttgtatcactttgtgcacttctcttttcatttaaggttattttttaaactgcaagtaagaaagtatacatttttctaggctcttatttaacttacatgtgctctttggcaagttcaatgtcaaggaactaattacagtgattatggtactttcttttctttttttagacaggatctcgctctgtcgctggggctggagtgcagtggtgctattggctcactacaacctccgcctcccaggctccagtgattctcctgccccagcctcccaagtagctgggattacaaacgtgcactaccacacccggctaatttttgtgttttttgtagagacagggtttcgccatgttgcccaggctggtcttgaactcctgatgtcaagtgatccatcagccttggactcccaaaggtgcttttttttttttttgagacggagtctctgtcacccaggctggagtgcaatggggcgatcttggctcactgcaagctccgcctcccgggttcacgccattctcctgcctcagcctcccgagtagctgggactacaggcgcccgccaccacgcccggctaattttttgtatttttagtagagatggggtttcaccgtattagccaggatggtctcgatctcctgacctggtgatccgtccgccttggcctcccaaagcgctgggattacaggcgtgagccaccgcgcctggccgctttttaaaaattcattcaaccaacatttccacggatccctcatgtgccacacactgtgctatctactggggaacctattggacagtaagcttcctgagcgttaggagcaaactgtctcgttcaagtctgtaaccggccttgccttcccccaaaatgaaactgtgcaccctccctcgccctcaaatccacggccactgacaagtactgtggtcccatctccaaaacactgctcaaatctgccacttctctccaacttcactgccagaaccctaggccaagccaccgtcaacctttaacccaatgactgtgttagctttctatgttggtctctttgtccccgtgcaatctgttctgcatacgacagccacggtaatcttccctttccttagtaacctttaggaacataaatcagatcatgggggtcccttcattgaaattctttaatgattttccattgcccttagaaaaaatctacaaagcctgcgaggcaatgattcatattctctctctctttccaagctttctactccctcacattttccacaatccaccacgtccaattctacccaccccgacacccataacgatgctccagccgggccagcccgcttccaccttctggaacacactaagctgctttgaggtctcaggctctgtcgaagaaagctccccccaggtccttctcgcccttcggtctccacttactcatctttctgagactttctggaccaccctgagtcgtccactgtcgtgcatttgtttactacctgctcgtgcctttaaactgtaagcgctgtgaaggcagcggaaatgtgatccgagccatgcacaccgtccgcattcaataatcattggcaaatcatgaatacgagaaaccaatgaatgaatgaatgaatgaatgaataaaagaaagcccaggcggcaggcacttggcaagcacttaaaaggctgcgtttaaaaggaagaacccgattccttagtagacggccagcaactcccagcccccggcccggccatgccagctccgagcggtcccaagctgccgccaaatccagatcgcgcccacccgagctcccgggaccccgcgcctctagcctcggaccccttgcaacccgcgcagagacgtgcgaggcggccccggccccgccgcccgagggtcacacgcacgcccggggcccgcgctcctcacccgatgccgggacgccttcttcgttcacagctgaacccgccaaaattccaaccggatcccgcccctgccttgacgtcagacgcacgcggctgtggggcagcactgactggctacgccagcgaatcccggccctggcacagagcaatcggattggtttacgtcattggacgccctctttgttgggggcaagggaccttcctgtcggtagaagccagtctcctttaggtaaaatagagtgtctggcgccccctggtgccgggaagtttaagtcatcccacccagtattttccctgcggtcccatcccacctcaactcctgacgctctgggaccgactgttcctttgtcagccttatgtccattcgaaatgtttgggctcaggaccaaacagatccggtccacttttaccctgtctgaccttggggaagtgacttatctctctgagtttccccttcaccatctgtgcagtgagggaaagggtagatgacatcttttacactgaaaccaccatttcccgagtaattcctgttccatagattttgggacttctaaggggcgtcagggctgaagagaacttatcagcagaccatatctttcacagatttttttttcagtaaaattcaggcctctttatgtatttacattctaaaaaatagtgtttgtacataatactaagaacatagtttctaaatgcagaataacatttagcttttacataatttcaagggattgatagcagaagagactttgatggaccaaatggccactttaagtctttccccccttttcctccttgcagacactgttcaggcactgcagttcccccactaataatccctttggtataagatcctatctctatccactacgtactttcattttcagaacaattaaaatcgactttaggaagactgaagataaacagtcctgatgccatctacgttgacttttttctgtgtcctaatggaatattactgctccatttatgagctcagccctattacttaaacctatattggctcaggaataggaatacaaccatttctgagagctgctagtgttaaaaattcatagtaatggaggaactctagtaatcaaattgaaaaagtatgtttaaatgcgtacttttaaacatacggcactaaggccgggcacggtggctcacccctgtaatcccagcactttgggaggccgaggtgggtggatcacgaggttaggagttcgagaccagcctggccaacatggtgaaaccccatctctactaaaaacacacacaacacaaaaattagctgggcgtagtggtgcgcgtctgtaatcccagctacttgggaggctgaggcggagaatcgcttgaacctgggaggtggcgattgcagtgatgagccgagatctcgccactgcactccagcctggcgacagagccagactctgtctaaataaataaataaataaataaataaataaataaataaatgcatcactacatctagttattaaaaaaaaaagattcgtcatagatttattcttagccattatgcagaaattccttgactaattctgatcagtactctgaagttcttttcttcaccttcactttccaggtcctctttgcatccagttccgggcaaggagtcagaaacagaaccaacctaagcccgcaaaccttccttaagtgaagaatcaagcactttttattggaattagtatagtggtgactttgagaaaagaagtggaggtgattttgagaaacaattaggcaaatagattttttaaaatccattgaatgtggcttttccgtgccgatagcgctcacacaaacattacgaagtttcctaaaacccgccagactttctataagaagtgtggcaagcaccaaccccacaaagtgacactgtacacgaaggagaaggattctctgtatgcccagggaaagcggcgttatgacaggaagcagagtggctatcgtgggcaaattaagccgattttccaggaaagggctaaaactacagaaaattgtgccaaggcttgagtgcgttgagcccagctgcagctcta

SEQ ID NO: 913839 - DNA, 4001 bp, Homo sapiens
caatccacataatttataaaatactctgaagctattattttatatctaagttacatccttcctgtactatgatgagatgtgtcccttaggatcatacatttagaagacaaaatttgacacaaatacattcaaatctctatcaaatatgaaatcatctcatttatccagcaaaatcagagtatggggtatttctaataaataaactttctaatattagtaactgaaatttaaccctttaagcaccaaacctttttactttggagggatttttcctaaaaagtatctatgcatctgcaccctcttaaaccaatgctacaattgaatcttcacttgacattttggggccattgtgttgaccatcgattatcatttctagaattcttatgaacataaattactaggatttagtggagaaatatatgccccttcctcaaagcacccttgactgctatatagtgaatttttttttttttcaagtatgaaggtagttttaaatttcttcatcaggctgtcagtgttcactggctaagttcggacgtctatccaggcttttttctaatataatgccattagttacagcctgggaagccaggtaactaaactaattagaattacaggtaaattaataaggacttcctgagtaagcactagaggccctcctataagaaataccatacattgtttgccgtcgattttggctgctgaggatgatttagcttcccactgccttttctctctagtaccccaagatgtttttttcaatgagctaaggccgctctacaactctaagttaactccagacaagtcaggtgttgccatctacagtgatttctagctggatctgactccgccactcattacgtgtaaaaagacactggggaatggaacggttgtcaaaatgcccagttaacgacaacaaatataaacttttcttcgtatacccttcgcagtaaagtagcaacagcaatcgcaaccaaaatttactaagctcgcctgcaggattctcagccctgtgtacaaactcaagtagctcaatatttcttgctggctctggcacaggagcagatccagactagatgggttctaaagtcatcccaacaggaaaactaagctatgaacattaaatcttatctctgaaagagagaatgagggtagcacaggagttagaaccaacttctgtgcaagcgagcactccccgacgcaccggaagttttgaaatatcctgtgggcttcccacaggcaaagtggttttccctccccgcggctctgcgggccctccccagggttcgaggacctccgagtttgctgcgcccggggccggggccctggccctgccacaggctgggagcgaggccgtcaatcacagcccgcgaatcacagcccgcgccccacgacttcaccttggcggctcccaagctgcgactcgggcaggtgggaggtacctgcggcccggctcctgcccctgcctgctgcgaccgggggagaggctgtcccagctggggccggtgcaggccccggggccccgtctcgggccacgcgagccctcgagatggtaccgcgtgggggccgcgcggcggggccctgccccggggcccggcaaactcggctgcccgcccggcccgccccccggcgccgccactcaccgaagaatccctgcacgattcccagcgggtggctgagccaatcctccccacacggcatctcgccaggggccggggccggcgaagaccgggcggaggcgatccgcgggccgagcgcggccgggcggccggcgcccagctcctcttcagcggctcggccgctcctcgcccgcgttcgctcgcgccctcccacgcacagcgagccgcggggcgcgggcctcccgcgcctcagggagcggcggctgcggtggggccgccgaggagctgctggcgacagtcaggcgggcgcgtacgggcccctagccttcacttcgcacaatggcgggaaatagccgccgccgaccgcgctgcctgcgacctgggtggagctcgcgtggggaggggcggcgggagcgcgcggcgcagcgcggctctgcgcggcgaggaggaggggcggcggcggcgccgccatcttggagacgggcaaaaggaagggcacgcagcgccgctggaggctgcgcagcgcggggcccggcgacgcgctccaagggcggcgcgttgtcgtttgtacccctgggccggcgtgtagcgggaactcccatagtgggcttataagagggcaaagcgagtctgcacaacagctgaaaagcattaagctcagagacctcagagtcatctctgggcaaaattagtgggcgaaaccgccttgggaatccgcccacctcctcttcgtgccttttttttctttttttgctgatggcagcacttttatttgggtccccggcccgaaaccctgagtggtgacttttccctcagctgcacaaggtctccctgaggaaggtgcacatttagagaaggggaacctcggaggaccccacgctccttctgcagtcgcgtcaggccctgtggctcagggacggttccttaccgaggggcgggcgctctaaacgctccgggcccggcctgcgccctggttgcgaacaccgggtcggcgtctgtctggaagctggcagccgccgtcggggagcggtgcgaggctcctgcactgcgcgccgctaggataccctggagaaggaagctacgaagaccgactacagcagccttttgctgaggcaatttggaaaatacccaagttcaagagtgaaactgtgggagtcgctctgaacctcttctggttcaggaggctgtccgataaaaaagaaaaaaagaatgaaactgtgtctcccctgggcctgaaatgtacctaagaaaaccccaggcccatcagatatatctactcaatgaaaaaagggcatggtgacggaaggggaatgacctgaatggaatctacaaagtgaggagctgaaggaaaaaaacggaacccgtgtctcaaaccctccttggggctgtaggaaggggggaaaatctttctacctttctaggttctccactgcggcccttatcacaaagctcggattggcaaaagaaaaatttagtaacatgtacatcttatatgggcaaaactcaaggaagagtaactcaaacaggtggcttagaatgggggaattacgtagcatttacaataaagaacaataactggggagaaatggcgaaagcagtttgaagtttccaaaaacagcagagtgggaaggcagagatacgagaaactaatggtagttacaggtagtgagtaaagtgtgttatgtaggttcttctagcgccatcgctggctgataagggtctaaagttgtctctggtgactaacttttgtccctggtagaaagaggaggtgggacacctttgaaaatgtatgtcctgctcttaggtacatagtggaagggtagggagcttgttttgtacagatgctcctctacttactctacttaggatggagttacatcccaataaacccattgtaaattgaaaatatcattagttgaggcccagcgtggagcctcactcctgtaatcccaatactctgggaggccaaggcgggcggatcatgaggtcaagaaatggagaccatcctggccaacatggtgaatccccatctctactaaaaatacaaaaattagctgggcctggtggcgcacgcctgtagtcccagctactctggaggctgaggcaggagaatcacttgaacccgggaggcggaggttgcagtgagccaagatcatgccactgcactccggcctggtgacagagcgagactccgtctcaaaaaaataaaatgtcattagttgaaaatgtgtttaatacacggaacctatcaaacatcagtaggctactgcaaacatgctcagaacacttacattagcctacggttgggcaaaagcatctaacacaaagcccgttttataataaaatgttgaatatctcatgcaatttattgaatactgtact

SEQ ID NO: 913840 - DNA, 4001 bp, Homo sapiens
caagatgtttttttcaatgagctaaggccgctctacaactctaagttaactccagacaagtcaggtgttgccatctacagtgatttctagctggatctgactccgccactcattacgtgtaaaaagacactggggaatggaacggttgtcaaaatgcccagttaacgacaacaaatataaacttttcttcgtatacccttcgcagtaaagtagcaacagcaatcgcaaccaaaatttactaagctcgcctgcaggattctcagccctgtgtacaaactcaagtagctcaatatttcttgctggctctggcacaggagcagatccagactagatgggttctaaagtcatcccaacaggaaaactaagctatgaacattaaatcttatctctgaaagagagaatgagggtagcacaggagttagaaccaacttctgtgcaagcgagcactccccgacgcaccggaagttttgaaatatcctgtgggcttcccacaggcaaagtggttttccctccccgcggctctgcgggccctccccagggttcgaggacctccgagtttgctgcgcccggggccggggccctggccctgccacaggctgggagcgaggccgtcaatcacagcccgcgaatcacagcccgcgccccacgacttcaccttggcggctcccaagctgcgactcgggcaggtgggaggtacctgcggcccggctcctgcccctgcctgctgcgaccgggggagaggctgtcccagctggggccggtgcaggccccggggccccgtctcgggccacgcgagccctcgagatggtaccgcgtgggggccgcgcggcggggccctgccccggggcccggcaaactcggctgcccgcccggcccgccccccggcgccgccactcaccgaagaatccctgcacgattcccagcgggtggctgagccaatcctccccacacggcatctcgccaggggccggggccggcgaagaccgggcggaggcgatccgcgggccgagcgcggccgggcggccggcgcccagctcctcttcagcggctcggccgctcctcgcccgcgttcgctcgcgccctcccacgcacagcgagccgcggggcgcgggcctcccgcgcctcagggagcggcggctgcggtggggccgccgaggagctgctggcgacagtcaggcgggcgcgtacgggcccctagccttcacttcgcacaatggcgggaaatagccgccgccgaccgcgctgcctgcgacctgggtggagctcgcgtggggaggggcggcgggagcgcgcggcgcagcgcggctctgcgcggcgaggaggaggggcggcggcggcgccgccatcttggagacgggcaaaaggaagggcacgcagcgccgctggaggctgcgcagcgcggggcccggcgacgcgctccaagggcggcgcgttgtcgtttgtacccctgggccggcgtgtagcgggaactcccatagtgggcttataagagggcaaagcgagtctgcacaacagctgaaaagcattaagctcagagacctcagagtcatctctgggcaaaattagtgggcgaaaccgccttgggaatccgcccacctcctcttcgtgccttttttttctttttttgctgatggcagcacttttatttgggtccccggcccgaaaccctgagtggtgacttttccctcagctgcacaaggtctccctgaggaaggtgcacatttagagaaggggaacctcggaggaccccacgctccttctgcagtcgcgtcaggccctgtggctcagggacggttccttaccgaggggcgggcgctctaaacgctccgggcccggcctgcgccctggttgcgaacaccgggtcggcgtctgtctggaagctggcagccgccgtcggggagcggtgcgaggctcctgcactgcgcgccgctaggataccctggagaaggaagctacgaagaccgactacagcagccttttgctgaggcaatttggaaaatacccaagttcaagagtgaaactgtgggagtcgctctgaacctcttctggttcaggaggctgtccgataaaaaagaaaaaaagaatgaaactgtgtctcccctgggcctgaaatgtacctaagaaaaccccaggcccatcagatatatctactcaatgaaaaaagggcatggtgacggaaggggaatgacctgaatggaatctacaaagtgaggagctgaaggaaaaaaacggaacccgtgtctcaaaccctccttggggctgtaggaaggggggaaaatctttctacctttctaggttctccactgcggcccttatcacaaagctcggattggcaaaagaaaaatttagtaacatgtacatcttatatgggcaaaactcaaggaagagtaactcaaacaggtggcttagaatgggggaattacgtagcatttacaataaagaacaataactggggagaaatggcgaaagcagtttgaagtttccaaaaacagcagagtgggaaggcagagatacgagaaactaatggtagttacaggtagtgagtaaagtgtgttatgtaggttcttctagcgccatcgctggctgataagggtctaaagttgtctctggtgactaacttttgtccctggtagaaagaggaggtgggacacctttgaaaatgtatgtcctgctcttaggtacatagtggaagggtagggagcttgttttgtacagatgctcctctacttactctacttaggatggagttacatcccaataaacccattgtaaattgaaaatatcattagttgaggcccagcgtggagcctcactcctgtaatcccaatactctgggaggccaaggcgggcggatcatgaggtcaagaaatggagaccatcctggccaacatggtgaatccccatctctactaaaaatacaaaaattagctgggcctggtggcgcacgcctgtagtcccagctactctggaggctgaggcaggagaatcacttgaacccgggaggcggaggttgcagtgagccaagatcatgccactgcactccggcctggtgacagagcgagactccgtctcaaaaaaataaaatgtcattagttgaaaatgtgtttaatacacggaacctatcaaacatcagtaggctactgcaaacatgctcagaacacttacattagcctacggttgggcaaaagcatctaacacaaagcccgttttataataaaatgttgaatatctcatgcaatttattgaatactgtactgaaatttaaaaacagaatggctgtgtgggtaattgaagtatggtttctactgaatgggtgttgctttcacaccatcataaagtcaaaaaatcttgtcaaaccaccgttaagttggggactgtctggatctacttttcagttaccaagataataatattataattaaattaataatatgaaaataatccttatgccaaagtggcacattttggggtgacattctggtttacttcagggcaaaaacgaatagtttgtatttcttagtgtaaggtaattaattgacacactcaattgtacatctggttcctgtgagtttgggtacgttgagaaaacttgagtttcaaatccaggtcattaccaccattccattcattcatttaagagacagggttgccaagaccctggcatcaaaaggggaaatcccatattttcgcttcatggccagtaacaggcaaattaaatgtatgatatggaaatgtctgctcttaaatccctgtaaattcaaatttactttatctaaattgcagcttgataccaattcagcagtggctagtgtaagggaggaaaaatatcttttccgtctacccttctagattctacgttggaccccctgtaacaaaagatagattaacaagagaaaagcatgcactttatttcatacacgttttacaagaaatgggagccttcataaggaaatgaagatccaaagaagcgttaaaaccaagtgtttttatgctaggtttga

SEQ ID NO: 913841 - DNA, 4001 bp, Homo sapiens
tcctgccctttagaaataacacttcgttttaattgtgctttcagttacaaattcagcacttcatttttacccaccctagaatagcacagagaacaccttcgtgaagtatccccacaagggagacactcacagcctgacaaatttgcatagtggaaaatatacaaggcacaaattttttaaaatgctaaatgaatatcacacccaaacagtcttaaaaactgtgcaaagtcagaagatgtcttatcaaaatatggacttaaggacaacttgggaagcctttaagtagttcgacggaaaggggaatgcaatcaaaatttggggtggccttatgtttttaagagaacaaaacacataactagaggctatgaaacatgcaaattaaattgaactgtggaaaagctcttggctgtcacccaaaagcttcagcaaagcaatatgccagtatgccaaataaaaagaggtacaatcttctcacaagaatgaggatagggtccatacctatgactaataataacaatacaaccttgcttttgcagagcattaggtcttttcatagatctttcaggcactcgattttgatgctgtcattggccttaggagtatcctctccgaagagctccagttcagtttcctcttaagagttatgatcagaacaaggcaggcgatgtgtttattgagggttgaaggtactattgtagtttctcctatcaagctgtttgcagtgatcctccaataatcacactatacaactcagccccagcaaataaaacctacattctttccctcagagctggccagagaccaacacatataggtctagaaagtccaagggaaggaaacctcctgacttgttaggttaagaactccatgccaaattcatctcttgcaattgaaaaaagaaatctctctcacactctgtctctctctctctcacacacacacacacacacacacacactcacccaagagtgttcaaacagaaatcctctttttctgccagccaatgaaacccagcaacaactggttaatacaaccaccaaatctctgcctctgtcaacaacttaccatattcgcttctcctgtgcctgctgaccacccttcccgcttcaggcacgcgtgaacacgcttatacagtagccctcgaaaggacccccaaaagcacctttaaggacccaagaggatgaagcttgcctcctgaagcaatgcagcatccatctcgagggagccggttccccatgcacacacacagaggaagtcacagaggggaataaagtttgattttccttcctgcccgacccctcggggacgagagaggacgaggggcggccccgccggggtcctgggctgctctccggggcagctcccagcagcatggcactgccactctcctggcacacacaaggcggccgcggcaactcagaactccccaacccgcccggaggaggagggaaaggggacaacttccatctggctccgttcagggagccttggggcagggctgttaagaacgaagaagggagggaacgcgattgggggcgagtcggggagaggttcaagtcccgtgccttccccgccctggtgtccccagtcctgcgggaacatccccgccgtcgcccctcctcctcctctcggcttcctcccgcccgccctcccttcctggtcgccgccgcaggcgcctgaagggcacggcggctcctcggtgcccggcaacctccggagcggccgggagttgaggtaactcgcctgctgccccggcggcctgcccgccggcggctcccacacgccagcgccgccccgccctccccggagcctccgggcgcgctcgctcaccgtccggtggtgctgctgctgccggtggcggctgacgcccagcccagggaagcagccggcagtcagcgccccgcagccgccggcgcccccgccgccgccgccccgagaggagaggagcagcaggagcgatctacctgcggcggccgccatctctcaactggaaacggcgccgacccaggcagcgcagcggacggccagggcggagctaagacccgccactcaccgacgccgggccaactaaagcccttgactgagttgatgaggcggggcttcctgcaaggtccaatcgacaggcgggagaaccacactggaagctgccagtcccttccagagttacctatagtgggacatagtcaattacgggcaaattctagggaacccataattgacacccaaacccgtgaaaataacagcaatagagatggcatgttcagttcggctaatcttcaccaacaatagagctatgataagagtaacgggggatatagatatttgtgaaaagctttgttcgaagttgagttctaagtgagtgttctaagttggcaaaataggcaccaaattaataaccattaacggtgtatgctgtaactctcaactacacgcctagaattatcattcataactgataatatttagatatgctgaaattaactctacatcacggagtgatctaatgactgtgatgcgtagcataatataggagaggtagaacgattacaatatcaaagtcccagaatgagtacatgccttcagagtgaattaactgacgtgtatacatctcaaatacccaattcatttttacagcacctttatacggatattctcacactctccagaaacagcactattttatcatatttgactttgtgtgcatttacagaaacagaacacattaataacgtaataaaaaatcatgtaaggccgggcgcggtggctcacgcctgtaatcccagcactttgggaggcagaggcgggcggatcacgaggtcaggagatcgagaccatcctggctaacacggtgaaaccccatctgtactaaaaatacaaaaaattagccaggcgtggtggcgggcgcttatagtcccagctattccggaggctgaggcaggagaatggtgtgaacccgggagacggagcttgcagtgaaccgagatcgggccattgcactccagcctgggcgacacagcaagactccatctcaaaaaaaaaaaaaaaaattcatgtaaaaggctattttaatgatgcttcataattttgccgaaatagttatcagaatacgctttggaataacaaacactttctcttgaaaaacacttctttccacttaaactcacaatgagggctccttgaatactgcctaagaaagattttgggtcctgaatttccttagaagagtatttccttgctagctgtttattattatgagctgattaaattctcacacctctttttaaaatctggagcaggaaaatagtttgggaagcaaatacaagcattattttaaattttggaaaacatctttgtagtgtagccttagatgataaatttaaaacaaaaacaaaacacacacataaatacgaagaaaatgttatcacttattctaagaatattctttaaagtttgactgaaatggtaccttcttggccaagaatagctaaaaaatgacgtggaagttttttgtttgtttaatccttatgccccacctacaccaaaacagtgagatgattggcttctccggggtagatatcatgtcactcactcaaaaggctttattgcccaacaggtggaacttgagacctcaagaatgagcccccattcaacagctgcacacagtaatccccctagttggaaatccatgacattcctggaacaatttcccttacaattattttccacccatctatatttatcccaactgcatttgatgtatttacccatgctgtgccattttctctctcaccccttcatgccttcttacagagatcaccatggattttagttttgtttttattttctgtgctgtcaccagatctagctatgaatcaggattgctccatttccactttccactttaagaaattttactagaattgcctttactctatttttccaagcatgaaaattagatgtgcatcctgcagtgagatttactcatatgcattagcaaaaga

SEQ ID NO: 913842 - DNA, 4001 bp, Homo sapiens
ggacctttaccagaacatctattctttctggtaagttgtttgctcccatattcacctaatatatgtactcaaatcaacacctacttacaggagaattcccattcatggggttttgaaatagcaatactttcataatggacaatagtaaattttataagggaggagagagatgtaaaggagcatttgcactttacaatgaaaagaacacaataagaggtgagaatatctcagatgagtgggagtcctaaaacttacgtattagctaacgtaaccttggccaagtctctctctttttagggcctcaatatcttttaaatggaatttcttgtaaagaatcacagactatcctatggaaacagctgtatacatgatggcttcagaagaattgtagaaaaataaaatgtttatacactttaaataatcaggttcaatttttttcaaaatcttacaattctaaattcatgtacaagtcaccattcccataacattcctgccctttagaaataacacttcgttttaattgtgctttcagttacaaattcagcacttcatttttacccaccctagaatagcacagagaacaccttcgtgaagtatccccacaagggagacactcacagcctgacaaatttgcatagtggaaaatatacaaggcacaaattttttaaaatgctaaatgaatatcacacccaaacagtcttaaaaactgtgcaaagtcagaagatgtcttatcaaaatatggacttaaggacaacttgggaagcctttaagtagttcgacggaaaggggaatgcaatcaaaatttggggtggccttatgtttttaagagaacaaaacacataactagaggctatgaaacatgcaaattaaattgaactgtggaaaagctcttggctgtcacccaaaagcttcagcaaagcaatatgccagtatgccaaataaaaagaggtacaatcttctcacaagaatgaggatagggtccatacctatgactaataataacaatacaaccttgcttttgcagagcattaggtcttttcatagatctttcaggcactcgattttgatgctgtcattggccttaggagtatcctctccgaagagctccagttcagtttcctcttaagagttatgatcagaacaaggcaggcgatgtgtttattgagggttgaaggtactattgtagtttctcctatcaagctgtttgcagtgatcctccaataatcacactatacaactcagccccagcaaataaaacctacattctttccctcagagctggccagagaccaacacatataggtctagaaagtccaagggaaggaaacctcctgacttgttaggttaagaactccatgccaaattcatctcttgcaattgaaaaaagaaatctctctcacactctgtctctctctctctcacacacacacacacacacacacacactcacccaagagtgttcaaacagaaatcctctttttctgccagccaatgaaacccagcaacaactggttaatacaaccaccaaatctctgcctctgtcaacaacttaccatattcgcttctcctgtgcctgctgaccacccttcccgcttcaggcacgcgtgaacacgcttatacagtagccctcgaaaggacccccaaaagcacctttaaggacccaagaggatgaagcttgcctcctgaagcaatgcagcatccatctcgagggagccggttccccatgcacacacacagaggaagtcacagaggggaataaagtttgattttccttcctgcccgacccctcggggacgagagaggacgaggggcggccccgccggggtcctgggctgctctccggggcagctcccagcagcatggcactgccactctcctggcacacacaaggcggccgcggcaactcagaactccccaacccgcccggaggaggagggaaaggggacaacttccatctggctccgttcagggagccttggggcagggctgttaagaacgaagaagggagggaacgcgattgggggcgagtcggggagaggttcaagtcccgtgccttccccgccctggtgtccccagtcctgcgggaacatccccgccgtcgcccctcctcctcctctcggcttcctcccgcccgccctcccttcctggtcgccgccgcaggcgcctgaagggcacggcggctcctcggtgcccggcaacctccggagcggccgggagttgaggtaactcgcctgctgccccggcggcctgcccgccggcggctcccacacgccagcgccgccccgccctccccggagcctccgggcgcgctcgctcaccgtccggtggtgctgctgctgccggtggcggctgacgcccagcccagggaagcagccggcagtcagcgccccgcagccgccggcgcccccgccgccgccgccccgagaggagaggagcagcaggagcgatctacctgcggcggccgccatctctcaactggaaacggcgccgacccaggcagcgcagcggacggccagggcggagctaagacccgccactcaccgacgccgggccaactaaagcccttgactgagttgatgaggcggggcttcctgcaaggtccaatcgacaggcgggagaaccacactggaagctgccagtcccttccagagttacctatagtgggacatagtcaattacgggcaaattctagggaacccataattgacacccaaacccgtgaaaataacagcaatagagatggcatgttcagttcggctaatcttcaccaacaatagagctatgataagagtaacgggggatatagatatttgtgaaaagctttgttcgaagttgagttctaagtgagtgttctaagttggcaaaataggcaccaaattaataaccattaacggtgtatgctgtaactctcaactacacgcctagaattatcattcataactgataatatttagatatgctgaaattaactctacatcacggagtgatctaatgactgtgatgcgtagcataatataggagaggtagaacgattacaatatcaaagtcccagaatgagtacatgccttcagagtgaattaactgacgtgtatacatctcaaatacccaattcatttttacagcacctttatacggatattctcacactctccagaaacagcactattttatcatatttgactttgtgtgcatttacagaaacagaacacattaataacgtaataaaaaatcatgtaaggccgggcgcggtggctcacgcctgtaatcccagcactttgggaggcagaggcgggcggatcacgaggtcaggagatcgagaccatcctggctaacacggtgaaaccccatctgtactaaaaatacaaaaaattagccaggcgtggtggcgggcgcttatagtcccagctattccggaggctgaggcaggagaatggtgtgaacccgggagacggagcttgcagtgaaccgagatcgggccattgcactccagcctgggcgacacagcaagactccatctcaaaaaaaaaaaaaaaaattcatgtaaaaggctattttaatgatgcttcataattttgccgaaatagttatcagaatacgctttggaataacaaacactttctcttgaaaaacacttctttccacttaaactcacaatgagggctccttgaatactgcctaagaaagattttgggtcctgaatttccttagaagagtatttccttgctagctgtttattattatgagctgattaaattctcacacctctttttaaaatctggagcaggaaaatagtttgggaagcaaatacaagcattattttaaattttggaaaacatctttgtagtgtagccttagatgataaatttaaaacaaaaacaaaacacacacataaatacgaagaaaatgttatcacttattctaagaatattctttaaagtttgactgaaatggtaccttcttggccaagaatagctaaaaaatgacgtggaagttttttgttt

SEQ ID NO: 913843 - DNA, 4001 bp, Homo sapiens
aacaggaaacagcaatgcctgagtttctggtttgtgaaactgaattatatgaaatacttagggtttatatgcatacagatggtcccgtggaatggttcaactcatatctccactttaccatggtgcaaaagcaatacgcattcagtaattcgagtacccacgcaaccattctgttttccactttgaattcagtattcagtaagttacatgacatagtcaacactttattataaaataggctttgtgttagatgatgttgcccaactgcaggggagctaagtgttctgaggacgtttaaagttggctaggtgcattaaatgcattttcgacctaccatgggtgtattgggacataatcccatagttaaattgaggagcatgttattttatttatttatttattatttttttgagatggagtttcactcttgttgctcaggctggagcgccatggcgtgatcttgtctcaccacaacctccgcctcccaggttaaagcgattctcctgcctcagcctcccgagtagctggaattacaggcatgcgccaccatgcctggttaatttttttgtatttttagtagagacgaggttttcccatgttggtcaggctggtctcgaattcccgacctcaggtgatccgcctgcctcagcctcccaaagtgctgggattacaggggtgagccaccacgcccggcctcgggcacgttattttaaaaacacaccatctcggcgcggtggctcactcctataatcccagcactttgggagaccgaggcgggtggatcacgaggtcaggagatcgagaccatcctggccaacaaagtgaaaccccgtctctactaaaaatacaaaaaattagccgggcatcgtggcgggcacctgtggtcccagctactcgggaggctgaggcaggagaatggcgtgaacccgggaggcggagcttgcagtgagccgagatcccgccactgcactccagcctgggctacagagcgagactccgtctcaaaaaactaaaacaaaaataaaaacaaaaaacaccatctcaactccctgacaatctaaagttggaacagaagcttctgatgtagccagccacccaaattcccttttcacttccctttcactctgaaaagcgcttttacttttagtagtattaaaacttcaagagcattagcctccctaatagtcccttttattcctcctattagattatttctgttcttaagaggcagcaggaggagccctgtaaccagcacgtaaccttaggcaaggccatgaacacgcctgcgcctgtttcctaacttaaagagaagcattagccggtctctaaggtcctggaactcccgtctgctgtcgctgggcgttcatttgaaagacaaaagcggttccgaaagcacgcccggcggtccctgctctgggagtgctgacctgcctgtgtgcagcacaaaaccgctcccttccggccctcacagctaacctgcagtccccatccctccagcttcctttctgccataaatcactaactgtgtgggagatgaaatccgcctggtgaaggctgggacggacaaaacacagtattccaaaatctagggcccaaatcggagccctcggagacgcggcccctaaagccaatggggtccggggcggcccggaaacttccgggagaaccggaccctgagattctggaagggccaaatagtgaccctcttccctaaaaatcacggaagagacatgaaaaccacgggatctccctggcaaacctcaggagacagcagagaactgcggagccgagaaggcggggcaagaacttccggggtggggctacggccggggcgcaggggttggcgggcagggccctcgcctccagcgacgcatccacccacccctgggtccggctctactgggttatcctcgttccgccgagcaggagaggccgggggcgcccgggagcttgcaggcgggcgtgggtgcttgcgttctctactcgggatccgcgagcagggccagcgagaggccaagtgttgtgcccttcgcgaccctcgcgtctcttagtaacgcgatgaagctgcaggagctcccggctccttcaggccccgcccagctagctcaggccccgcccccgggagtgggcttttatgcgcatgcgcgagggctggggtgggcgccggcccatcttactaagccaatgtaggtcccaggtaggagcgctgccagggctcacccctgagcagagatggagggcgaaaaagggttacttgccgctacttgaatcccagacaaaattccctgtgaaagcggatcacagcacggagactgtgtttgtagttcctgatagtagatatctcctatctattcatttgcgaggaatgaaccattccagagagtcgccatagtgcctgacaatcagtaaacctacaatagatgatatctatagctttaattattttttctagcattatctattactatattacagtactatctaagcgaaaagtgatcagattcaagatatacggttttttgtttttttgtttttgtttttttttagacggagtctcgctccgtcgcccaggctggagtgcagtggtgctatctcggctcactgcaagctccgcctcccgggttcacgccattctcctgcctcagcctcccgagtagctgggactacaggcacccaccaccacgcctggctaattttttgtatttttagtagagacggggtttcaccgtgttagccaggatgatctcgatctcctgacctcgtcatccacccgcctcggcctcccaaagagctgggattacaggcgtgagccaccgcgcccggccaatttacatgttttgaatgtagagccatcaggacttgtcaaattgttgaatgaaagaaaggagcaattgtgtgctggagccagctcattagagctctggagactcagtaattaaatttttaggaatttttctgagctcgttgttaaatacaagccatgagctggagtcaatgaagatgacaagggcctcgggcacctgccccaaacaaaacaaaaacacaagacatatcacaaattaaattatataaacttctaaataaacgagtcatactaaaacaaaggcaatacttagtaaaactaaaaacaaaaaactatttacttacaactcccaaatttctctcttcagcccggtctttctctgaactttagatttgtatatcaatgtatattcaacatccacttgattgtacaaaacaacctccccaaacacctccctgccaaaacaaaaacaaaaaccctgctccttcttcatgtcttttagtagatgtggcctagagccctctctttccatatccatcaatgcaacctgctgactttatagcttctactcaagccatcataatttttcttttttctggtaattacaaccgttcccaacagctctctatgccccctctgtagtctgttgtcaacacaacagtcaatgcaatctgtttaaaacctaagtcaaggccgggcgcggtggctcacacctgtaatcccagcactttgggaggctgaggtgggcagatcacgaggtcaggagttcgagaccagcctggccaatatggtgaaaccctttctctactaaaaatacaaaagaactagctgggagtggtggcgtgcacctgtagtcccagctactcgggaggctgaggcaggagaatcgcttgaacccaggaggtggaggtggaggtggaggtggcagtgagccgagattgcgtcactgcactccagcctgggcatagagggagactccgtctcaaagaaaacaaaacaaaaaaacctaagtcaaattatgtcagtcctctgctcacaaccctgcaatggcttcccatcttatggagagtgaaaaccagaggctatacatggtgagcaaagccctgtaagatttgctcacaacaccctccctccttcctctgtagccccggatcattctgctgcagccacactggcctaacactgcctagcacacagt

SEQ ID NO: 913844 - DNA, 4001 bp, Homo sapiens
tttgggtataagcacttgaatatatgcatttttttttttgagatggagtctcactctgtcgcccaggatggagtgcagtggcgcgatctcagctcactgcaatctccgcctcccaggttcaaatgattcccctgcctcggcctcccaagtagctgggactacaggcgcgcgccaccatgcctggctaattttttgtctaattttcgtagagacagggtttcaccatgtcggccaggatggtctctatctcctgacctcgtgatctgcctgcctcggcctcccaaagtgctgggattacaggcgtaagccaccgcgcccggcgaatatatacgtatttttttaaacacacacacatatacatataatcttctagattataacttgattcttttcctaactcaccagatttcacctgtatctccatattctcggaaagtttgcagttctctctcatagacagcatcccaactatgtaaacaatgaaatgcaaagcaagactcttgaattaaactgtattatgaattaaatgtatgtttctaatacattacagagctatttatgacagaggtttaaacatcactagtgttattaataaatacacatagttcaatcttttaacgtccttgagttaaaagaaggaaatacatgggcaagcagaatacgtttatactgtacatgtaaagcatttaggacaatatctgatgcacaacaataagttttagcctaaaaaaacacaaagacatttgtccacgtatccctaagtccctgacccaagttcaaaacttgatgaaacaagcacatctggtctcaagtgtgcaggcacacagtctctttcctgtgctatttgtctctgcctattccagtcttctagccctccgtttaaattttctctggacgcttttcttctttttttgagacggagtcacgctctgtcaccaggctggagtgcagtggcgcgatctcggctcactgcaacctccgcctcccgggttcaagcgattctcctgcctcagcctcccgagtagctgggactacaggtgtgcgccaccacaccccgctaatttttgtatttttagtagagacggggtttcaccatgttggtcaggctggtctcgatctcctgaccttgtgctccgcccgcctcggcctcccaaagtgctgggattacaggcgtaagccaccacgcacccggccctctgaatccttttcatttgccgtctcttttcctacaatgattctctagaatccctgctccctctcatcccgccaatttacctctccccaactgttccctgcagccattcatccacccacattaattcatttaataattcctgagcgtctgtttgaggtcagatcgctttctttcaccccaagatcccccactatctccccgctcccgcctcgggtcatccgctattcccaccccacttccagctcccacatccctcccctcctactcagccttttcggctcccaggcccagcacttctccctcggtctctcactctcgccgaccagccctattcgccagcctcgccctctccccctttcccccaagcctggccctcaggttcgagactcccaaaaggcctcccaggagccaaagcctgtcccgcacccacaagccccttgggctccaatcccttgaaacgtcggttaaccgcgtagggcgacccctagggattccactctttgaaatccccgtaagccccccgccaggtggccctgctcccgtcacgcccccgagggtctccctgtccctgagccccgggtctccaccccgccgtccccttctcggggcccaggcagggcggcacggctcatcctcccctgcccagcgtcacactcactgctcgcgggtccccagcgccgacgggacgaaaccgtcctccccgggactgcccttgtccgaccgcgccgccaccgcagcgccaccgccgccgtcagcgcccgagctcatttcgctccacgtcctggacggccgttggggccgccatagagacggggcacaggcagagcggacgagcggaccggcgcctctaggcggcgggaggccgccctctcgactgctccagcccccgcgctggggctgggatggggacgcgacgccctctgctctacccccggctccctgcgccggcggggaccgtgcgctctccccacagcgttagtggcatccccttcgtcgaggtccaagagcggctgtatttggggactgctgttcgtgagggaccattagaggtattgcattttggaaaacggctggcttccgcaccgtggacacctaaagccgacgccgctctacccaaacgcagaaatcacttcacctctccactgcgtgcgcctgtctgcgaagcgggtgcgagcgtccatccagttatttggctccttggcaagaggccaacttcgtttctggctaagattctgacttgaaaaccgcgttctggcctcttgtgacttgatgtcaccggtagacgtggaaatttatgtccagggaaaggaatgccctgcaactctccacaatacgccaaacacggggatcagtgtgttgtggaagaaagactgctaagtgagaggatgcccggataagcctcagctctgcctcgacccaggcacctggccttgcttaagtttgttttgttttgttttgttttgttttgttttttgagacgaagtttcgctcttgtcgcccaggctggagtgcaatgcaatggcgcgatctcggctcaccgcaacctccgcctcccgggttcaagcgattctcctgcctcaacttcccgagtaactggattacaggcgggcgccaccacgccaggctaattttgttttgttttgttttttagacgtagtctcgctctgtcgcccaggctggagtgcagtggctcgatctcggctcgctgcaagctccgcctcccgggctcacgccattctcctgcctaagcctccggagtagctgggactacaggcgcccaccaccacgcccggataattttttgtattttttttagtggagacggtgtttcaccgtgttagccaggatggtctcgatctcctgacctcgtgatccacccgcctcggcctcccaaagtgctgggattacaggcgtgagccaccgcgcccggcctaattttgtatttttagtagagacggggttccttcatgttggtcaggctggtctcgaagtcccgacctcaagtgatcctcccgcctcagcctcccaaagtgcagggattacaggcgtgagccaccgcgcctggcctcttgtctaagtcttaacctctgtgtgtttcctccctgtaccatgtcagaactagacggtgtctttgttccacaaaactgctcccaacccgcgaaccggagattgcatctgcctctgggtctgagtgccattggtagatctgcagtataatacaagagatcttatgggccaaagtctggggtattttctgtagtagctgtgaaatactgctggtcctatgtcctaggcaaggccctcaaatgcccctagcgagactgccttccaaccaaaaggaattgtttgctaggccacgtttctgttgtcttggcagacagaagcccagtaacaagtccctaaagataaaatagcatcagaaatccttcctaggatcggatgcgcatctcctatagatgctgttctgagatcttcaggcagccactagtgatagggtaagataaaaggcagacaggaggccggacacggtggctcacgcctgtaatcccagcactttgggaggccaaggcaggcagatcacgaggtcaggagatagagaccatcctggccaaaatggtgaaatcctgtctctactaaaatacaaaaaattagccaggcatggtggcgcgcgcctgtagtcccagctacttgggaggctgaggcaggggaatcatttgaacctgggaggcggagattgcagtgagccgagattgcgccactgcactccagcctggcaacagagtgagactctgtctccaataataaa

SEQ ID NO: 913845 - DNA, 4001 bp, Homo sapiens
gaaggtataatggactggcaagtttccttagactcattccagtctagctccgaaatttcccagcactctctcatccccactccaagatctttgataacaaaaaccagattctttttctaaaatctccctgcactcaagccaataaatacaacgatataagtcacacaatgcaatcatttttgatgaatactatatagcagttttccattctgtaatcccccaaattctgcaagacagttaacttcgctgaactctttcatgccttactgtagcagcaaagtagcctgttatggtctgtaccataaccaccacccatttttcgaaagaatactctaatttatatggtgaaaaaaaacagaaaagctgatgttctcaacgtcgagagcaatcctttttccatacctttttggttttttaaatatatatattttttacccttatccacgccattacatacgagagagatataaaacagacatctaggaaactctgaatcggccaaaatacttcagaaaattcaaatacatgctgtaactgcggaaagactaataatgtaaccgattcgtgcctctacagagctgcaaggtggactatctgtccattctcatccagaaactgaaacaagcatctggtaattttccctcactaccaaaaagtccatcgttcttttcgactgtaaatgggaaaaaaggcgagaagggcatttttaaagccgcttctgcggtcactaaattccaattacgcatctcagatacttcgagaatctgtgattaaagccaaagtttcatccctcgagagcaaagtacagtagctgggaaagagggcaattttctaagttgcaaatgaatctttgcgggggtggggggaagcaacaaaaatattctaagccaagtggaacttgaaatactataggccaaacgtgcttctcttcactccagaagtacaagcacgtcagtgtgggccgattttccacaaagggtggtgacagaagcactacacatattttttcactggaaccagacaaccctagggaataagatcccaaggtacaaagaagtagaactcagaggctaacagaacaccaggctcttaaccaccgcctccttaggaggtggcctggctccaagcccaagacgggtggggtcagacttgtgagtggccaggggggaattcgacgccgtcttaagacgtgcaaggagattcgcccaacatctcgtctctcccctcgctttaggagggccacatttcagacccagaggctttccggccttttagagtctccaaaatccccgccaccaccctcctcccgaggacagaacgtgttagtgccaaaacggggagggaaggagggcgctcaccttccaccacaccgcagaggaaccgccgagcccctcctgcagccccggccaccgccgctcccccagccccggcggggttgtcttctccgggtgccggagctgccggcggctccagcgatgcccccgcagaggcggcagggttggagctgagctcgctctcccgctcctccaacgtcgcttgactctccttctgcaccatcctcctgcccccggccgctgccacctctgcgggtcctcctcgacctctgtccgttggggcaccggcccggagccctggagagggcttcagctccaagtgtgcgcccctccggctccttcccctccccctctgcccttccccctccctctccgcagggacccgaatgcccggatgagaagggcggcggcaccggcgcgagccctttgtcagccgcagcctcggctttaagctggggcgccagaagcctaagcggagagcgaggctgtgacctctcgttccctggaagaagacggccaagggtcctgtcctcgttctctgcctctgctgccctcccgataatcttaggtcttccgctgtttcccctccaagccccgagctctccctctgctgctgcctccaccgcccgcttcctgtttatccgcactgcgcttgcgctgcagaccggctcagaccggtcccctccgcccggctcccccgccttctttggggctagcctattaagcttctttaggtagggggaaatagaacaggagacgcgaaaagcagaaggtaatgaaggcagtggaatgtaccatttctgcttgccaccctccgaaacaagcctggcaccctgggacggacggaccattacccgccccgaaggaggggagtatgggaggaggctgccgccggttggggcaatagggagaaggggggaaggtgaaaaggagaggtgtttattctctcagtgcgcaggcgcggagccgcggcctctcgttcttaaagagataggaaagaactgacctactttctatggagattcttgtaataggtgggctcattacatctgcctaacccaggcttggttcggtaaagacaccattccaaggagctcagctcacccctctgccttgaatcattttcccctaatcccatttaaaatgtaatcattcgttcattccttcattcagtagacatctatagagcttgcctcgtgctgggctctagaacactatgagctcacagtacggtggtggagacaagccaccacacacgcagttcccacaaggtgtccccaagaacttcggagctcagaacaggtgatactcactcctcctttggggagaggccgtgggcatggcttcacttttcagctggattataaaggatgtgaagttagcctgactgagcagaaggggagggaagacagcactccaggaaagtggaacgaacaacagagtccaaaggtagggaggcatgaaaagcctgccttgtttgggaatggggagcgcgcggtgtgtgcagtggggcatgagatcccttcggcctcggcatgggcatcgcttccttgggaagccttccctgagccctagatgggtttgggtctccttgctgtatgttctcagagctctcttgtagacctaccctaatgcactttacatttatgatgcttgagaaatctatctcaacctgtgaggtataaacatgaaatgatgattaagacttagtaatgtccatcttacacttcagtctgatatttaccttctttagccgtagcccaacttgtagtttcagggactttcatggtccctcttcttttcagtcctggattgttgagatgggggttaggagcaaactttttttttttttttgagacagagtttcactctgtcgcccaggctggagcgcaggagcgcagtggcgcaatctcggctcactgcagccttcacctcctgggctcaggctattctcctgcctcaacctctcgagtagctgagactacaggcacccgccaccacacccggctaattttgtgtttttaatagagacggggtttcgccacgttgactaggctagtcttgaactcctgacctcaggtgatccacctgcctcggcctcccaaagtgctgggattacaggtgtgagccaccgcgcccggccggacaagcattttcttaagggacctcctgtgctgagagttaggggccatagcagctttactggatattgtggtccgttggggttgagaacacaattttttttttttttttttttttgtaagagaagaggtctcattttgccacgcaggctagtgcaatcatagcttaagtatcgaattcctgggctctcaagggatcttcccgccttagccatcccgagtagctgggactataggcgagtgcccgccaccacactcttttaatttgttcatttttggtagagacgggggtctcaacatcttgcccaagctggtctcaaactcttgggctcaggtgatcctccagtctcagcctcccaaagtgctgggattacagacacgtgccacctcacctggccgaaaagaacttttatctgaggaatgagagtccttttaaattatcaggcccagatggctgggcgcagtgttggtgtttgcaaccagcctgggcaatattgccagacccagtctttataaaaaaataaaa

SEQ ID NO: 913846 - DNA, 4001 bp, Homo sapiens
ggggcaatggggaaggcaagttctttttcaggcccttcctacccccttcttccctgcaaaaggacagaggaggccctgattgagacacctggggaggaaacccaaacaacgaaaagtaaggcccaggtgatatcaaagtaagacctcaacaaggttcaagaatctgagcagctgaacaaggtgctacccaatgtatacctagggctctatttctttcaaccttactaacagcaaagcctttttaaagtagtgcctaatactattagttaaatccttattttgatacagatttttttgtttccccttcaggacagtttcactctcgtcgcccaggttggagtgcaatggcgcaatctcggctcactgcaacctccgcctcccaggttcaagcaattctcctgcctcagtctcccaagtaactgggattaccagcatgcaccaccacgcctggataatttttgtgtttttagtagaaactgggtttcaccatgttggccaggctggtctcaaactcctgacttcaggtgatccacccacctcggcctcccaaagtgctgagattacaggcgtgacccactgtgcctggcccagattttttttttttaatgaagatatatacattgaaaagtacctgagtatagctccgtactggtggtctacttcatccaggcccctgactgtggcagacactactccactattcaaattccaacccgagacagagggcccaggaagaaagacacgcggcagagcaaggccagctctcctctgctacttgcaggcagactccgggtctgggcaagtatcctggccctctgagttaacgtgatattaacaatcagccaggctcttgacgcggtttccttcaaagttttcacacccccacccaccaggtgcgctaagctttgggtttttaaaatcttgttcatctcccagagtgttttagccattgagagggccctgaaaataacaaaaccatctcctagacacctgcccagggatgggggagatgacgggagagcctgacttaacagatactctataggtttctatttggatgtctatgtaaataaccagtctaattctcagctctctgtgcttaacattctactgagaacagctctctggaccaagccgcttccctgtctgatgatgatctcagcaggcataggttgcacacacatgtacaaagtctgctttccaggacagaaagccagctactcagctgaagcaactgagagcaaacaccaccctgagatttcaggagatgatgaacccaggagtgcgaaatacatagttcagaactcctctgcggtgttataaccgacattacggtgcccagtgtgtgtggctctccagcgagccttgcttactctaagtgttgatgaatacagttagggtatgatgtacacaaacaccagccatagtaaccagaaggcccctagaacttggcctccagcaggaaggaaatatgggactctgcctaagtatgctaaagggttgctgcaagccaaggcccgcgcaggggcttctggaagcttcctggagcagctggcggagggaaagctggcagcatggaagggtaggaagaacccggggcccgggcctggggctggcacctagaggtaaggcaggggctgccacgacccccgccacacgccagtccacagtcactgcagcgcagcctagtccaggaaccccaggcccggggaaaggctgggcaacacctgggaggcacttggggcgcacctggagctcgcccgggatgggtgggggtcagggcggccccacacccgacggcgaagtgagggcgcctgcaggaccactcgaggctgccaccgtcccgagggagagctccgcactcttccgggagcgaggcgacccagacactcaccaagtcgcaaacggtgcgcaccgcgaggacctgcgggcgtcgggacgcaaagcgttctaggggcgcgggctgtcccagcatatccggggcgcgggggcggggccgaggggcacggggatggcggcgtggggcggggtctagagcggggcggagccgaggacctgagaaaagcaagagagcgcgcgggggcggggccggggcgcgcgggggcggagctggggcggagcccgggaggggcggggtgttcccgcccgaccgggtcggcgcatgccctgtgcggcggcgccgggcctgaggcagtctgcgcatcctcgctggacgccggcacgccggccctggtcctccggcagcgccgctgccctgtgcgcctgacccggatggcccttcggccggtacaagccgggcggcgccttcccagcttccgcctgaggctctgtgccttagtttgccaaatggcccgtaccttttcctgtcacagggatagtccgcgggcgtgcaagcgacctgccacgtgcccgagtggtcctgaaagcgcgcgggggtcgtaggacggcgcccgcttagtgagaatcccggtcctgctcggggcggctacgctgagcccggagcgcgagtctctcccctcctggtgccgctcccctagtcagggacccccagaccagcagagaccctgtcagggggccgtgggggcagcctccagggcctgtggtgggcgatgccgtccaggggctgcagtcaccgatggcctagacactgccagagcctgactcagccgctctccagagagcacacagggtgccaggccctgcttggggttgtgtggacgttattaggagttgaattgtgtccaccagagaagctatgttggagtcctaactcccagtacctcacaatgtgaccttatttggagatggggactttacagaagccatcaattagtgggcccctcatccagtatgactcgtgtccttataggcagaaggccgcttggggaggaggattggagggctgcacctgcaagccaccagaagcctaagaggacagacccttccctggagccttcggagggagcagaggacactcttccctggagccttcagagggagcaggatcctaacacacctgggtttcaaacttctggcccccggaagtgtgagacaataggtttctgttgttttaagccactcagtgtgtggcactttattatggcagccccaggcaatgggtacagaaaccattgtctctaacgtggttggcataagcaccccagggagtagtatcatccctggaggcttcggagaggtcacacaccccttggcaggatcccatccaaggcccacatgttctaagccaccatgctacgggccttctaggttctgtttgttatcttaatggaaaggggtcttcaccttcccggtgaagtttccctgttgggattcggccaatgctcataccttcgtatttgtgacttgcaggatccaacatattagcatgagtgataagggttgttcagaggagaacttcagcaggatttgctttgggatgagccctggtgacaatacaggctgcatcattgatcctctgaggttccccaccccgaccctgccttggatgagacatgttttaaatagctgcttgtgggaaataaactaggccctgagtacacgatataatggtcaaatcaaggcactttttccccactgaacctggacacagcctcggaatccttctcaacactgtgttccaagcagccattcacatttaaactaatgtggaaggacagatgaaacatgtttgcccttggctctggttttttccattagccttctataagacttcgggaaactcgtctgacttctctaatcctcagtttcatactctgtaaaggagtctcatgataacgtaccctacgtgtgtacaaactatccttccatattagggcatgtgtgcatagggaaaataaaccaccagcaccacaccacactactaagaaataatgctatacacctggccacttacagcctgttactaccaggacccagttagaaccgggatcttaatagaaccaaaggaaaaacaatgccgaaatggaatcagagtgccgact

SEQ ID NO: 913847 - DNA, 4001 bp, Homo sapiens
attcttttgttgttgttttaagagacagggtatcgctctgtcgcccaagctggagtgcaatggtacgatcacagctcactgcagcctcaacctcgagggctcaagccatcctcctgtctcagcctcccaagtagccaggactacaggcatgcgcccagctaatttttgtgttttgtagagatggtcttgccatattgcccaggctggtctcaaactcctagattcaagggatccacccggcctcccaaattgctgggattatgggcctgagacaccacacccagcctgttttattcttaaacacaggaaagttagtctcaagatgcacttcttaggaatgtaaacaatctactgaatatagtaaatataaaggaagacagcaataaacacttttgttctcttgcatttattagcttctattagtttctatcattctttccctttctcctcaggcacacaagccactccagaatattcactttttgttaatattatgttttatggctctcagtaaggacactcagaagatgtcagagacacttgcttgatatattaggtagccagagtgatgttcttaagtggaagagacaatcagggacaaaccaaggattgggacaaagagtagctggaggcaaaagccaccttcctacagacaagtggcaatgggttctaaagtttttaggataaggcaatattcaaaaagctcattacctggtccacaccagaaacacagtaggtgggtcattctggccaacacctttgtctcaagatactgacgtttattatttgtcatatggtccaatgaaacctaaactctcctacagctatccacaccgaacttgtttcacctcatgaaatgcaaactcctttcttatactgctcgatcacttccctacgtgccccaaagggatgttctaatataaacaaaggcatatcaaagaagccacccaaacaagtgagatagaaacatttattgataaataggaagaaaatgggcgtttctaaggtaccacaggaaaaataaaatattttactctagtcccttagctataagatatttattctacttatatttactaatggccaccgtattttttaagacatggaaaattggaaggtaaagaaaccatcaaccataagattacagagaaggcaacttgaagaacagtttgttttaaactgttctcccaacattcacatagagtcaataacatctagctctttctcaaaacagcctatggccggccagaatgcgacggtgaaaacaaaacagggagaacgtaatgaaaacgggaaggcgctggaaaagataaaaactgaacagtccgagtagcctgcactttgtatttctcctttgagtcctcactgattttccacttatttcgattcagtggttaatatttctccgtattagaaatccatctgtgaactcccgcacccacttctaaccacatccacaaattccaggagagccagtcaaggctaccagagtgtcccagtcgcctgtgaggaggggggcgtcggcgccaagttgcgaacccggcactgggagaagttctcccgggacgggagaagggacgggttggggtgaaggaaagtggaggacgggaggcaagcaagactacggactcctctccaaaagctgagcgcatcagggagagacaggtatcccgccagacccgagaagtagccggatgcccggggcggacaaacggccagccacgaagcccagttccctaaggctgtctcgccaacccccttccccttcgccttccctaaattgctgtctccttataccctccagagtccaagactcacgcgtccaaacacgagctccagcagcctctcggtcaaagccgcccacctctgacagccatagagatgaaacagcggagacaaacctccaccccctccgcccactctcacgtgactctcctagccgctgggcctgtcgggatcgtggagacaggcgtgtgggaggggcacagaggaaaaggaacggggaggggcggggaaatcaacgcgccacgccccagcctcgggccccgccctagccccgtcactcccccttactcccctcagcgtttaggcgggaaagctggagagctcccagaagctctcgggcatttcttctggtttttttcccctccacaagggtcataggaatctgttgagaaatttactgtggcttgtaacacctcctcggtacccgttttcgtgttggctatgttggctaagcaaaaaggagttcgtgaaaagaaaactggaccacagtgagttggaaattgtttctttccaactccgtttaggttttctcagagattaaatgttcctgtttcataaccttgagacttttttggatttagaaaccctcaccacttcctctggtggatgattttgtcaggtgttttatttgcagactaatattattgcagagtttataatctctagaagccacttaaaaacatgttttcccttgaagaatgtgttttttgtttgtttgtttgtttgtttgttttgagatagagtttcactcttgatgcccaggctggagtgcagtggagcgatctcggctctctgcaatctctgcctcctgggttcaagcgattctcctgcctcagcctcccaagtagctgggattacaggcatgcgccaccacgccctactaatttgtatttttggtagagacggggtttttccatgttggtcaggctggtctggaacgcccgacctcaggtgatccgcccacctcggcctcccaaagtgcgaggattacaggcgtgagccactgcgcccggctgaagaaggtgtttttatcagaaaaatgggatggcaaaggatcctcacccctgctgtggaaataggatggaaatatgactataataccagagaatttttttggggggggggcagcggggtgttggttggttgtttgttcgtttgttttgagacggagtctcgcactgtcgcccaggttggagtgcagtgatgctcactgcaacatcctcctcccaggttcaagtgattcttctgcctcagcctcccgagtagctgagattacaggcacgccccaccacgcccggctaatttttgtatttttagtacagacggggtttcgccatgttgggcaggctagtctcaaactcctgacctcgggcgatcctcccgtctcggcttcccaaagtgctgggattaacaagtgcgagccacctcgctggtcccagagaactttcaaataatttttttttcccaagaatttacgtagcagagctgtggaaaaggcaacaaccatggaaacaaagccaacaaaaccatccctggggtaaattgtgaagtaagcagaatcaactctgttttctccatttcttctcagacccaactaacctaagtacaatagatgattgtgttcatggctctgtgctagcgctttacatacaacccagtgcttgtctacaaccactctaggatggatactgttttattcatttgcagatagggaagcaggctgacacccctaggtaatgcagtacatgcagtagcgggacatagacctgacctgaaggcctctgaggcttccactcttaaatgatgtaattcaggccgggcgcggtggctcacgcctgtaatcccagcactttgggaggctgaggcgggcgggtcaggagatcgagaccatcctggctaacacggtgaaaccctgtctctactaaaaatacaaaaaattagccaggcgtggtggcgggcgcctgtagtcccagctactcgggaggctgagacaggagaatggcaggaacccgggaggcagagcttgcagtaagccaagatcgtgccactgcactccagcctgggcgacaaagcgagactccgtctcaaaaaaagaaagaaagatttgctgaaattcaattctaattttaggcaacatttgtctatataaaactaatcagtcaaactaactgttaaataacatttaaaaacataaatcattgtttctcaaacgtttt

SEQ ID NO: 913848 - DNA, 4001 bp, Homo sapiens
ctgtaattggtgaagtttttcattcaagtttagaattttaaaaaatacatcatgccaaaaacaaatatgcaaataaaggactatcctcacacattctctacaaccaaagattataaatagatggtcaggctaagttgagaactcattttaccagaagagaaggagaaataacttgtttagtatactcttatagaactttatttatgtgaccttaagcatgctagaatgtgctaaaatataagaaaaaagaagttggcctggaactgaagaaagttctctgatagcaaagtgatttttgaatcttgttttatgatgaaaaagctaaagatgaaggtgtaagaaatgcaatggttagtcatgtttatgttttcaaatcaacaatgataaatcaaatgggttcattgatcccaaattcaaacacaacataatctaaaataaaaatggatgtaaagatattttaataggagtctgaatatttgagacaactaagtaaactacaccctcctttggcacacttaatgattacattattatttattttctcaacttgaataatcaaacacatgggttagattaacaaactttagtagtggtggaactcagagactggaaagagacattatggatactcctcacagcagtctaagtatttcacagcattaataaactgcatctgaagaacagcattctatgctaccaggaaaacaaaacaatcccagactttccacaggcaatagaaacttagcatgcaaagaacaagtcactgcaaagaagcaagcaagaaatgcctcttctacaaagtaactgttcattgacctttggaagcttaaaggattcatactagtgtcaccaaaatgagtgatactcatagaacacaatgtaggtaaacaattctcccactacctaagaaaaaggtttattattattctttaatgtaaaaagtttattcataagatagacttaagaatgcagaaaagcttgattttgaatccctgatcaaccaaggacactaccttaaacagtgaaagtttaaagaagactggtgctgttttgtcacctagtgtggttgactacttaatgctgcagattccagagacttttaagcacttaccaactgctgcctctcttatctattcctaattagtaaggacacctatccaagtccagccattgtaaatcttccagccgtaagccatacaattattaaaggagaggaagagtttttagctaccctctacaaactgtcctaccataatcagagaaccggaagtggctggcctcaatcacaggtgttagtatctcatctgatctattcggtactctgtatgatgtttgtgccatggctgttctaaaatagaattcccaggattagaaacattgataatggaatcgtctatacgttattctgacataatttttaatgtatttgttggtttggttcagaatgcagttaaagacaaaggtatttaggaagataatccattgtactaataataagatacctaatttgagggtttggtaagagggactaccaaaaattacaccccatttttcaaacaaaggaagtatagaaaaaatgtactgtaaaaataaagagcaccctgtggtcttcgttagttatattagttattttaaaccaaaagatgtttataattcagcttaatttatatttaattactacaactcagtttaatttatatttttaagactgccagccaccagaaatgtgagagtaatattttaatgaataaattttaataatttataaactaccattaaagagcccaagccttcaaagatcaatttaaaaagtacctttaggagtgtccttgaagatctccttggcccgtctgtaagtatatattcttttcatggttttctccaaatatttagttgcttttccaaattaaagtcattgattagctcagaaaagcaaaataataaagtctttctaggtgtcccatttgtttccccttaagccattttactgagcaaagtgcaaccaagcaactgcttatttgtatttattatgtaagaaatttcaaaagaaaaaaagattaatttttaacttgaagttactgttgtctcatcagtcctgttacagttcaagtaggaacataatatcccaaataagacttttttgtttttgttttagagacagggtctcactctgtcacccaggctggagtagtgtcacaatcttagctcactacaacctccaactcctgggatcaagcgatcttcccacgtcagtctcctgagtagctaggactactactgcttttaaatgttttcatagagatgaggtcttgctatgttgctcaggctggtcttgaactcccggttgctcaagtgatcctcctgcctctgcctctcaaagtgctgggattacaagcatgagccaccagacccggcctccaagtaagactatttaagtgactcaattaattaagtatctcttatgcttaacaagagtgattacaacaaaatttcttaaccttttgtgtaacacataatgttaaaacttccttttaaatcatgctgggtatcaaattctctgggacttgtgcagtgcttggattgtcatattaaagataaagtatgttaatttaaagtgacaggaacgaaatcattctgaagggagcagggcaaggacatatgcatcatgcgctgaacctttgttcctgaagcattactatggattttggagcattaagtaatttaaagcacatgctgctgagtcagtacctgccagaaatcctaatcagaagatgagaaaaagaaaaaacattgacattgtttgattatatgaacaaactaatcaaatatacatatcacaaaacataatatacaaagaaacagttaaaacctgtaataatatcactgaacacctggaagtaggaaatgaggaatacatagaaatgttttagatattatctgctaggcacaaaacaaaacaaggatgtctcattactgtttctatatataatatttttttaacttcatggcaaatagttgctttgccactcatattaatataggcaatcaaatatggatgagttcagataattagtaactactctaagaaagagtacataatggctccttagaaaaaggtctcctccaaaattatgctgcattaaataaagtgatacccacattggtattaaaaaaaaaaaagcagtcatcctgaaggctggcatttggacaagcagttgttgttagctaatttagctgggtaccactccaaactattttcaaatatcaaatggttttaaagatttttttcaataaataaacttcactgaccaggaaataaaatttgacctatatttaccatcctattctaaccacactgaatagcattgtaaaatttcttgactgaaaaatggatgctattaacaattcacaagcctacagctggaacttatgtgacagagcccaagggattttacggcacaggaatgagatgaatcactgtgaacacaggacaactgagacatgtgaaatcaaactgggggcctctctttagttaatggactcggtatttaacccgggctagttgctcattacagagatagcacaggagatttttatagctaattaaactgggaaggaaaggactgtggagagaacaattacgcagagggtatactagtctgcagcttttcaagtaaacgaagaaagaaaatcatatatatgatagcagagaactcctttcttaaactgagtaaagggctcaaagtcatgcaaaacagctataatttgtagagctagatactttacctattgtcccaattttactgagaatgtaactgacagagaggttaactggtctcttgctcaaggttacccatcagttatgtgggagagcctatatttaaatacaggactgtctatatccaaagtccacactcttcatcccactctattacacataaagaagttcagcaatccacaagactatgtttttcataccaattcagcatactttataacat

SEQ ID NO: 913849 - DNA, 4001 bp, Homo sapiens
ggttgtaaggattttgtaaaataaatgtgaggcatacctggcatacaataggcatgaggtgtatgctatcattattatttgtaactattacaacattttctaagagaaaaagaaccattctaggaaaacagaagacttggatactagaccttagagaaagacaattaagaaggcatactcttgggctcgggttcttcacctgtgaaataacggggccttactagatgatttctcaaatttcgaaaaagtgtaattaatggaataaatgagttgttactgcttgtgaccacggaccacagctacaacgatgggaacgctacagtaaaaacatgaacaaaacagaagaaaaaaggaggacacaaaggcttgagatcaggttcctaaaacagggtgtaggtctaaaactgtcatctgaaaaagatgatgagtttaaaaaaaaaaaaaaagaaagaaggaaaaactagtatcggaagcaaagcccgaggaagaaaattctagattctgttttttaaaacgtgcgcccaattgtgaaactagacgccagggaagggggaagggatgggttggcgctcgaaggggcaattcagtttgggaacgggagcgcaaaaattgcgggagacctcgtctgtcccctttcctgttggatccccaactctactaaagcaggcagcgagtacaaggtgctgaatttacacctgatgaattaataaatgaacatacgtgtaaggggaaaaagagatagccaagtctgtaatatccctcgacagggaggacgtagcccgagggatgatggcttgggaaaagaggaaagagaactggggggcatcggaaaagcccagggtctgggggaggcgggagagcatccagggcgggtgggaggaccgggacagcacacgggccgcccggggggtcacctgcgacgtccggcggcggcaagccagggtggtagtgctgccacagcccctgcaggaaggcggcgctgctatccatgcagcggtgcttggaactggtgatgagccgcaggcggccgtagttctcacggctgaaaagggccgggaagagcgaggccagacgcagcgccagctgtcgcatatcctgccgtcccttctctactagctgcccgtccatccagtccgcgtaccacaaaggccagtcggccagcgctgcacccaggtcgcggctgccggtactactagccccgccatccctggacccgcgggcctgcagcaacccgtgcagctgcctcagcttgcggatctgtttgaccgtggggtagcgggtgccgtggcgaatgagggcgaccagctgcaccggggtgcaggtcccctccagcagctcagggtcccgccacggagcctcggggcccgacaatagcacggggttgacatcctcgtagcgagtcttggtgccgaaataggggctgagcgacgaggccaccgggtccctcggctctagaagagagcagcgcgcaagcgacgagagcagcgccgcagccagggccgcggcaggcgctacggaggtccggaggaggcagccgggcgcgcgtagcatcgtcgggacggtcagtggagtgcgccgagccagctgcagatgcccagcttccggctccggagggcagggggcgggtctggagggcgcttccggccggcggccctcgggatgcgcttcgctgttctctaggaggtaccaacctctggcggtgggtcttgcgtcccggcggaaagctccgaggagtcctgtagacttgtggctcgggtggagccggcggaaaaccccgagaagcttgagacagccgtggctgaggtggagccggcgtcgctgccctggagcgtgggcgagtttcctcttagccggagcttcagggattgactcaaagactcctccgcttttttagttgttttgggtgtgaatacagcccggactaaaccttagtcgcctagactaaaccttagcctcccaggctgccaaaacagcacagcttttacagatgactcttacatcaccatccctactctgtgatactgtgtttttcaaagtttagtgcctgaaccatcagcatgaaatctgcctgagacggttgttgaaaattcacatcgctgggccttgcggcaggatgcctcttgaagcccaaggtttttgtttcgtttttttccatttgagtttgaaaataaacaggatacagtaaagcagagaacttggaaaggggcttacattctgcaggaatttaagtcctgaatctttggtataatcttgacctggactaccagagctaacgccgacatcagtgagacagcaccctaaaagttctgtgcttgttgttcccgaaggcttagcgagtagagacatagcaatctagagaatttgggtgcattgagtcatggcccaacagatttactctattattaagtatgagctaatctgctttgcgaagcaaacatgctctgtatttaccaccactccagatccatacgttcctcccatgtacttacttacatactcaaatcaaaagctgggttttttaataggttattgctcagaatctttgaccccaaaaatcataagtctgaacaataccttgttttttcccacttgaactccagtttatttgccagctggggaaataataagtattacagaagtcgtacggtgatccagatttaaggaaattgggaccacgttttcattaagttagcttttgcttcaaagacactattacattgctctttataagcccatcaccatctttactccttttctctttaagtgtctccttggtttagagaggtgttcctctaagtttaggcgtgcctctaaatgttaaccaagaagaaacggggccagcctatgaatgctgaaaatttggagacgttctgtgcaggaaaccatctttagggcaacagatgttcttttcgatatgctattttgtagcatgtcaatgcctgaatattcatggtcagtgatatttttgtagaactttgctcaaattagcatttagtaaatatccgctccttcttaaaatagacattctaacccgtatgctctataggctgagtcgcctgataatatttctaagtgcattcagcgagcatttgttccaggttcatctcactgtattttgcctaatacatatgcttactaataacttctcacacccaatcttttgagtcctaggggttaccaagtgttcccaaagtcattattcacttcttccttatgaagcaatctttagagactccacttacaaaatgtatggcacagtacacatttttatacatgaaatttgcccctagtttgattttattttccttatctaattcctcatcaattaattttatcctgttttatacacttaggtatatcagctcctaattattttgatgttatgccaagataacaatgataaagtaaaagtaagcaatgcctccatgtttttggctaggaaaaagccaaatataaagaagacgaagagtgcttaagctttggacccagactctaattagctctgctgcttattaattgagtgacccaagttctctgggccttagttttttttttttatctgaaaattggtaatattagaacctatatcatgggattatcatgacagagatgatgtatttaaaatccatatgataggccgctataaatgatatttttatcattactaatgttcagtgtgattattcctgtgctaagatgcctagctttctagcaattacatggattacacttactcccactgaacattaaagtgaatgactttcacaggcaacacatgcatcaaagatcatttcataacttttctaataataaaaatccactcatttcacttaaaatggatatcttgttcttagagcactaagcagcctttgaaaaaatttaaaaaggtcacaggccgtgctcctcatttcatgccagaccatgtctgaattatctgggcactctgtaaattggatgccctttgacataggtgcccacttggtccaatcatgtagtacaga

SEQ ID NO: 913850 - DNA, 4001 bp, Homo sapiens
tacatacatttaaaatgtaggactagaattgcaaacattacatcaaaaacaaaaagttgcataaaaatagaattttggactggtataaactttgataccactcttaaaagttttaaaatctgcaaaacaatatcccatttatgtataaaactggcatgggataatataaatgctcaattcatgacaacaattaccactggtgagaaaggaagaagaatgggatccaggaaagggaccagtagacctcaatttatttaaggcaagtaactgaagcacaaagttaaaatttagtaaaaccaagttgtgggtatagggatgttcaccacattagccttttttgttatcttcgtgtttgaattatttcccaataaagtaaataatttttaaagctccacaggcgatgccaatgtactgccagtttggagagagagaaaaaattcaatttcaaatgctagtctaggcatcttctttttgatccttataaagcatccaggccctgtgactgataaattctaatctattttttccccaacatctacttccagtcttttggaaattaattcagagtataatgtaatctacaatctttgcatgtatctttgtcaacatctaccctatggaacataaattcctagaaaacagaaaaaaatcttattttcttaatctcccattgctaggtgaccatgtgccatggtttcccacctgctttcctggcaaaattattaatagtgttccctttcactttcgaaagtgtcccaccagtttggatggtaagttgcatagtcagcccatccactgcaataacttatgatagacatgactgctcatcttctcagcattgctacatataactcaaaaaacatcatagtactttgcttttcactttctaaaacttacccctcttacacattaacaggtacttttgaactgcttcaaaagctaaagaatttatatgatttttccatttgtatcactttatcagggggaaattcagaaaagataatttgttttaaaaataatgcctacagttgaggctttatattactctgccctcaaaaaaactccagaatataactagaatcttgtacagtaatttaaataacactcaaagaagaatatgaatctaaaaatggtaaatagtaagcacaaggtatacaatttttttgacccagaacatattattttcttaatgtagatcaattatgggtctttaaaaaagactgtttccttatgttttcattttcacagttcaaaattatttaaactgttaagttcaaataaaagacaacagacatattacctgcatttaaatcatttactggcacttgcaaagtagctgcaactttttttaaaatgttctgcatttctggtccagttttgaaggcttccacgtgataaagagctgtagcatttttttctacttcagttaaaaacttctcacagtgatcaaaaaatctcattagtttatcattaactgttggaggtccaaactccatatctgaaagagaaaaaaatttatatgtatttgtaaatcactgacataaatgacagtttcaaattattgaaaatgttaagtgtgaaaaaggaacactaacatcttactaatccgcacagctgaaataagcacatattggtcaggaaactcttggggtaaaattattccccatttataatggctgtaacgcatgagaatagctagaaaaggctaaagaaatagagattgaagattaaatgtgttgtagagatgctacgcaatgaaattgcatcatacattaataagtactgtttctgtcaggcacggaaaactttagaaagcaaactaaaaatcagcaaagtttctacttacaaggtgagagagaattcaacatatggaatctattttttcactctaagccaaagtctaaacagagtattttattttctcaattaaccttcccaactctgtattactttacaaagattctgctttggacaaaaactactgacagcagcacaaaacgcactgatgttttgggtctcctgtgcttcactgtgctgggcctgtgaattggtttatcttttaactgaagccccagataactttctatataaaatttaataaattacattatgcccccaattgggcaacaaatatgtattggagaagcattcataatcatgcttcaactactggtgtgccctttacgtttttttcagtcatattcaaaacacacatttttcaatcatttctccaacaatttaccacgaaaagaacaccaagtatatcatttttgtacataaaatatgagaaaattgaatatagttttatctgggctttggatgtgtatgcaaaaaaaatcagtatgtatgtttgtttctcttgaaatggataattctgcccactttgtcaactggattgcaattcttaagaaaatatcttgactaggaaaataagcgaactttgtcaccttttttctgtgtacactaaaatataatttcccaagtgcatctgggtattttatccttgttactatctaattattgctagtctttaaacaaaaacaaaggcattgttctgtttctacaaaactacaaatctaattcagcagactccctcaaaagaccagatgtacataataggcaaaactattgtctatagagaataataaagtggctaggcaaagggtttgctatctgacactgaaaacggtcaggagtgggcttattctgaactgtagtattttcatccctggctctgtactgagagtcaaatgccagtcttcgcaatgccatctgagaacaaaaattcacttgttccaggaagtcgctatagatattgtgttatattaaaatatgttctgctttcaccattctgttaatttaacagatttatgaggaattttcactcatgctaatggaaaaagtatatatttaaaaaaaaacacagttcaacaagtaattagacacaagtcagctaactgaattacccacaataacatgacacagaatcagtggagaaatcccttacagatggtttcactgttcaacagctacagaagaaattacaaaccagcctacttctaatttttcacttgggctttgaagctaaacaataatcctcacttcaattctggccttaaaagtgatcaagaaactattaatgcttgctcatctctgtggtacaaaaatgttacatgtttttattcttattaggtatgttattggacaaatggaggcagtatagcataatggctaagaaagcaagctctgaatcagatttcctgggtccacagctagctgtatgaaaatgggcaaattatttaatgtgttcgtgtatcaatttcctcatctttgagataaggggaaaatactatcaactccagattgtggttgtaaggattttgtaaaataaatgtgaggcatacctggcatacaataggcatgaggtgtatgctatcattattatttgtaactattacaacattttctaagagaaaaagaaccattctaggaaaacagaagacttggatactagaccttagagaaagacaattaagaaggcatactcttgggctcgggttcttcacctgtgaaataacggggccttactagatgatttctcaaatttcgaaaaagtgtaattaatggaataaatgagttgttactgcttgtgaccacggaccacagctacaacgatgggaacgctacagtaaaaacatgaacaaaacagaagaaaaaaggaggacacaaaggcttgagatcaggttcctaaaacagggtgtaggtctaaaactgtcatctgaaaaagatgatgagtttaaaaaaaaaaaaaaagaaagaaggaaaaactagtatcggaagcaaagcccgaggaagaaaattctagattctgttttttaaaacgtgcgcccaattgtgaaactagacgccagggaagggggaagggatgggttggcgctcgaaggggcaattcagtttgggaacgggagcgcaaaaattgcgggagacctcgtctgtcccct

SEQ ID NO: 913851 - DNA, 4001 bp, Homo sapiens
aagcttccttaaccccaataaaataatttgattttaaggtaacaggacatcagagcaaaggaaagactatcccttacaactgagaatttgtttggcaggaggacgactatagatgggtgtttctgagctttggcactgttgacatcttgggccagatgcttctgtattgtgggggctgccctgagcctggtaggatgcccaccctgacctctcctccgcgatgacagcgcatgcccctgtcctatattgtgacatggaaattcaaatgaatcctggaaggttagatgaccctcctgtgagaaccactgttctcaagagattgcaaatccatggctccagcccatgtttctactgacccttgccagaatgctaggtattgatcacaccccctatgccagacaccatccctggccctacacacgtgattagtaacaagacagtctttgcctttggggagctcagcctagtgggagacaaacccacaactcacccctgaagctgtggggttggaaatacaagttttcatgcaaggcttcctcagaggtgacatttcacctgatgcctgaatgatggaaatcacacaagcttgaggaaggggagaactttcccattgtaaacttccaagtgtgtaagaagtaccaaggtgaacaaaggcttggaatgccttaggcgggaggaacaaggtaggggatggggttgggaggacagggtgaggccgggatggggttgggaggacagggtgaggcctgaatcccgtgtggtctgggaaatgaccacacgggaaatgaccccccttctcaggcctctagtgggacacatgtcagaggctgatggggcactgtcagcaactatacctgttatacagggacagggttattaccaccaccaaacaggacagcaatataagaggaaacgttctcgaattccaggcaggaagactttctgtcccattttcctattgccacaaggagccaagagacaagtgtatggcttccttccttcattctctgtgtccccagtggccagggatgcccactgtggaggcacccgggggcgcacagtgtcttcagacgcctgcctgcagccagtgacatatgaagatcatctacatctttctttaccgcaacattagcaaatcgatttttttaattggcttgatttttaaaaccacttaaacatacaaactagcatcaaatttatacttacaaaacaaaaaaacacaactatgtcaacttagtaacgaatgggagaagcaccaaggaaaagtgacggcaggacccaatcctagagcgcgtttctggactttattctgtgactaaggtattttcctctttctcagctaaaacgtccgcgcgcgcccgcggggctcaccttccaaacaagcaggtgctgaggctcaggggaaagtggggaccgtcgaccccgctccttttgatagtaaccaggcgtctcgtgggccacattttctaaacagtaagttgagtataatccgtaggggaaggccaggtataatccgtaggggaaggccagaagcaaatttacaactcttccactgcaaaagaggtgcgagttactctgatagcaaaggagctaagaagggccccgtgcccaattcacctatccccggccacagaagcgcacaccgcagctagctagcggggaccccaggacgatccgaccgcagcccccggcgccccaaagtccggcagctggggtgttgtcgccagcgcctgcgcctcctgggagcttccaccgagacgccctcgccagagcccaggaggagtcgggcccaggccgcgcgtctgtcccctgcccgtccccgcagagctcggggggtccccgcggctcagccctcgaccccggacagctcccaggagtcccggccgcagctcacctgggacgatccggcccgcaaggccacttgtcgaaccaccgctcgtcaagtcgcacccaaagtccgccgcaggaggagccggcgccgcgctcacctccgcccggtaagctgcgcccgccacgctccgcacacaccgggccgcagcccgcggggtcgcgttcgctgcaccccggcctgcagtccccgctgctcccgccgccgcctctgacggggacccggtggccctacaggctacgtccccgggcgcccggctctagcggctcccaccgagtcgagtcctcccgcccgcccgcccgcccgcagcgtcagccctccacttccttcttccagcccggcgcgcccgcccaattcaaacgaaaacgaagattcaaattctggcgctaagcgctgcgattgaacgggaaagcgcggcatgggaccaataggaagggagcgcagggcgtgggcggggagggggcggggaaaccgggctcgcggggcggggctggcgtgtccgcgggcgagccactcacgcatccggaggaaaatacctgggtgcatccccggcgagggcggctggcggagggcagaggtggaacacgctcccaccgagataacccgtcctgctatccttttcttaaaggaccaaacatctgggacactataacattactcattgccagaagatttaaaactgctaaaaattaaaaacaggcgggacgcggtggctcacgccggtaatccccgcactttgggaagctgaagcaggaagatcccttgagcccgggagttcagaaccagcctgggccacctggagagaacccatctctacaaaaaattcgccaggcgtggtggcgcccctgtagttctagctactgggacagctgaggtgggaggatcgcttgagccggggcggtcgaggctgcagtgagctgagatcgcgccactgcactccagcctgggcgacagagcaaagccctgtctcaaaaaaaaaaaaaaaaaaaaaaaaaaaatcgaaaccttcctcttcagtgcatacatcttaccaaacacaaaaacaaccaattatataaagtagtttggtgtgtcttttcctgctatacgtgtattctctttttcaaaagcacagaaaaaaaggtcataacatacacaacacgattctatactttgtgctctctgcttttaaatatcctgaggctatctccactgaacacattctcgcttttactctctgatggctgcagagcactgggcttcgggaaaccataatttacttaatcattactattgccacatacttaggtttacaatgttttgttattagaaaacattcttcaattgaaatggcttgtgcatgccaagatgggtgaatcctaaaataattctacacaggattctatcggggtctgcttcagttgcgctggtggccatgtgggctcagtaggccacctggggtgaagtgaatggagcctaaacacgcttttggtgacaacggcctctctgccccatctcacctcctccagctccccagcaacccttggagcttggctcccttgatcagggaggcctcgatgcaggggacccctgaggacttcctattcctttcagagagtccataaggtcaaaaccatttatctaatgaccctctgtgttacttgcccttctcattctcatgctcccaagagtgtggggtgtggttctgcaaatgcagaagcagtgaggagactcccactgtctccgtttcaaccaggtattacagagatttgcaaaaatgtgaactaaagcgctgttttcattttgttgttttttttccataaaaataagttattggtgttagcatgaaataggtgcatcactatcttaaaatgaatcaataaatgaatatttttaaattccttagccttaacttaaaatatataaatatagctagatataacccatccacattaacaaaaattcctggtggttctcaataattcttaagagtgtaaagggaccacaagattgaaaagactgagccctctgctctagagcaactacaaagatatcagctgctgatggaaatagagaaactgggaaagcaacataaaagcacaggacagcaactctaaattgtatgggccaagtc

SEQ ID NO: 913852 - DNA, 4001 bp, Homo sapiens
cggagcgcgaccggcgtgaggccgcgcgtggttcttcaatcacagcagaagactaaagcctctaggaaccccaactcggggcgtcaggaggggttggatggaagggaagatttggggtaatgtgccaaccgtatccacaagaccccccagctcatgagtcccaggccataccgggatttgggggattttcgtgttttctagatcgtggatggtttggttgaaacccccgcatcttctgtccgccaaggtcccccggggtgaggttgggttcaaggacaggaaaaagttaagtggcgtcaggacgaaagcaccacttctcccccttctctcccagaatcttcctatcatcccccaacgcgccccgggaagtgcatggtcctaaggtccaaggcgccaggacccaggtccccagagccctcaatcagtgccattctcttccgcagcgcgggtgtcagccgcgagctcgtagcccctcgacacccgcctctctctggggtctccggggaccctttcagaggctgtaaaggtgtcagaagcccaaggcaggaggcagcttggtcggcgcacctcccgggccactgctgccactgtcggggagagccagcagctcacctctggggtcgcggaggccctgagcctctgcctgccgcgcaccggcgtcaggagcaagtccgcgcggccgcggagccgcagagttacagccccaaggcgcgcggcggacttcgcccgccccatctcctcgcctcgcgcctcgggacagctcccgtttcctccgagcggcctcagcttcgctgccagcgccccctttgcccgtccagccgcggcatgggctgctactccactaacacacgcgcgcgcgcatacacacacacacacacacacacacacacacacaccctttgcctcgccaagcgcccacactcgccaacgcccccgccccgcccttcggccaccgcagcagaggccacgcgtgacatttaggaccacgcgtgaccaccgcgatcaaacgacggctacggtctgtgttcgtagggaagtgaagtcagacctctgctggatgtcgtgtgtcccctaggactgcgtcctcccgcgcagacaggtacgtgcctggggtgtgcacatagcctcggtgataagtgtcaaagagaattttcgtgcttgcagcccctgttctacagtcaagactcgcgttggtgttttcttttaaaatcatgcccttagggatgtgtgttcatgctgctttatttgtacaagacacccttccccggcccggccttctccgagccaccccagcgcgtcctcctagatgcgacgacgtgtttttcctagcgaagtcatcacgaggttagccacctcggacacttccccggcagccccaagcccacgcagagatcgcagacacagacacccggcgcgctgtaggtctgcaggcagcaggctcagaggcaagcgatggcaaaggtccgagcgctgtcctgtcgcaaggggtccgggggcgtgtgaaccacacttgctgaccctcccaggactcccgcgcgcggccacccgcgcctcttctcaaatcacttaccccgattcactccagactgtggccggggaggtcactccctgcagaagtgtccccctcccccaacgccggcgaataattttaaagcaaaggaggcgcggccaggtgggctcccaagctccgcgcagacccttgggccagccttggccgctacccgagcgcctctccaccagaccttggagggaagttgggggaagggcgggagagcaccggcgcccagggcgcaggggccagagcgagcctggcgttccgccgcagccggctgagactcggcgacgcgggggctgtacctgtggctgcggggccgacggccggctgcagggcggctggctctcccgcctcgagactaggcgcactcccatccccgccgcatgttctccacgcgggctccagcgcgctcaccaccgccaccgccgtcgtctcggctttatttacccagcccggcgcgcgccgcccgggaacaggaatagcgaggccttctcatgtttcctgactgccggtcccagccggcgaacatcctgcgggcgcggtatccacgttcccgggcgggtggagaggaagcgtccgcgcccgcccggccgcgggggctgctgttaacccctagcagaggagccgctgccggggagccccgggcccgccgagtcctccggagccgggcgcggctcccagatccgccggccttgcagtcgtggagcagacggggcttttcccttcgcactttaggagagaaattggagaagctgccgggagcgctcggctccggctccagaagctgagaggctgcggtgcaaatcccgtgtcttagctggcccgattgccggaaatttcactgcgcgtggctaggcgggagaggccactgtgacgcgccctgtattttcctctcgattagctggagggaagttagagctccgttttgcacctacagccctggagcgtattgcgggaagtgctagtgcccaggagcctcttttctgatgtcactgggcttctggggtcctagttgtctcagtcaaagccaggcacacattcacctccggggcaagggctggtgaggctgccctcgccgctgggtatagggatgggggaaagcaaggatgggatgagttcagcccaggtggccaacccgcggtggcccaagtgcagaagaggaagcgcgcccaaagccaaggatctgcacgcagcaaaggagatggaacttagaagaatcacaagctgggacacagggcaaagagagagaatggctaccagattctctgattgatgatactttgcttcctaacattaccgcaaatataagtagcgaaagcggcggtttaggtgcaactgcaagctcagagcttctggcagcccagaagatccccaaggtgccaacacgaagctgcctgcgctctcgccgaaggccctgtggtcctagcgaactttcgccctttttaaagaacaaacttagatttccccccaccaagcttaaagaaatagcgccatttgtccttttcccctctaaatgcggctggccagagccggggcagtggcccaccttagcatcttcttcgtgtgtgtgtgtgtgtgtgcgcgtgtgtgtgtgtgtgtttgtgtgttgggggggtcgctagaagtgcttaaaatatataccaaaactattattttaaagactaatcacaccctcaaatttcatatgtgtcacctcccaaattacgcgatagcaaaccgttgtgcaggggtacaatgtaaaccataaaggaaggccggtttacatttttgcgcaccaggaagatacaaagtatcattggagcacgttctgatgtcctcggttctcttttgttatataacttgctgttgcagcgcttgcatcttgtctttggcgctgcccttgtggtgtgagttcagtacaggcttctggtctacagacctcgctgtaggagcttaaagacaggggtaaatcctaaggtttcagccatcaattttcagctaacaaatttcaccacagaagcagatctaattgataattcataggacaaaagagccaccttctcttttatggtctctatcagtggtgttagtcaccgggaattgtaatgaaattagctctaacatacccctgaaacattttttggtcagctgtcccaggtaaagcaataggcatcatacagttacttgcaatttcccagtattctactaactttttgagctatatgctatagtacatgttagtataggacaaatgaattttgttgttttagtacttaactatatttactcaatttaaaaatgcatttagagcgcttttaagatatacttacatgtaatatttgttttcttaaagtctgaaatgaaatatacagcaaaaatcttaatgcaaaaatacttttcatttgatataggaataaaatacatttgagtaagcctcaactcactaaaaaattaacatatggtaatt

SEQ ID NO: 913853 - DNA, 4001 bp, Homo sapiens
gctgtaatagcaccctgcatgccagcctgagccacaaagtgagaccctgtctcaaaaaaacagaatttgtaaaatgtgtctcactataaatgctctatccgtcaaaaaacacagcataggtgtccaaaacacagcatcattgcccaaaaactttattcaggtgtacttctaggaaggaaaatttaagatttgaataaaaattttctatattgggacatagaaattatcaaattttgatagtttatcatccaattcataagaaattccaattcataagaaattcattggccttcaaaatgccaatgaacatgggatgaccttaaaatcagtatctggtttgacacgcattgtattcactccctaaaaaagcaagacatgcaacttggctcttctttaaaagtctagggccaggcgcagtggctgacgccggtaatcccagcactttgggaggccgaggcaagaggatcacctgaggtcaggaatttgagaccagcctggccaacatggcgaaaccccgtctctactaaaaaatacaaattagccggtgtgctagggtgtgcttgttatcccagctactcaagaagctgaggcaggagaatcaatcgcttgaacccaggaggcagaggttgcagtaagctgagatggcaccactgcactacagcctgggtgacagagcaagactccgtctcaacaaaataaaaagtaaaaaaataaaagtctgggaataaacagcattctcagagtaagtacactacctcagaatcatcaccactgcttctaaagtctccctttccaagtgtgacattcgtttctctacaaaatgcactttagcagatgttcaaattttcgtctcccttttggtggtagtcctttccaacagactactaaaaacatatgcatcgcttaatgccagattcagaaatgcgaagggacatggagccaccaaaaaagaatatagactgttttgtcctggattccttaccacgtgaaatggggaaaagtcggccacttcaaaggccagaaaagtatcttactagtgtcctcggccttcttgtatatccaaaaacctcatcaattgttaacaaccagaaataaactaagaggctccccaaaagtgacttggcaccgccacctcttcagccacctaggctggtggtggcctgccgcggccaccccacaggcgctgcagcagccccgccactcccgcatggtcagcaacggactccgccatctcctccgcagacagctaccgggcggcggcggcagggcccgagccttctggctcggggtgcaacgggccccgcatccctccccatctaaagaggcaaggcgacccccagcctccccacactggcgccgcgttcccgagcccgtctccacgccacaggaagtctccaaacactgcggcagacaggcggctgcaggccaggggagaagagggcgctccactctcccaaacccacccccgtggccccgggaaccccgggaagggcgcgcaccgcccccgcccccgcccccgcccccaccccggcccagatctcgagggcgcggccgccgccctgccccgccccgccccgccgagtcagcagaccccggccccaggcgcaggcggcggccgaatgacacttgagagagtgagagcggaatcacatgacagtccgggccacacgcactttctcccacatgcgcggcccacaccccccgcgccccgccgcggaccctccgcgtccctcccgcggccgcggcacggggcgggggcgccggcggttgcggcccaggtgggggcggcggtgaccgttgggcgcaggccggcgcgccccggcgggcggttgggtgtttaccttgatgcaccgcgacgctgcagccgtgcccgtcgcaataaaccagcgggttctcggcccagcctctctcgtctgagcaaacgcaacagcctccaatcatctccttcatactatgggagacctcgtcctccagtgacacgggccggtcgctagagaccatctaagagggagttggggggaccattaaaaaacacatgcaagccgattagtgcttcccccccacacagccccccgagcccgccccggcgccccccgcccggcccggcagcccaccgctcgctcactcgggctttgccgctcagtcactcacgttccgcacaggagtcaggagccatgtccttgctgattccccccacctcccctccaccgcctcctccgcctcctcctcctcctcagcgtcttccctccccacctccacccggccgctaacgcgggcgcccggagagggcacacataatcaagagggcctccgcacaggcgcactggggggagggggggctcccgctgggccaggggcagcgagggaggggaagggggctgcgcttcctcctcggagcgtcacttggcgtgcgcgcccgtcctgcggccggcgtgagggaggaggcctgggcgaggctagccctgcgtgcgcgctgccgcggcctgttggctgcccccggcctacctccggggccccgtccccctcccccgcgccgctcgccgccgccgaggtgtgctgggggtgggcgcgaggggagccggcggcgcgcggaggccggaatgaacgggcgcgggggcgcgcacgcgggggcggggacgttagggccgccctctgcagcgctggtggcgcgggccgcgtgtgagcgtcgggaagaggcctgggaggtggcgggggaggtggacgcccagggctgggaaggggttttctcagaatcgccagaggggagtccccgggggcatcatctccgtgccctgggaacctacctgctggccttttcctccaagactggcccgtggaaaacgagggtggggcgagtgtgccagcttccatgaagggtgtaatgaagcatggcttcctgcagttggccgcgctaacttcacagtgctgccgcagccactccacccattaaattcacgtcctggactcttcccaaagttcacccgctggaagtcctaccaaatctgccgcccattttcgcactacgtgggccccaatgacaaacgaaagtgtattccaggctgaaggtcaaaagcctgtgttagggctgcactcggagagggaacgccaaggcgcccctcagctcggtgtgcaggacaaatggtggtttatccggaattagcaatataatacgatgatccggaaaatgcagttgtattacaccaaaaggaagaaggaactctagccctcctagtcagtcgctaaaacataattaacgccatcagacagtggcgtccagttttgatggaggattcctctgatccgggtcttttctccaaatttatacttggaaatgtgaggtcatttaaaagtggcagaaagatgagagctcccacctcacaaacaaatggaaaatggattaggcctatctgcatagattaattagctggatgctgagcacttttaaactaaaatcttccactgtctgcctattccttatgcatccgtaaagcccaatattgatgtttaagcaaaaaatgtctaattagaaaagtttcgcatgaaatcagaattatgcatagattgtttaaatgacaagcccagttaaaaggcgaattcatgacttttgattaataccttgcaggtacaaaatggttctttatcagcaattcgcattataaatgtgctgatctggaagatgcactttcacagtgctaaagcatagagaacccaagttctcctagtcggtcgccaaaagataatataatggtttgggctttaaaagccttctaaatgttcttctgataaaggggggttagaaaaggtatcatggctgtttttctatttcaaattaattgctagaaatctgtgtaagagtgataataggtatacagcacaatgagagcatatatagcaaattcagatgttttaaaagctgagatatacaaagtaatggcaattaaaatatacactaaaacaatgagaattcacatagtgcatttagaaaaggtgactacaagact

SEQ ID NO: 913854 - DNA, 4001 bp, Homo sapiens
ggtcaggaatttgagaccagcctggccaacatggcgaaaccccgtctctactaaaaaatacaaattagccggtgtgctagggtgtgcttgttatcccagctactcaagaagctgaggcaggagaatcaatcgcttgaacccaggaggcagaggttgcagtaagctgagatggcaccactgcactacagcctgggtgacagagcaagactccgtctcaacaaaataaaaagtaaaaaaataaaagtctgggaataaacagcattctcagagtaagtacactacctcagaatcatcaccactgcttctaaagtctccctttccaagtgtgacattcgtttctctacaaaatgcactttagcagatgttcaaattttcgtctcccttttggtggtagtcctttccaacagactactaaaaacatatgcatcgcttaatgccagattcagaaatgcgaagggacatggagccaccaaaaaagaatatagactgttttgtcctggattccttaccacgtgaaatggggaaaagtcggccacttcaaaggccagaaaagtatcttactagtgtcctcggccttcttgtatatccaaaaacctcatcaattgttaacaaccagaaataaactaagaggctccccaaaagtgacttggcaccgccacctcttcagccacctaggctggtggtggcctgccgcggccaccccacaggcgctgcagcagccccgccactcccgcatggtcagcaacggactccgccatctcctccgcagacagctaccgggcggcggcggcagggcccgagccttctggctcggggtgcaacgggccccgcatccctccccatctaaagaggcaaggcgacccccagcctccccacactggcgccgcgttcccgagcccgtctccacgccacaggaagtctccaaacactgcggcagacaggcggctgcaggccaggggagaagagggcgctccactctcccaaacccacccccgtggccccgggaaccccgggaagggcgcgcaccgcccccgcccccgcccccgcccccaccccggcccagatctcgagggcgcggccgccgccctgccccgccccgccccgccgagtcagcagaccccggccccaggcgcaggcggcggccgaatgacacttgagagagtgagagcggaatcacatgacagtccgggccacacgcactttctcccacatgcgcggcccacaccccccgcgccccgccgcggaccctccgcgtccctcccgcggccgcggcacggggcgggggcgccggcggttgcggcccaggtgggggcggcggtgaccgttgggcgcaggccggcgcgccccggcgggcggttgggtgtttaccttgatgcaccgcgacgctgcagccgtgcccgtcgcaataaaccagcgggttctcggcccagcctctctcgtctgagcaaacgcaacagcctccaatcatctccttcatactatgggagacctcgtcctccagtgacacgggccggtcgctagagaccatctaagagggagttggggggaccattaaaaaacacatgcaagccgattagtgcttcccccccacacagccccccgagcccgccccggcgccccccgcccggcccggcagcccaccgctcgctcactcgggctttgccgctcagtcactcacgttccgcacaggagtcaggagccatgtccttgctgattccccccacctcccctccaccgcctcctccgcctcctcctcctcctcagcgtcttccctccccacctccacccggccgctaacgcgggcgcccggagagggcacacataatcaagagggcctccgcacaggcgcactggggggagggggggctcccgctgggccaggggcagcgagggaggggaagggggctgcgcttcctcctcggagcgtcacttggcgtgcgcgcccgtcctgcggccggcgtgagggaggaggcctgggcgaggctagccctgcgtgcgcgctgccgcggcctgttggctgcccccggcctacctccggggccccgtccccctcccccgcgccgctcgccgccgccgaggtgtgctgggggtgggcgcgaggggagccggcggcgcgcggaggccggaatgaacgggcgcgggggcgcgcacgcgggggcggggacgttagggccgccctctgcagcgctggtggcgcgggccgcgtgtgagcgtcgggaagaggcctgggaggtggcgggggaggtggacgcccagggctgggaaggggttttctcagaatcgccagaggggagtccccgggggcatcatctccgtgccctgggaacctacctgctggccttttcctccaagactggcccgtggaaaacgagggtggggcgagtgtgccagcttccatgaagggtgtaatgaagcatggcttcctgcagttggccgcgctaacttcacagtgctgccgcagccactccacccattaaattcacgtcctggactcttcccaaagttcacccgctggaagtcctaccaaatctgccgcccattttcgcactacgtgggccccaatgacaaacgaaagtgtattccaggctgaaggtcaaaagcctgtgttagggctgcactcggagagggaacgccaaggcgcccctcagctcggtgtgcaggacaaatggtggtttatccggaattagcaatataatacgatgatccggaaaatgcagttgtattacaccaaaaggaagaaggaactctagccctcctagtcagtcgctaaaacataattaacgccatcagacagtggcgtccagttttgatggaggattcctctgatccgggtcttttctccaaatttatacttggaaatgtgaggtcatttaaaagtggcagaaagatgagagctcccacctcacaaacaaatggaaaatggattaggcctatctgcatagattaattagctggatgctgagcacttttaaactaaaatcttccactgtctgcctattccttatgcatccgtaaagcccaatattgatgtttaagcaaaaaatgtctaattagaaaagtttcgcatgaaatcagaattatgcatagattgtttaaatgacaagcccagttaaaaggcgaattcatgacttttgattaataccttgcaggtacaaaatggttctttatcagcaattcgcattataaatgtgctgatctggaagatgcactttcacagtgctaaagcatagagaacccaagttctcctagtcggtcgccaaaagataatataatggtttgggctttaaaagccttctaaatgttcttctgataaaggggggttagaaaaggtatcatggctgtttttctatttcaaattaattgctagaaatctgtgtaagagtgataataggtatacagcacaatgagagcatatatagcaaattcagatgttttaaaagctgagatatacaaagtaatggcaattaaaatatacactaaaacaatgagaattcacatagtgcatttagaaaaggtgactacaagactacataatatgaattcttttttgggatgtgacaacaattaatacatttctggatatataataattatattttttaactaccttaaaaatttatgaaactaaaacgggcttcaaacaaaactatactgtcttgtgtatcttaaccatatattttatcttcacccttatacaaaggataccagctcaatatccaagtcctgttcagactcttactatagagcaattctgagttaaaaatcagtgtgaaacttcccctcccaaacactgcagccaagccttaatgcattaaattatttaaaaacacatttgttttatttttaatgcattggagcttagttcttgtgaaggaattaatttgtatgtaaagaaggatgggtaccttgccctattctttaacacttaaaacaaatgtaagtaaacacttgctatttcctaaacaaaacaaaaaaaatgtatcatttgtaagaggtttcag

SEQ ID NO: 913855 - DNA, 4001 bp, Homo sapiens
tgctcttacctctcccaaagcccagcttgatgtcgaccgcggccccgggggcggccaggtcctcgcggaagtccagcggcgtcacctcgctccacatcctgaaggccagcgccacaatgcgccgctggtcggccacggacagttggctgctcagggcctcgcccagcagccgccagctcagcgtcctcttggagaaggcctgggcagctccgccgtcggggtagccccggggctgccaaccccgccgggacaaggacagcggcgcccgcggggagcgcctggagcgggctctggggggcgggcccgggggcgaaggcggggcggaggggggcggtgggcgcatgtccgggaccccgcagcgcggccggttcatggccgctagggtggccgcgtccagctccccgctggccggcagcgcgttcgcccgctggaacctgcgcaccgcctcggccagggcggcgcccttgggggtctccggcggcccctcgggactgggcccccaggccgcccacacccctgaccagccgtatctggacaggaaccgctgtgggagagaaaggcaccctaatctgggccgcctcgctcggggccctcccgggctgccctgccccaaagtctagagagacagagacatggggatagagacagagacagagagaagcagagagacagacagggagaaacagatggagatagcaatagaaacaggaagacagagagagatagagatacagagagagcggcagtgagagacagagacaggagagaggtagacaggagagaaggagcgagtcctgggcgccttcctgagtgcgggccctggatgggcaccaggctgagtcagaggcgccctagggccggaggagcaggagacctgggcagcggggtgggcgagtgccgggaggaggtaagaggtcgcgggggaggaagacgctccccccggccttgcggggcaggtcgcgcagggcaggtcgtgcggggcaggtggggggtgccaaggaagtccgggcgtggccacaccgcagagaaagccatgggaggcacgtcctgagagctgggaattggaactgaggggcttggcagtggttgggtctgaggacctggggggcttcctcatggccgcacagcgggagggaggtcagcggcctccacgcggctgcgggcctggccacagggcggctctcctgctccctgccctggcctctggggcactgtgggagctggggattggacttgaccctgagcatcagctcctggcctatggtgaccaaaggaccacgtgccagagcaggtgaaggggcctcatgggtccactccctgcccgccaccacgactctctggaggaggggatcgcctgcattggacctcctgggtgcttcaccacagactccggtgaagtccacggatgccaccccagacagctgttaggatccttactattgcggtgttggggaaccttgcagggctgtccccttctctacatccagagattggcatggtgagcagccacagaatgccttcggacagtgccttggccactacagtatcacatgcttgcctttggaaaggcacttggcatttgagtctgttgtctgcgcactgacatttctttctcactagggctgacctgtgggattgtcgaatcaggttaagcatcgattcatggttgttccaataggagccacaggagccactcctccctctcagcccagcctgcctggcccttctctgcctctgcacagccggcatcctggcctgtgcctgtgcgcgcgtgcgcatgtgcctgtgtgcacgtgcacgggcctgggggtattgctgttcttccagcttcctcctacctgagcagcgtggaggtcggcaatgggcttggcctggcgcagtggggacggctccaggtccgagcggtcccggctgtggaagagactctcgggctgggtgggccagggagcagccagccagcagagcagcagtgtcggacggaagatggaggcggcgagcattggcctggtctgaacccttgccctccctgcctggcttcttccccgtccccgtcacctctccttaaggagcaggacctagggtggcttttataagctacgcaggagggagcacccaggtttccaagcatttctcacccagccctgaagtgtgcccgctaggaggccacgtggcaggccctgggcgtgctgcctttgaagaccccaggctcacctttcttgttggtgtgagaactccttctctcagcctccagagtttgccatgtcctccgataattacatcctccagttgccagtgcctgtgggttccatttctatggagatatactgcgggcaagtttgccgctaaatgagctgtggaattaacagaggcacgagactgcgcccctaacaacatgcctctcagagctgagcctgagtttaaaaaccctgaccgttagtttgcttacagtttgggtcactttttttttcttggtgaactggggtttggagatttttagtttgtttctcacacattttttgtgtggcttttcttctttttgtttatctttatataaaggagatcttctgagcagatagtataaattgtaaaagtactgagaatgaaggagacattctgtgattccggtggtgacatttcagtgaacattcttgcagatacatatgcacagatgcctagagaagtatttgtgtgtgtctctcattttacatgaactctattctctgttcttacaagccagcacaacgttacaggcacttttctgtttctgaatgtaagtatttatcgttctagttaatgactgcacagcgtcccattctgtgggtaaagatttttatagaaggataaactagaatcacctcagcccactactttttcccctcatggagaagcctcaagtttctttgggatcctgaagacagagcccctgaactgggcttttatctgagcagatgtcctcctgagagtgcagactgactgggtcacagccgtccatgggaatattgagaatcatagaaatacggagaggccaggtgcagtggctcagacccataatcccagcgttgcgggaggctgaggcaggaggactgaggccaggagtttgagacaagcaagggcaacaaaatgagacctcatttctatcaaaaaatgtttaaaaattagcttggcatcggccgggcgtggtggctcacacctataatcccaacactttaggaaaccaaggtgggtggattgcttgaatccaggagttcaagaccagcaagagttcaagaccagcctgggcaacatgatgaaaccccatctctactaaaaatacaaaaattagccaggtgtagtggcatgcgtgccaatagttccagctacttaggggagctgaggctggaggatcacttgtgtccaggaggttaagactgaaatgagccgagatcacgtcactgcacaacaacttggatgacagaatgagaccctgtttcaaaaggaaaaaaaaagtggatagagtgatgtgtgccacttgcaggcctgaactctaagaccaccctcctattctctgtgatttctcttccctcaactcctgaccagacgcagagcctccagcagaagtggcttggatccctgaatccccctgtggaaggccaccctcaaacccttgactgctctgtgacaggagcaagaaacacaactgtattgcgtggagcctaagatttggggttggtgggtgcagcagttagacaaccctaatacaggccactaaatgcttagtctgtccccagaaggacctgtaacatgctcctcattccctaacacctgtctccagtagagactacagcttgccctttcctccctggtgaaggctgcacaggtcaaagagcaggatgggttttcctgtccctgatggctgcctccactcagggaagtgccctgctcctgtgagcctcatgacagttttctgggtcacttccagccttcctagtagctgtcctctccccaagacgcattcgcccctt

SEQ ID NO: 913856 - DNA, 4001 bp, Homo sapiens
ggtcacaggagcaagggaagtaatcagcccaggaagccgcgcgtttccttcctttctcaccagcccatccgggtttggtgagagagcatggacttgccctgtggagactgcagcttctggatgtgggaaggagagccctgcaggcagggggcttccaggcttgggacacctgggcattcctgggccaggtacatgcaccctcccactcagaaccccagagaaggactgcggggcccctgcagggctgcccatcagcagttcccaaaccctcactccttggggctaagggagcaatgtctctcccacaaccaagggggtggggaggaagaggagcagctccctcctccctcccgtccaccgggtcctctcatcctccctttcatcaaaaggcggaaggtggcctgagactaaggcgtggagcttccttggtcctgaaatcagagcggagtggctggatccagcccgcccctcccccgccccctgctccccttgccgccccaccaccgagaatcacctgcacctcccagccctgagcagagttgggggcaggcgggaatgaggtttctccatggccaactgctcagccactgttccccacgccactgccaccagaccctcactaaggggcctcttgcccctccctggtcaaatctgttttcaggaaagcacccaacaaacctgcaactcagaagccaaatgagacctatcccaggcaggtccgctctgcgatggtggctctcatacaccgcacagaagtgtaagttggcccccccctcactccctaaatccatgtagatgcccttagccaaacaggtctggtgtgtgggggcaggagggtggaggtaggagcatctgggggctggggctggctccaagtgctgcagagagttcactatgagctctgaagtcaaactcagatcctgctccttagctgtgtggccttgggcaagcccctcagcctctctgagcctcaggctcctcctctgtaagtggggctgttggagggatgaactgagatacacgtggcaaggtgcctggccctgagactgggggccccgtaaacagcacctgctgctctgactgaggggcagttggagatgaggggggacttacaggcccaacacctcatcagcaggatgggccctggctctgtacacatagaatgttggaaagctatgttctgggtccagttgcaagaccatcctgcccacttgctgggtcgctgaggcagagcgccctggactgtgctctggagagcagggggccgtctctgctcactgctgggcagtcagagtcaggtccccagggaactcagatcaaaatctcagggcagccttgctgggtctcagctttcagaattgatttctttggaagaacaggaggcatagccaggccagctggcaatggcttcagccacagtcccccagtgccccatgctgggtgattgatggtaggagctgtgcctccctgccagccccccaagccccattccctgccatggctccgacagggaactccctgcaattcttaggtggatcctgaaacacccagtccagactactttttcagcctcacagatggcccagagatagatactattagcccatttcacagatgggaccccagtgaggtctagagaggctctgctctagctgagctgggactcagatcctactccatgacctctgccaaggtccaggccctcttaccgtcctacggggtccttgccggtgtcctcagcctctgccttccagaccccaggtgtcctggagctctgcagatcagagaggctagtactggaagcctgggcccatgcccccagcagcccccagcccagggggcccccaaggctgaacagcaagctcaggatcatcttggtggtggggcaggctcagctcacactcagccttggcaagtagctccagaaactgctagtgacgttgtcttcaagttaaatctcaggaggaaaagaaaatacgaggacaacaaagagaggaagtggcctgggccggcctacccggtgggtcttgtcctgccccccaactaccctggctggccccacaggggccgccaaccacacaagccagttcctgtccctgaggacttggctcagggactctgggaatgtggtagacatggggtggccccaccaaatgcatccttatgggaacctgctccctgggagccatgaaaagagcgtggacttcgaggtggggccacaggaagtggtcaggtccatctcaggggacctgctgcccatccacactgctggccaggaaatggggggcaattcatgcctcctcagcaccttcagcactgggcggctcaaagaagggaagggactattctggggtcacacagcatgcagccagaggccaaggcatgaggaagtccttcatttccccacccccacccacctcagatcctccaaccggtttcatggcagcccagggtccagcggcatccaggatgctggtgggtagctgcacagcccaggccgcgggaggttggctgctctcacctaacaggcctatgtggccctgacccctacctaggaagctggggacaatggccaaggcgcctcccctctctgtgcctgtctgtccaggtgcagcatagacacagcacccctggggccaagagcacccagccagggctgcccccatgggtgggcagggcagtaaatgaatgagggacaggttgggaggtggccagccccctccagcccatggagggcacggggcaggagagctgggctgagccagcaggagcccagggagcctggtctctgccttcctatcctggaggaaggtgaggctgaacctccttccctccctccctccctccccgcccccactgcacgcagggctggctgggctccagctggcctccgcatcaatatttcatcggcgtcaataggaggcatcggggacagccgctgcggcagcactcgagccagctcaagcccgcagctcgcagggagatccagctccgtcctgcctgcagcagcacaaccctgcacacccaccatggatgtcttcaagaagggcttctccatcgccaaggagggcgtggtgggtgcggtggaaaagaccaagcagggggtgacggaagcagctgagaagaccaaggagggggtcatgtatgtgggtaagtggggcatggcagggtgggacagtgtggtggccaaagggtgagtgcccagttaccttcgccagaccttactccccagccccagggaggcattttgggagggggcgaggccctggctatcaaggtggggtctccagaccctggagcacccacaatgccctgtgcacacctatgtgtgtttgtctttggcctcctcggggcctctgggtgtcagagaccgcagacagggctggctacctgtctgtgcacgcacacacacattcccaagcataccagcctcccctgagcctggagcccctgaagccatgagcagcctgtgctcaggtggcccccaccctctccacacgggagcggctacagccaggtcacggatcccctccctccccagagagaaggggcaggctgggggatgaaacctaggctcagtgttccctcccccgcatcctctcctggcactctccagaggaggaaggggaggtcaagccaatgactcagctctggcccatcctgtcctgttgctgcttctgaggcccggccacacccgggcaggggctggaccctgggtctagccagtgtccctacctcaggcctgctctctcttgtcccccacattctgtcctgtccccttcccatccatccacttcttccagacacagcaggaagaggccctctgaaggggccgccggcccccagacaccatccttacccccccaccgaccccacagtttgtccagctgttctgttgtgtttgtcctgaccgcccccaacacctcgagggaggtctgggctgacagctccatttcctccccaggagccaagaccaaggagaatgttgtacagagcgtgac

SEQ ID NO: 913857 - DNA, 4001 bp, Homo sapiens
tgaatcaaaaaaaaatccaaaattattgttttcgtatcgcataaatgtgaaagactcatcacaaatgacactgatatagtaatgttctatatcttcgtagggggttggattgtataggtgtatgcattagtcaaaatcagtgaacgtacacttaaaggtttatatattccattttacatcaaaataaaccgtcaacaaactctagtcaatgacatgcatgccaaagtatttaaaggaaagtgtacaggtatctgcaatttaaatggatggatagctatatgataaagcaagtaatattaaaatgttaatggtaggatagatcctaagtgatgtgctccttataaaattctttatacttggctggatattcgaaaattttcataataaaatatgagggaaaatgacattggtaagacactgtacttgtaaattgtaaacactgataacacactacatttcataaaattgtaagatgttaagtttggtggcagcaccaggtatttgctccttgatgcttccaaactacgctgcacacacctcttacagaatggttgcctctcccagcatactataagttcctggtgggcacagatctaacctaatttgtatttatattcctattgctttgcatcatgtttggggaataatatgtattcaacaatagtggcatgattgaattaaagtggaatactgctaacgaacaaagtattatatttctagcagattcactattcttttcttacatattctaaaggttaatacgctcaatatccaagagaaatgtgtccttacttctctccaagcatacgaaatttccaaagtttttttaaaaaaactactcattagataattttatattgttacttaaacccaagatctgaaggcctcctaacattcaataactttttagtagttttttttttttcctagaagagcaaagtctcagaactccacggaagcctggaaatcgttttattctaattttagataagctgtctgaactaagagatctctgaactggtcaaaagcaggaaagtgggggtctgggaagaagacaaaaacaaacgccacataaaacgtcatggagcaaactaatcaagaactttagcaagaaacggagagaaagtcttaaggaggacacccagaacatctccagctcctcctggcccgtctcctcaactcctcttaattccagccagtcagagcgcggggccatctgccactcccaggatgccacgcgacgggagcggacgctgcgaggatgcacctccacacgtcaacctcccacaaacagcatggcttcgtggcgtgagcacccggttcggacctgaacgcctgggtccgagtcccacctccccctcctgcctggtctgcagccctgcgcaagtcctcttgccctcgctgagcctcagtttcctcatctgtaaaatgtaatgattccctataattggctacagggagatgagaagtgtaaatggttttaaggaagacacaggcaactctctaacttgttacggctctgaacctcgcggtgctcactaaccagccttgagaccaatctctcaaagtcaccccgctcctcccttcccgcccggcgcctgtactgaggccgctccctcctgttggcccccatgcggaaggcgcgcggcgccgtctgccgtacctgcagccacctggtcagcggggccctcttgctgacccacgacgaagtcgtgcacgaggccccatagggcacccataggcgccgccgcctccacagccgcggcagcggccataacgcgaactagagaccgtgggaggggatatgggcggtggctcgagacgggctctccgcgcatgcgcctcccgagccaatctccggggaagcgcaagggggcggggcgccggggtcacgtgcctgccggcttctgcctaggcagttccagggaggggcggggcctgaaatggggcggtggcaccgagagggaaggcggctgctgggcacgcagccggaggcgattgagggcgaataattcccagcccggctccccgggagacgggctgcggggcgggcacctggctgggtggggagaggggcggtacgcaccacgggggaagccaatgagaaaatcaggcccagccctagggggcggtgctgtcggtcacatgcgcacctggggcgggtggtggcggcggcgcgggcaccgcgagccggcggaagggagaggggccggcctggggcggggttaggcaggtgagtgacaggctccagggggccggcccctgcctggtgccccgagcgagccgggagtagctgcggcggtgcccgccccctctctccgcccctccagcggagctggtctccggccgggcaccgtcgcgggcccccctggcccggccacctgggaccgtgctggggagtctgccacttccctctctcccctggcccgcaaagttttggcggagccatcgctggggctgagcgcgcccccggggggagatcggggagcgcccgatgccgggcggccggagccattgacccgggacgccgccgtccgctgagcagccgaccaccccgccgcctccggtgcatggggactggctgaggagccagcatgggcaactgcgtggggagacagcgccgggagaggccggcagccccgggacacccccgcaagcgagcaggtaacgatggggaagggagcagggcctcgggcatcccgccagttgtccccctcctcgcccgagtcctgggcttaccgatggactccccactggtgctggcgcttgggtttccccgatgggctgctccgcagccagagggggccgctccccagcgccgggcggccgggggagctgagttggggcaactgcgagcactgagccggctgcgcgaccaactctctccaactgggtagctcctggtgggggtgggggcaggaaatgtttgcagaccgcagcggggccgacggatcgggaggaggccgggggcgagggcgccgctggcctggcagctccggccggggtcggacgccggcccgtcggggcacggcgcgggcagccaggcgtccccagaactcggagcgagcgaggcgagaacagtcgctccttccaaagactgtgtcattatcgagctgcagatcgtgtctgcgggaatccgacttgcaaagcagcgcaggactctgggaaagaaatctttatttttcccgcaggggtttttagagcctctcggccgtctgggagtctataaaagatggggtgcggggtgagagtcacccttgggattgttgggatccttcccagctttgggagtgagatcgctcgctggtgatcctccaggcccgcgcaacgctttctcactttcatggtacaccccgcctgccctggcatttcgccccgggaagaggtctgtcggtcatttttctgggtcttacactcacttccttctttgagggtgttgcaaggacccgctgggaataatatcgtagacttgagagctcaaacttgtctggattccagatggacccatctcctactctgtgtcaaagcccagatcctgagaggttgaacaccttgtccaaagtcacacagctagttaggagctcacctggggctagaactcagcctcctctcccaccccattgccacatatccccttatgtaagaggagccacaggcagagttgttaatgaagtggaaactctagttggagtttcctgtctcccttgacaccgaaggtgtgttgcttgggttgcggaaactgggaaggaagatgggggaaccaggggaagcagggaaggatgtctgcatggtggacaggatgacttgtggaggcagaaatgtgtttttatgggaaggatgcagtaaaacttattgaaattctcttgtctgaaggtaactctggccattcttctggctgaggagagatgactctcaaaaccaagggctggcttgctttcattcattcatttgttcaacaaatatgtgttcaggccccataattgattttgcagcattttttg

SEQ ID NO: 913858 - DNA, 4001 bp, Homo sapiens
aaaccgtcaacaaactctagtcaatgacatgcatgccaaagtatttaaaggaaagtgtacaggtatctgcaatttaaatggatggatagctatatgataaagcaagtaatattaaaatgttaatggtaggatagatcctaagtgatgtgctccttataaaattctttatacttggctggatattcgaaaattttcataataaaatatgagggaaaatgacattggtaagacactgtacttgtaaattgtaaacactgataacacactacatttcataaaattgtaagatgttaagtttggtggcagcaccaggtatttgctccttgatgcttccaaactacgctgcacacacctcttacagaatggttgcctctcccagcatactataagttcctggtgggcacagatctaacctaatttgtatttatattcctattgctttgcatcatgtttggggaataatatgtattcaacaatagtggcatgattgaattaaagtggaatactgctaacgaacaaagtattatatttctagcagattcactattcttttcttacatattctaaaggttaatacgctcaatatccaagagaaatgtgtccttacttctctccaagcatacgaaatttccaaagtttttttaaaaaaactactcattagataattttatattgttacttaaacccaagatctgaaggcctcctaacattcaataactttttagtagttttttttttttcctagaagagcaaagtctcagaactccacggaagcctggaaatcgttttattctaattttagataagctgtctgaactaagagatctctgaactggtcaaaagcaggaaagtgggggtctgggaagaagacaaaaacaaacgccacataaaacgtcatggagcaaactaatcaagaactttagcaagaaacggagagaaagtcttaaggaggacacccagaacatctccagctcctcctggcccgtctcctcaactcctcttaattccagccagtcagagcgcggggccatctgccactcccaggatgccacgcgacgggagcggacgctgcgaggatgcacctccacacgtcaacctcccacaaacagcatggcttcgtggcgtgagcacccggttcggacctgaacgcctgggtccgagtcccacctccccctcctgcctggtctgcagccctgcgcaagtcctcttgccctcgctgagcctcagtttcctcatctgtaaaatgtaatgattccctataattggctacagggagatgagaagtgtaaatggttttaaggaagacacaggcaactctctaacttgttacggctctgaacctcgcggtgctcactaaccagccttgagaccaatctctcaaagtcaccccgctcctcccttcccgcccggcgcctgtactgaggccgctccctcctgttggcccccatgcggaaggcgcgcggcgccgtctgccgtacctgcagccacctggtcagcggggccctcttgctgacccacgacgaagtcgtgcacgaggccccatagggcacccataggcgccgccgcctccacagccgcggcagcggccataacgcgaactagagaccgtgggaggggatatgggcggtggctcgagacgggctctccgcgcatgcgcctcccgagccaatctccggggaagcgcaagggggcggggcgccggggtcacgtgcctgccggcttctgcctaggcagttccagggaggggcggggcctgaaatggggcggtggcaccgagagggaaggcggctgctgggcacgcagccggaggcgattgagggcgaataattcccagcccggctccccgggagacgggctgcggggcgggcacctggctgggtggggagaggggcggtacgcaccacgggggaagccaatgagaaaatcaggcccagccctagggggcggtgctgtcggtcacatgcgcacctggggcgggtggtggcggcggcgcgggcaccgcgagccggcggaagggagaggggccggcctggggcggggttaggcaggtgagtgacaggctccagggggccggcccctgcctggtgccccgagcgagccgggagtagctgcggcggtgcccgccccctctctccgcccctccagcggagctggtctccggccgggcaccgtcgcgggcccccctggcccggccacctgggaccgtgctggggagtctgccacttccctctctcccctggcccgcaaagttttggcggagccatcgctggggctgagcgcgcccccggggggagatcggggagcgcccgatgccgggcggccggagccattgacccgggacgccgccgtccgctgagcagccgaccaccccgccgcctccggtgcatggggactggctgaggagccagcatgggcaactgcgtggggagacagcgccgggagaggccggcagccccgggacacccccgcaagcgagcaggtaacgatggggaagggagcagggcctcgggcatcccgccagttgtccccctcctcgcccgagtcctgggcttaccgatggactccccactggtgctggcgcttgggtttccccgatgggctgctccgcagccagagggggccgctccccagcgccgggcggccgggggagctgagttggggcaactgcgagcactgagccggctgcgcgaccaactctctccaactgggtagctcctggtgggggtgggggcaggaaatgtttgcagaccgcagcggggccgacggatcgggaggaggccgggggcgagggcgccgctggcctggcagctccggccggggtcggacgccggcccgtcggggcacggcgcgggcagccaggcgtccccagaactcggagcgagcgaggcgagaacagtcgctccttccaaagactgtgtcattatcgagctgcagatcgtgtctgcgggaatccgacttgcaaagcagcgcaggactctgggaaagaaatctttatttttcccgcaggggtttttagagcctctcggccgtctgggagtctataaaagatggggtgcggggtgagagtcacccttgggattgttgggatccttcccagctttgggagtgagatcgctcgctggtgatcctccaggcccgcgcaacgctttctcactttcatggtacaccccgcctgccctggcatttcgccccgggaagaggtctgtcggtcatttttctgggtcttacactcacttccttctttgagggtgttgcaaggacccgctgggaataatatcgtagacttgagagctcaaacttgtctggattccagatggacccatctcctactctgtgtcaaagcccagatcctgagaggttgaacaccttgtccaaagtcacacagctagttaggagctcacctggggctagaactcagcctcctctcccaccccattgccacatatccccttatgtaagaggagccacaggcagagttgttaatgaagtggaaactctagttggagtttcctgtctcccttgacaccgaaggtgtgttgcttgggttgcggaaactgggaaggaagatgggggaaccaggggaagcagggaaggatgtctgcatggtggacaggatgacttgtggaggcagaaatgtgtttttatgggaaggatgcagtaaaacttattgaaattctcttgtctgaaggtaactctggccattcttctggctgaggagagatgactctcaaaaccaagggctggcttgctttcattcattcatttgttcaacaaatatgtgttcaggccccataattgattttgcagcattttttgctgttgacaactctctcctacgagacattcccccccttcctttcttggcatcagactgtcttggttttcctttctgaacacccctttccaccatcaccttctagcttgggggcacgctggtgcttaagtttgacattctgttttttctctcattacactctctcccagagaaatcttgttcagtc

SEQ ID NO: 913859 - DNA, 4001 bp, Homo sapiens
tgaacaaagattagccttgttaggaacctagaacaaaaagtcaaataatactccccttttttttttttttttttttttttgagacggagtcttgctctgtcccccatgctggagtgcagtggcaggatcttggctcactgcaaccgccgcctcccaggttcaagcaattctcctgcctcagcctcctgggtagttgggattacaggcacgtgccaccatgcttggctaatttttgtatttttagtagagacgaggtttcaccatcttggccaagctagttttgaactcctgacttcgtgatccacccgcctcggcctcccaaagtgttgggattacaggcgtgagccaccgcgcccggcctaaatatttttttttaagtgttttaaaaggagctcgaaataactgtttttcattataagtctaacctcctctttcctcatgtgaaaagtaaagaaatgtatcgttgctatatgaagggttcgtttagggaagactgtgggatggttagattgaagaaagtgggaagaaaatactggcgccaaaaagatttttttttttttttatttaaaggcgatgatgacctgggggtgattgggactagggagtaatactgccagaatactatcctatttcacgggaaagggaatgccagggctggactccgatatagcagttattcctgctggtacctaagcagttcagagatgctagaatgcagggataccacccatcaactaaatgaagcatcccattccccaggcttccatatgtgggagttctctccaccagtgagataaaggcgggctcagggaaaacaaagccctagaccacaacaaggcaacaccttctcgcaccccattttcaccttccaggcgcgttccttcctgctatccgggcccgctctcccgcccggcagggtctaacgctcacacaggtctgccaattcccctgatgcaaccctccaccctctgctcgctaaccccagtccagtcagctctcccgggcctcgacccccgcggtggagactaaagggttcaggtttgggtcccccacaggcaaccgccctcaggtcagcgtatccgaggtggagccgcgcccccgagccgggtcatctcgtgctccgttcctcagtgcccacctgaccgatcacactctttcccggccccctccctcctgcgcctccagccaacctggggccggcctttcgggatgaccgtcacgcctggacgcagggttccagcgcctcggacttttcctctgatgggctcccggctgccaccttgctctccgccacctccaccagcgattgccccacttgacgccgccatcctgggcgaccgcactgggtacaattcccgctgcccattggctgttacctaggcaaccgggagcaacgccactccgcattggcccagcccggctccacgccatctttgtgcggggccgagtgtttgcgaacccgggctgactatgtgaaagaggggtggtcccacctctgcaacgcagataaagacagaggatccagatctggcctacccagaggccgtctagttgaaatggcaaccccaaagaaaaccaaacctgcgcccgaagcaacagtgaccatcaacgcgagcggctctgatcttgctccagtccccactgctgtcaagggccccgccgcggagtttaaggcagatcctaaatccagcttcagagaggcagctttgtaaattgtaacgcgctaggcaggatagcctccaataactctgtgctagacattgtgatatcaagacacttttgcattcattataggaatttgtgctgtccttgtcattatctagatcctttttgtttaaaatatagtacctggccaggcgcagtggctcacatctgtaatcccagcacttcgggaggccgcggcttgagctcaggagtgcgggaggcttgagcccaagagttctagatcagcctgggcaacgcagggagactccgtatctacagaagaaaaaaattacccagcctagtggtgggtgcctgtagtcacagctactcaggaggctgaggtgggaggatcccttgagcccaggaggttgaggctgcaataagccatgattctgccactgtaccccagcctgggcgacctagcaagaccctgtctcaaataaataaattgcaaaccaaaaagtatctgagacaggtctcaatcaatttaggagtttattttgccaatgttaaggacatgcccgtgacacagccttagaaggtcctaagaatgtgtgtccaaaatagtcgggacaccacttgattttatacattttagggagacgtaagacatcaatcaatacatgtaaaatatacattggcttggtcccgaaagtgggggtgggggtggcaagttccaggatgtaggtggattcaaagatgtcctgattgacaattggttgaaagagtttaaagacctggaacccacagaagggaatgtctgggttaagttaaggaattgttactaagatatgcacgcacacacacacacacacacacacacacacacacacaaggaattgtggaaatcaaggtttttattatgcagagaaggctacaggtagcaggctccagagagcatagattgtaaatgtttctttatttttttttttgttttgagacagggtctccctctgtcacccagtctggagtgcagtagctggatcacggcttactgcagccttgacctcccaggctcaagttatcctcccacctcagcctcctaagtagctgagactactggttcattccactatgcctggcttatttttgtattttttgtagagatggtgttttgtcatgttgcccaggctggtattgaactcctgggctcaagtgatcctcccatctctgcctcccaaagtgctaggattacacgtgtgagccaccaaggctggccagtgtttattatcagatttagaaaggtatcagactcttagttagttctcccctggatcaggaaaaagacctggaaagggaaggggattttctacagaatgtagattttcaccataaaagacacctttgcctgctatcatgacagatggggcctgctatctgtcaatgttggtatcattgctacaaagagtctgctgtgtcaaccttaagatctctgctttaatgttaaatgctggtcctgaattccaaaagcaggagaaaataatgaggcatgtctgactcccacttctcatcatggcctcaaatagtttttcaggttaatttaggaatgcccttggcccagaagaggaggccattcatttgattggggggcttataattttatttctggttcactagataaataaataaataaataaaatatagtgccaagattggagcaaatcttcccaaataccactcacatcaatctgtgtatccatatgtttatttcttaaacaatgtgagtacagcatgatgctaggttctgtcaggcttgaaaagccatgattgttactcttatggcctttataattagctgagtgtggtgacaagtgcctgtggtgccagcactcgggaggttaaggcaagagaactgcttgagcctggttaacagagaccctgtctcaaaacataaataaataaataaataaataaataaataaataaataaataaataaaatgtagtttcttggccaggggaatgacacactacaagcagtattttatgaaaattaatctgacagtgacactcagagatgaccagtgagagattggaagcaaagtaacaaactcagaagttattgtaataatgcaactaacacatcctggaagtttcatgtagcatcagtggagatgaaagaaagggggtaaatatgagacatatttcatagggatatttaataagaatcaacatagtgttaagagcatggaaacagtctgcctggatttggatccggctctgccatttaccagctgaatgaccatgggcacattacctttacctccctgggtctgggtttccaacatcacaggatac

SEQ ID NO: 913860 - DNA, 4001 bp, Homo sapiens
cacagtaaactgtgtccaatttaagaggattaaaaaaaaaaaaactgacataaagaggaaaaagggccaggcatgatggctcactcctgtaatcccagcacgttgggaggctgaagcaagaggatcgcttgagcccaggagttcaataccaagctgggaaacgtagtgagacctcatctctacaaaacaatacaaaaatttgctgggtgtggtggtgcatgcctgtagtcccagctactcaggaggctgaggtaggaggattgcttgagcccacaatttgaggctgccggggtgagcagtgactgcaccacacctgtactccagcctgggcaacagagccagaccttgtctcaaaaaaaagaaaagaaaagcaaaacaaaacaaaaggttggggcggtgggggagatccagttagagaatactgggtggaggcagccaccctaactacccacatgtccccccagaaccacccttcccagggtacaatagtcttgtcaaattatttcagtaataaagaaagcagttcataagcttttagaatcctaaagagaagaaaatgaaggctttgatgaacaaagattagccttgttaggaacctagaacaaaaagtcaaataatactccccttttttttttttttttttttttttgagacggagtcttgctctgtcccccatgctggagtgcagtggcaggatcttggctcactgcaaccgccgcctcccaggttcaagcaattctcctgcctcagcctcctgggtagttgggattacaggcacgtgccaccatgcttggctaatttttgtatttttagtagagacgaggtttcaccatcttggccaagctagttttgaactcctgacttcgtgatccacccgcctcggcctcccaaagtgttgggattacaggcgtgagccaccgcgcccggcctaaatatttttttttaagtgttttaaaaggagctcgaaataactgtttttcattataagtctaacctcctctttcctcatgtgaaaagtaaagaaatgtatcgttgctatatgaagggttcgtttagggaagactgtgggatggttagattgaagaaagtgggaagaaaatactggcgccaaaaagatttttttttttttttatttaaaggcgatgatgacctgggggtgattgggactagggagtaatactgccagaatactatcctatttcacgggaaagggaatgccagggctggactccgatatagcagttattcctgctggtacctaagcagttcagagatgctagaatgcagggataccacccatcaactaaatgaagcatcccattccccaggcttccatatgtgggagttctctccaccagtgagataaaggcgggctcagggaaaacaaagccctagaccacaacaaggcaacaccttctcgcaccccattttcaccttccaggcgcgttccttcctgctatccgggcccgctctcccgcccggcagggtctaacgctcacacaggtctgccaattcccctgatgcaaccctccaccctctgctcgctaaccccagtccagtcagctctcccgggcctcgacccccgcggtggagactaaagggttcaggtttgggtcccccacaggcaaccgccctcaggtcagcgtatccgaggtggagccgcgcccccgagccgggtcatctcgtgctccgttcctcagtgcccacctgaccgatcacactctttcccggccccctccctcctgcgcctccagccaacctggggccggcctttcgggatgaccgtcacgcctggacgcagggttccagcgcctcggacttttcctctgatgggctcccggctgccaccttgctctccgccacctccaccagcgattgccccacttgacgccgccatcctgggcgaccgcactgggtacaattcccgctgcccattggctgttacctaggcaaccgggagcaacgccactccgcattggcccagcccggctccacgccatctttgtgcggggccgagtgtttgcgaacccgggctgactatgtgaaagaggggtggtcccacctctgcaacgcagataaagacagaggatccagatctggcctacccagaggccgtctagttgaaatggcaaccccaaagaaaaccaaacctgcgcccgaagcaacagtgaccatcaacgcgagcggctctgatcttgctccagtccccactgctgtcaagggccccgccgcggagtttaaggcagatcctaaatccagcttcagagaggcagctttgtaaattgtaacgcgctaggcaggatagcctccaataactctgtgctagacattgtgatatcaagacacttttgcattcattataggaatttgtgctgtccttgtcattatctagatcctttttgtttaaaatatagtacctggccaggcgcagtggctcacatctgtaatcccagcacttcgggaggccgcggcttgagctcaggagtgcgggaggcttgagcccaagagttctagatcagcctgggcaacgcagggagactccgtatctacagaagaaaaaaattacccagcctagtggtgggtgcctgtagtcacagctactcaggaggctgaggtgggaggatcccttgagcccaggaggttgaggctgcaataagccatgattctgccactgtaccccagcctgggcgacctagcaagaccctgtctcaaataaataaattgcaaaccaaaaagtatctgagacaggtctcaatcaatttaggagtttattttgccaatgttaaggacatgcccgtgacacagccttagaaggtcctaagaatgtgtgtccaaaatagtcgggacaccacttgattttatacattttagggagacgtaagacatcaatcaatacatgtaaaatatacattggcttggtcccgaaagtgggggtgggggtggcaagttccaggatgtaggtggattcaaagatgtcctgattgacaattggttgaaagagtttaaagacctggaacccacagaagggaatgtctgggttaagttaaggaattgttactaagatatgcacgcacacacacacacacacacacacacacacacacacaaggaattgtggaaatcaaggtttttattatgcagagaaggctacaggtagcaggctccagagagcatagattgtaaatgtttctttatttttttttttgttttgagacagggtctccctctgtcacccagtctggagtgcagtagctggatcacggcttactgcagccttgacctcccaggctcaagttatcctcccacctcagcctcctaagtagctgagactactggttcattccactatgcctggcttatttttgtattttttgtagagatggtgttttgtcatgttgcccaggctggtattgaactcctgggctcaagtgatcctcccatctctgcctcccaaagtgctaggattacacgtgtgagccaccaaggctggccagtgtttattatcagatttagaaaggtatcagactcttagttagttctcccctggatcaggaaaaagacctggaaagggaaggggattttctacagaatgtagattttcaccataaaagacacctttgcctgctatcatgacagatggggcctgctatctgtcaatgttggtatcattgctacaaagagtctgctgtgtcaaccttaagatctctgctttaatgttaaatgctggtcctgaattccaaaagcaggagaaaataatgaggcatgtctgactcccacttctcatcatggcctcaaatagtttttcaggttaatttaggaatgcccttggcccagaagaggaggccattcatttgattggggggcttataattttatttctggttcactagataaataaataaataaataaaatatagtgccaagattggagcaaatcttcccaaataccactcacatcaatctgtgtatccatatgtttatttcttaaacaatgtgagtac

SEQ ID NO: 913861 - DNA, 4001 bp, Homo sapiens
acctaacaggacaaaaataaagggaacattactgtgtacctgctctagatttgttttaggaacaatacgatataaagaagttatacagtcgttcctctgtatatgtgggcgaaaagtctcccgataccaaaacctactgattctcaagcccctgatataaaataacccagtgtttgcaaataacctgtgcatatcctcctgcacactttaaatcatctctagattacttacaatacctaatacaatgcaaatgctatgtaaatagttgttatattgtttggggaatcatgacagaaaaaaagcctggacatattcagtacagaaagaaccattcatttttttgttagtattttttatctgcagttggttgaattccctgatgcagaacccatgcatacaggggcctgacggtatagtgatgtcatatgcagtccaaatttcaggaacagaattccttttaacagggcttaggcataaaaaaaatggtgtgatttctagtactcttgactccagattaataaatagcaacagagtaataaagtttcccagaatctagactcctaaaggcaggctagggcgcagcctagaggaggtgcaacagccaagaccctgatcatctcagaccctgggaaagcgcaggccagacaaaggtcacatgcgacctccacataacagggtcaaaactgtcccatgagagacaaatgggcatgtgcctggcaaagcaatacagggtgccaatttagacaaaaagagaaagaaaaatgcatgccttgtacacattcctgtgtctgactagagtggagggtatgtaaaagaaaaacaagagtaatggaaaataccatatacaggcctcaatatgacaggctttgaaaggcaaactgagtaatttagactcagtgtggtagagtagatccaaagaataaatggtcatttcttctttttttttctttcttttttttgagacagggtctcactctgtcaccggggctggaatgcagtggtgcaatctctgctcactgcaacctctgcctcccaggttcaagcaattctcctgcctcagacccccaagtagctgggattaccagcgcacgccactacacctggcaaatttttgtattttttgtatttttagtagagatggagttttgccacattggccaggctggtctcaaactcctgatctcaagtgatccacccacctcggcctcccaaagtgctgggattacaggcgtgagccactgcaccaggcctaatggtcatttctaaaaaggaagatgacttctgtaccaacattctgtacacacaatgaagtggtaatgagtatctgctcaaagaaggtagcagcagtaactcagagagacaaatgacaacatgagattctatgagtaggaagagatgacaatatcaggttattgaccagatagcagagacagaaaaaataaaaacagcttttttagggtatttaccaacaatactgttaattaataatagcaattagcatttactgacctttggtatgtgccaggcactgcactaaatacttctaatgtgttatcggatttaattctcactaccaacttttgtggtaggtactctaattagcctgtttcagttaagaaaatggaggtttggagagaataaataacttgtctaaattcataaaaccagcaataagcagggctggaatttagaagccaacatgtctagttttacggtccacattcttaaccattaggacgtatggccctaacgttttcagttgcatgccgagggcagtgtacaccaattaagcaaggaagacagctgtggaaaccagcgttgcaggacactggaaggctacaagcagagtcatcgttaagaagaacacccacctttctttctcttcacaatgaggcttttggccttggagaagctaaattttgttcaaagcctaggagaacctgctgtttatgaacattcctgtaaaaggaagtgcacaggtggttcctgttagttccattggcactgtgatgtaatctctgacattatcacagacagctgtgtgcctcacagggcaccaaggggccagagaaaactacacctcagtatattgtctcttttccagcaaatgtggctgcccgcttccagggcagttcagcaaccttggctgataaaataggaacctgagcctcatctacagtggatctgggaatgttctcttcctatcaatttgtgtaccacttaaaaatgcttacagctggctttggaggaagagcggttaaaatcaaacgtactcactctgagacattcaaatatccaggatatagccactgagcaactgcaaatttgctacagcaaattagggctcaggtggattcactgaactggagctcattaaagccacaggcagtttagaagccactcagacagaaatgagagctgaaaccaagacaatgggcaaacgcacaattggggcggtgggggtgagtaagtgggaaaaggactgaagacactcccacaattaaaggacaggagcgtaaagaaaaacagtggcagaaaccaagaagaaaccagaaatggaggaactaagctccccatctccagtcatcaaatcttctcccttacactgttcggatctgtgttactcctcagttcaacccctcgctattgcctgcttgttctgtgtcggtgacctcctcccaacctgacccccacaacaacaacatagtgaattaactgaactccatatatgattatgacatgactggaaagttctatagcctgtgtctcaacctgaggtacggtgtgtggataggggtaggcattaaaaaaagatacctttttctggtgtgtcagttgcgcacagtggaaagtaacttttaatcttttacatgaaacataaaatttcataacaatgtcatgcctgcagtgggctacttttcaatgtgacccagtcttctcctgggaagaggtgcacgttggtggagtaacttaaggcactggccaaaataggtgaaacttgtgcttatccaaattatgtgaaggagccaaagaaagaaagattaaagatccataaaggggaggaaatttccaatatgaattcaaatcctacagttcttacacactggtctctgatgtataggagaatgggtaacctgggtttgaatcctggctctaccagttcctagttatatgaccccaaaggcaaattacctaacttctccctgactccatttttctacttgtaaatgtaaatggaatactcaaagagctgaattaagcatggacatctagggagggtttgcataacacagcacctggcatactgtaaagaaccaagaaatgaccgctcttaatctgtaaacaccaagttcataccactctattaaaacattccaaagcttttgttttttgtgagacagagtctcactcttccactcaggctggagtgcagtggcgcaatctcagctcactgcagcctctgcctcctgggttcaagctattctcctgcctcagcctcccaagtagctgggattacaggcgcccgccaccacgcccagctaatttttgtatttttagtagagacgaggtttctccatgttggccaggctggtctcaaactcctgacctcaagtgattcacccacctcggcctcccaaaatgctgggattacaggggtgagccgtcacgcccagcccccaaagctttttttccatccaaaattgttattagacaggaaaatgtctattttgataagcagacttgccatatcatacacagcctgtcccaaaggatacttttagctccatatgcaaaaataagactaaatttaaatacccagtttcagacccatctggaaattagaagcacccaggataacagaagccaagtcaaaatcactttagttatcatttattaagtgtaagacactgaactgaaaacaactgaaatcatttattaagtgtaagacactgaactgaaaacaactgaacagatcttggtggtgagattaatagttggta

SEQ ID NO: 913862 - DNA, 4001 bp, Homo sapiens
attgagtcagtttaaagaaaattaggcactgtgtctgtgctgcccagtatgatagccagtcacctcatgtaaccattgtacacttaaaatgacactactgtgaattgagacatgctataagtatgcaatactcaccagattttgaagagttagttttaagaaatgaatgggaaaatattccaaatcgattaaatgttgagggataatatttccgagttactgggtgaaataaaatacattaataatatcagggctgggcgctgtggctcatgcctataatcccagcactttgggaggctgaggagggcagatcacttgaggtcaggagttcgaggccagcctggccaacatggtgaaacgttgtctctactaaaactacaaaaatcagctgggcatggtggtgcatgcctgtaatcccagctacttgggaggccgaggcaggagaatcactcgaacccaggaagtagaggttgcagtgagccaagatcatgccactgcactgcagcctgggcaacaaaatgagaatctgtctcaaaaataaaaataaaattaatttcatctatcctttttatttggccttttatgtacttcttttctgccactgattttaatagctaacacttataaggcacttactatgggtcatactctgttctaaacatttcacatattgttactcattgaatcatcacaagaactgatgggggcaggtaatattattctttccattttatagacatggaaactaaagcacaaagaaataaagtagcctgcccaaggtcgcaaagctagtgagtgagagagacaggatgtaaaccataccgccttcacttgtgtttttgtaatcactaccactcaatacttatgatttaacatttgcggtactaaaacactctcttcctaggaaacttcccacccgccttcacatcagtgcatagagtagatcgtaggcacaaaccattctctgcaagtgtttgttgatttcatagaattaaagggggatcagaaatcaaaaaatcaaatttgaaatctcttctaaatcatctccaaatagaaccaggaatgaaaatcccccgaggcactcccatcctgaagtttaagcaactgagtatagagaaatagaaaagacagactggaaaaggtatttgagaatttgaacaactctggagctgttcctaatgagtaatctctaatctccagaaaaagaagaaaaacaggaatcgatctgcttatgcggcagtttgaatagtctagaatacagataaggatgaactttctaacaatcaagtgtctgaatgattctggcagaaaaaaaaatgagtatggaaattgcttagaatctcttttggggggatgatctgcgatgataccctcggacctaagacgcggggagacatcagggctgccctccttccagccagagacactcagaaggtgtttgttggcggtgagacagaaatagtgtgaattgaaaaccagaaagagtaaaccacagagcaggaaatttctgcacgaagaaaacagggaaggaacaacgagcgatgagagaagtcaggaggacactgaaggtctgtagggttcccggcagggcagcaaccgagacctgagacgcatcctcctccctcctccaactccaggcctcccatgcctggccgccaggtgaaggcagcaggcttagccgtggactgcgtggtgcaggggaaccccgtttcctcctcacaaagatgttgaaaggaacccattcacagtaacccagaagaggaaggtgtggttccggccccccaggtcagagatcccctgcctcagagcagacttacccagtaggagaacagcacccggaatgacagaggcaaaaaccaggagcaggggtagcctcatggcccagggtttatcctttccttctcctgatggacaggagggcggaactaagacgcaaaacaacgaggccccccaactgcctctccacctaatccaagttcccagagctgcccagctgaaaagaactacagaggaagccctcccttttaaagggctcctgaatttagggaaagcctctactgaggagacatcctgtcacatgagggtggctggaaaaacaggaattcaaagtaacaactttgcttcgtaagctaacttctgagaagagcagacgcagaggaaggggagaaagggacacgtgtgggagaggagtggcggggtggggaggagagagggcgatggtgatggtgaggagtcaggaaggagagaagtgaaacagcctgggagctcccggcctgctcagatggggctgggtggagatcaagctgcaggccattacctgtgccggaagacggagcttcccctgggaagcagctgagtcaggggtccctcagcagacaacctccactctgaagtgacagccacacgggccctggaaaggacagttttacgctggaaacacttcagagttgaagctcatccccttcagtttccacattcagtgcttagagcctttcttttttttcttggaaagtttcaacagaaagttccgtggagcttcatttcctccaggcagaagaaaagtgaaaaggaggctacacctaagagggaatgtcagtcaggccaggaaggagaaagttctagaaaccttttgctagaacgttctctagaaagccagaaaaaacagtggtaaaggatttgcagtaaagccttgctgcccagcctcaaccatcccggtcctcttcaagtttaagtgggtccccttgctagaaaaagaaaatctggccaggcacaatggctcacgcctgcaatcccagcagtttgggaggccgaggcagtcagatcacccgaggtcaggagtttgaaaccagcctggtcaacatggcaaaaacccgtctctactaaaaatacaaaagttagccgggtgtgatcatgcacacctgtaagcccagctactcaggaggctgaggcaacagaatcgtttgaacctgggaagtggaagttacagtgagtcaggatcgcaccactacactccagcctgggcgacagacgcgaaactccatctcaaaaaaaaaaaagaaaagaaaaaaaagaaaaagaaaatctgattgtttggtcaaaaggtatatctttatttaaaggcaagtggaattctttcttagaataaaatatgtttctagatctttcattaagcagaaaataaccctccaaacatttatgttgtcatttttcaaaagtagaacaggaatttagaacattttaaagcagaaactaacgattagctggccaaaccgttactagagtgtggaatatgttagtaattcaaaaagaagctactggaaacattgtaatttttaaaattttttaaatgaatagttttatcttcaaacggaaagcctccacattcgttgtctttgtgataaagttgaaaagtttccatcctattagaaatgtgatgtagttctcttactgattgtttttaacatgtaaatttgagattatcctgaccggagggaaaaagatagtgaaaatgtaggacagaggaccaaagtttctttgtcactaaggctgtacatgactgaaaaaaaaaatgatggttatagaacagaacagacaaaacaaaaatgtttctcagacattgtttcactggcttatgaaaataatagtttaaatgggtcatttgtggctttcaaatataaataaatcatatacaaaagtgactgcctaatttacatttatatatatttcagaagcaaatacatttaattgaattatgtatataatcacattcagggttggtttgtttctttgagacagagtcttgctctgtcgcccaggctggagtgcagtggtgcaatctgggctcactgcaacctccacctcccgggttcaagcgattctcctacctcagcctcccaagtggctgggattacaggcgcgtgccatgatgcccagctattttttgcatttttagtatagacggggtttcaccatgttggccaggctggtctcaaacccctgac

SEQ ID NO: 913863 - DNA, 4001 bp, Homo sapiens
cacttacaaccaggtgggtggaacaggcatgtgacagagtggggagcctgggctcagctcctccccctgccgttggttaataaacaccctttttccccacagctatgactagtctgcttcatctagatgcgcccacccctgatcaccaggggacaggctcctgagcctatacagaaggtgatatctgcctccaggattggctctgctccccaatacaactatttgcagaggaaattgggatcctccgcttccatcctgactccttggcaggcacacaggcctctttagtaaggttcacactattcattgatcatggtgttagggcatgacaagaaaatgacaacagttcaagaattcttacaggggtttctagattttcatttcctgcctctcatttccccaccatcccccctttttaaactaagattagaaaatactcattaatatcagccttcctgcccttccccaaggttctcagcaccccccaccagctggctcaagggacatggattttatttctgcacaaagagggacgtggggggaaggagatgtatagctaagaccagagaaagcttgtcagccaggacttggtctgagaatcactcccctctccctttcaggggtcaggcctagattaatcacttggcctttgatactaaccacctgacagttgttatatgttctgcgtctagttttaaaataatgaaaactgaggcttgtgcttaacatatgcacacattttgaagacagacctgaaatgtgaccttggataagtttattaacctgttttataaatctgtattcacacagatataaagtgcctagcccatcacagcagagctctccgtagctcagtggttgttccaataagacatcagggattcttcagaagccagccttcagacctctcactgtgttttgagatcattattatcaatttggatttaaaaaacaagggccctgtaaaacccttgaagtcttcctcatctcaggttttagggatgccacttgcataaaaatgagtggttcacaaggtcactgcccccagaagcaggcactggaaagaaacaggcagctcttcattatcccaagcagaacctctgtcaacttgcccattgatgggttccatttgcctgggcttggaatcccaaaggggaagaaccacctttaccggagtaacagtccaaagcctggggctgcagttggtggggcaactcttcactgtgcttgcacctgggctggggcaggatcctgaacctctcgggggcgtagcccgcggaacgtggtcggcttgttggtgaaggggtgccactggccctggatgctagggttgtcggtgtggaagggcttgcggatgcggatcacgtccaagcccgactggtcggccagcttctgcaccagcgtcgagatctcctcgaccgacttgcagtggatgctctcctcgcgcacagccccgttaactggcagaagaggggtgagagtgggtggaagctggccggtgcgaccaagcgagaaggaggatagcgggtcgagcccctgatcccgccctccagcccgagcccggccccactcacggtattcggccactactctgggcacgcagcacggacgcgagtttacatatattacgacccctggattccgtcgggcgaagtcgatcacctcccgctccacgaactccctaagcgacccgggacagtgagcagtatgacccctgactgggggcgacctacccggggagtcgttgccacctccacacccaccccgacccgcgcctgcgcacttcccttggctcacctggcgccgcgagacgaggcgccgtcgcggctgacgctgaagctcagacgctgcagctgctgcacatagcgacccagtccgttgtggagaacgctggccaagaagcggctcggagtcccgcgcgccgtcatagctacagcttggaggccgcggagcctaagcagcgaggagaggggggcgggactaaacctcgaggcttccggttccgggacgaccgctcccggagttttgcttccgaggtcaaggcgagtagcatgtgcgggagactcacgttgccggcgaagtgggagagagaaaagtggtaacctggggctgggggccggcgcggcggagctcggagtagtagagcggagtgaagacacgggggaggatagagactggcattcctttgggccgggggattggcgggagtcgtgctgggtgctctcgccgtgttgaggtcccagtgaggggaaggagaagcggaagagggtctctagtcggggcctagggcaaagggactacaaaaaggatgcagatgactatagaaatgaggacgacgaggagatgctgtggaggagcagtagaggtgagaagatgatgcaaagaaactgtgtcagtgaggaactgtatagagggtcatagaggtgaggtggcggagagaaactaactaacggaccatagaggtgggggagccattgtagaaggacgtggacgcgaaagggtcgtgtagatgggcatatgtgtgaagcagcaacgtagaggggctgaagaggagaaattcatggagagaaagaatgcacctagagtgagctctgcagagtgctgcgtgggatatccctagagtttggtctagtgaaggcacgctaaccaggcacctaaggcatttcaagtagtgacttcccacatttggctaggaatgtgggtcctcctccgaagtgggtaccccctccgtatcttgttacccctgcgtggggagtggatgggtcggaggggcctgccccgaaacttggccccaggccctcctcgcagacgttacaggaaggagactctccaagccttggatatgccagtgttgcctgtaactgcaactgaaatccgccagtatttgcgggggcatgggatccccttccaggatggtcacagttgcctgcgggcactgagcccctttgcagagtcttcacagctcaaaggccagactggtgttaccacttccttcagcctcttcattgacaagaccacaggccactttctctgcatgaccagcctagcagaagggagctgggaagacttccaggccagcgtggaggggcgaggggatggggccagggaggggtttctgcttagcaaggcaccagaatttgaggacagcgaggaggtccggaggatctggaaccgagcaatacctctctgggagctgcctgatcaggaggaggttcagctggctgatacaatgtttggccttaccaaggttacagatgacacactcaagcgtttcagtgtgcgatatctgcgacctgctcgcagtcttgtcttcccttggttctcccctgggggctcaggattacgaggcctgaagctcctagaggctaaatgccagggggatggagtgagctacgaggaaaccactattccccgacccagcgcctaccacaatctgtttggattaccactgattagtcgtcgagatgctgaggtggtactgacgagtcgtgagcttgacagcctggccttgaaccagtccacggggctgcctacccttactctaccccgaggaacgacctgcttaccccctgccttactcccttacctggaacagttccggcggattgtattctggttgggggatgaccttcggtcctgggaagccgccaagttgtttgcacgaaaactgaaccccaaacgatgcttcttggtgcgaccaggagaccagcaaccccgtcccctggaggccctgaacggaggcttcaatctttctcgtattcttcgtaccgccctgcctgcctggcacaagtccatcgtatctttccggcagcttcgggaggaggtgctaggagaactgtcaaatgtggagcaagcagctggcctccgctggagccgctttccagacctcaatcgtatcttgaagggacatcgaaagggcgagctgacggtcttcacaggtaaccctttgagaaatcactacttagagtaaaggggcagaagatcaggtgacaaaagcaagt

SEQ ID NO: 913864 - DNA, 4001 bp, Homo sapiens
tctctccctgggccctgtgcaggccaggccagaagagcaagggcaactcaggatactccatttattgaactccaaatctaacaaaattaagatcgctgcagtgtttcaaaaggaccttgaccttgttcccactgctatgctcactaaagtcagctcatttatgtttctgtagcctctgtatctgtagcttctgcatctgttttctgagaagctaacaggacttcacgtgcccgtttccttcgcagtctctcagcatttgtgatcatcataggatgcagagggaaaaagccagcaagacctaaaagtaacagatttttcacttattataacacagtataagccaatgcttccctaggaactctgtctcacagaactgaggtctgagatctgacccagtgcatggatgcaaaccatgctcctcacttgccaaactctgtactacttctccccggcaaggagacagtggatgtctacttccctaacaatattccccttactttaaaaaacgtaaactgacagatggccattcaaaacatactattcctatttttagcataaaataccagtcacccaaagtcttacaaaggagtccacaaaaggggcctccagattcaaaatgccaattagatcacaacttcagctcccacttcagtcctgaacagcctagagggaatgaaataactcttttttttttttctttgagatggaatcgccctctgttgcccagactggagtgcagtgacgcgatcttggctcactgcaacctccgcctcctgggttcaagcgattctcctgcctcagcctccccagtagctgagactacaggtgcgtgtcaccacgcccaactaattttttttttttatttttagtagagacagcgtttcaccatgttggccactctggtctcaaactcttgacctcaggtgatccgcccgcctcggcctcccaaagcgctgagattacaggcgtgagccaccgtgcccagccgaaaatcattcttacacctactgtcctggagctgacttcagtttaaaatcccctcaataaggtaagaccagagctgagttacccagaagcttttccataggcttagagaggtgggccccgcagccaatccaatgacggatcctgtctaggttgagggcaacgagtttttctccatgactgttgggcaatggatcataggagcccagctgctctacgaaacggccatccctgggacacttgttgtgagcagccacaatgcggtagaacggccgattggtgcagccacccagggcaaggcggatggttaagtggcccccacggtaggccttgcagaggagagtagctgtagaaaagcagctggttaggacacaaaaaacagcacaaaaaggacaaaatgacacagacggcacaattcccttttcccactgaaatgtctcacttccaatccattcctgtcaatccagtttagatgctactcttctttgtgaaacccctcttggccagtccagccagcaatgacctcctcctcatacccaaacccaccccgcatgggcttgccattcactaggctctgtgaccttgtcggagccttagctgcttcaatggggtggaaatttttcagcggtgattaagtggggaaaaaactgagagaaggatcaaatgtaaggcagtgtggctgcttcaggttcgggttgcctccatcgcgcctgggagagctctccccacccggccccgaactcccgagccccgtgaccgcccggaacgtctcgcggtggcccgatgactcactgaggtggaccatggtgccgccggcgtgcggctcctcggagagccccgctacccgcacgcaccagctctacggccttggcagggcagagaacaaacacagaaagaacctgcaagccgacaccaggccgcaccgccaagcggtacaagcccgaaaacctcgactccggaagcggatgatccgctcgccacgcctcctccgcttgccgccctatacttcccacaatgcaacacggtgacccctaacgtaccttaaactgctgcaaaagaggcgtttctcgtggtgtcttgtgggagtggcggtgcgatccctctcagacttgtgagtccctgctggagtcagaagttttaggcgaatcccaggcgcgccaaggaaagtgctacaaaagccatccatcttgcaagcgttggtgccgaggcgcaacgctgagaacgcaaatactaaagggcgctgttctttcctcgtggagctcacagtccgctggggagaccgtgagatgacagcagagaaactagcgcgatcagtagtactcagcgcaaggacagcgagcagagaaggcaaacctagtgcttgctaaggaagacttcacagaggaggtagtgtcagggccgagactaggagaaggattgtaagtgactagattttactttatccttctcgttaaccaaaattaatttacctctcaccttttctcctgttgtcgtcccacccctatcgaggcagtcacaccttaaaaaaaaaaggaggggttattcctgcttttgccgtgctgtgatccagggcagaggtgaagtatgattttttttttttttatctgtagccctagaatatgacctcggtgatgagggtaacggtgtctccttggagccctagtggtttagatccatgaagatgcctgtgtttggtgagaaggtgtcaatagctccaccttcagcaaagacctctctgttcagctttttcgtttactgttagttccaaagggctagcatgctctttgccctaatacagtgacccagcatagcagtcttcctccagggccacctttgaaaatgatgccttaattcctgtatttcagttaactgaacctgtccagaaaccttagcacctgacttcctccaggagtgatccaataagctttcatcagaaaccctaataatgaccccactataccttaattttattgtatgtatatatatgccatataattattatagcaattacactatagttatttatataactaaatacctacatgtaactcagtatacgttaactccagaaccatgctgatgaattttgagtttcatatctccatttttttattgtgacccagtttctcgtcaaccagtaaaacatccagtaacacagccaatggaaataaatgaatgggtctctgtttatagtgaagattctttcgttctccagctccaggcttcatacggtaaaactctctgggaaggaaaggaactcagagtcccatgcagaaaattgttcagctggaggggtatcagaaagatggatttccaaagccaactgtttcctgtagtgtgtggatctctgcaagcagagcctcatctttcaatttcagctacatgaaagaggaagaaagggaaagatatatgtcatacgtgatatactttatgtggctttgaagacccctcttttgtggggctacggctaaagaacatagttccctgggatggaattggctcttcctatttccctacttcatgaaaactccagtagaagaccttagaaccttgtcctggttacatggatatgtttactttgtgaaaattcatcaagcactatgcacggtcatgatttgtacatttttttgtaagataacttcattaaaatttactttttttatttttaaaaagtgttcacattattaccagcatctcttggctaatgcatagtattcccatctggcaagtgatatcagggaatcagagacagaaatcataggcttatattagatctggttttagttttagaatctagatatgtagtagagacatctaggagcctacagaatacctattttttcttactaacaaaatcttaatttcttttcaaggcagtaatgcagtcagctaaaaagccacattttcctgcttcccatgcagctagaggtagtcatgaccaattgccacccaatgaaatgtaaactaaagtcattgggtaggacacctggagaagccctttatttagggaaagtcct

SEQ ID NO: 913865 - DNA, 4001 bp, Homo sapiens
agtatccttagaagttgtgtctcttggctgggcgcggtggctcacgcctgtaatcccagcactttgggaggccgaggcgggtggatcatgaggtcaggagatcgagaccatcctggctaacatggtgaaaccccgtctctactaaaaatacaaaaaattagctgggcgtggtggcgggcgcctgtagtcccagctactcaggaggctgaggcaggagaatggcgtgaacccgggaggtggagcttgcagtgagccgagattgcgccactgcactccagcctgggcgacagagagactccgtctcagaaaaaaaaaaaaaaaaaaaaaaaaaaaagttgtatctctttaggtaaattactgctcctggaagggttatcccatgatcaagagttgggggtctggccaggcataatttctcacacctgtaatcccagcactttgggaagccaaggtgggaggatcacttgggcccaagagttagagaccagcctgggcaacatagtaaaaactcatctctactacaaataacaataataaaataaataaataaataaataaagagttgggggtcctcaggatcttaggcaggcagaggtattgccagctctgcagcttgctaagttcactgtgaggctgcatagagtataggctggaggagcctgtctagtggagatggggaggacctcccaccccactgttgttttaccatccccagttctgcctccggacagtttctgagagcaagtttgtcttgccgagtggcccagaggaggcccggggtcccctcctgaggaccctctcccacctcccttggctcctcccacttggctggctgtttcttgcctcatctcccttgcagcccccagagcagcccagttcagtccccagcgttagtaaagaatgttttaagaaagatcaagtttaagacacaagaaaagcctgcatgggtttttataaattttgaagcaaaattctttcttggccaggcacagtggttcacaccagtaatcccaccactttgggaggctgaggtgggcagattgcatgagcccaggagttcaagaccagcctgggcagcatagcaaaatcctatctctaaaacaaatacaaaaattagtcgggcatggtggcactcgcctgtggtcccagctacttgggaagctgagatgggaggatcacctgagcccaggaaggtccaggctgcagtgaatcatgactgcaccactgcactccagcctgggcaacagagtgagatcctgtctcaaaaacaaacaaataaaccaacaaacacagccccaaacccaagatttttccttaacacatgatacagtgaaaagggcctagggaaatggttcccaaacttgagtattaaaatgacctgggcagctttttaaattgatgctctgttctcactgcagcccaattaaatcagagtgtcggggtggaagatgggtgtcagtgttcttcaaaattcccccggagtttccactgcacagccaagtttgggagcccctggcagggagagaggaatgcctgggttcctatctcagctcattcacaggcttgcggtgagaccccagtggcagcttcttcccctccccaggctcagttccctcatctcaaaaacgatgcagtcatgtagctctgaaattatttttaatttcaaattactcacataggacccaagaattagagacacttatgaaatctaattgaaccccagaattactggaaggaaaaacaacttagatcttagagaacagaactagtgctaaactcattacaattttcgcaagctctcagactctcatactctgcacattgaattgcaggtaataacataaggttcctaactaggtcacatttaccattcaatgctatgtggtagaagcacacgcatattaaaataggaatacatattctcttttgcttttctagcctttatatataaaaccagttacctaccattgtgataagcaggactccttatagacaggtacatccaggcaaagctgcatcaaacttttatactggagagggcaaccacgcattcgacatcattgggaatgataacaaggtgagaacacattgagtgtttacagagggttgactatcaaaaggaaagtatggtttcagatgatttatgagttattaatcaatcacatctccacccaagttatgtgtttaccttgtccccaccccgatctgcatttgctgctgacctaaaagagcagaggaggagagaacttctctttgctgagccttcgccctatgctggtggattgctagcacgtgatgtgtccttattcgattttatacacaaagaaacagcctcagcgatgccagtcacaacagccaggtggtaaaggtgggtttcctgaaggcataagaatagcccacaggtcagcccaccaggcccaccgggcctgggtctgtggcccagatgaccctgcccttagggtctgacatgagaacagaaatgggtcaagccatcctgcagggcacaggagagcaagaactacatacagctcggggttccctgacaagctgaattgctggacctttctagagcccttcttgaatctgtagtctactccctgctgcatcaagcaagccttgtttctctttgttccacagtggtctcctcccaaacaaccgcacctgccctcatcatggctaggatggcctttggggaatggcaacaagcagaacctcctagggtgctggagggacttactactttatctgtttgctctgccaccacaacaaaacactgcaactgggtggctttgactaaagaaatttatttgctcacagttctggagactagaaatgtgaggtcaagccattggggaaggcttgttttcctctgagccctctctctttggtttgcagatggccatgctcttgctgcctcttacatggcatgcatccctggcatctctctctgtgtccaaatttcctcttctgataaggacactagctgtattggattagggtccactctaactatctcattttacctaagccacctctttaaaggccgtgtctccattacagtcacattctgggatattgggggttagggcttaaaccaatgaatttttaggggatgcaattgagctcataagacaattttatcccaaaaagtcccctcactcctcgccacagcttgctacagttcctaaaatttaacctgagatccctctgcccacagatgagagttcatgctcctaaccaggggatccttgaagctcatctgagctggccacagtggccctttccagcaccatcctctaccctccctaaaatcagcctcaccacccctaacacagcttgaggtcactctcctgctccttagaagagctgtagtgctgtctggctgcctcctcactcaccaacggtgccacacacttctgcctttacctgcataagttaagtgttcatcgactctaagttccaggaaatcggggcacattcatcatgcactgtagccccttggattcttttaaaactccaagtttgaagaacttcccacagtgtgaagtgggaagttctgccttacattgagaggaactaggatttgctgccctcacctgcttacctccagggtacaggcacaaacctcggctccacaaacactctcctctcaaaaagtcctcttcagagagggtccaaggacactggcatcatgcagaatctccctaggaatgatggtgtggagggttctggctcttagggcaagggtttcttggagtccagtgtgcagtgtcagtgcatgggggctgtgactgtgactggtagcaaggtggtcttgctggagccaagcagcagtgtggtttcagtgctctacctgaacttgtgccaagaaagcctgtgtctctggccgttagtagaggcttgaattctctaacaaatctctttccacctcaaatgacctagagtaaattctattgtttgcagttaagaactttgtgacccagacagtgactgtgacctat

SEQ ID NO: 913866 - DNA, 4001 bp, Homo sapiens
gattagtggtccttcctgagacagtcacctgaaggcagagtgagaaggcagtcaactgcaagccaggaagcaggtctgcatcaggaaccaaatctgttcccaccttgatcttggacttcccagcctccagaactgtgagaaaatgttgttgaagccacccagtccacggtgttttgcaatagcagcctgagctcagacacagagccaggaagtaaccgagagccaagactcaaaatctgcatctattcatacccaagcccttcaccacagaaatactccgtttatcatttttaatggctgcctaacagtttgttggattgaattttcatgatttacgtaagtatttcttaactgatttgggttacagccagtttccattttgtaagagactagtgcttaaagcatctttgcatatatctctttgttcttcttttgaactatttccttcgaatagattcccaggaggggtgtctgataaggtacacagctcctgttacctactggtggctggccaaattttattgttgctggagaacttcagatcccagggcaattcattaggctgcttctgacagcagcaattacagccatgaagtagttaccgctaaaaccaccatcctttttcaaggggttatagagagctcgtcggtaactgtgacctgtttctatcacctgtggttctcagcaatacaatgcttggcacacagtaggctcacagcaaatgtcatcagactgactagagacaccagtgattagaaaggccatagctggaagtcaagttggatgagctaacattccacaacgccaacgcttttatttagttacgtattctttcaatattgcatttcgaaaacttcaggggctaaaaagagctcagaatgagttggtacattttcatcagttgggtatctctgaatgtcttcaatgaacacatataaaattggattcagagtgggtcagtctggcaaccgcccaggaagccaatcccctggggcactaagttaccctgaaatagaactgaaatacaggggtagctggcacaggtctcccgaggtgactccttcctgcttggtgaaatgtgcaggtacccagatccaagagaggatccaaaagtatttagcagaaacacacacacacacacacacagagagagagagagacacacacacacaggctcgccctggtctctgtctcagtcattaacaatggctgtcaccttaaagaaggaacaaatgatcaacccagtctccctggctcttagacacatttatgggaagtcagcagggcaggaaacactcacaggaaccccaagtctgaactgcctgcttctcagatgctggaaggaagcccgcggaactacgaagagggctgcaatgcaaaatactaggggccttcgcaggggcgcgcgggccgggctgctacagcccaggccccgggccttcgcctggagtccccgataggggtcagaggcccccgagccccacttatgcccccactccccgagccaagaaaaaaaaaattatgcgcacatttagggggatcatttgttcatttcctcggattctcacaggggtcagtccccaccctgccgccaccaagtttacaatccactgtcccagatcctcgggctggggggggggaggggcgcgccgaggagggcttagtaggagggcagcgcccggcctggaccggccctaggctcccgggtgcagccggtgaaatgaagccgaaagccgtaggcggcggcggggcctgcgggacccgcgtcctacctgcctcccccagtcccggcccggtgccgggcccgccgccgcccgcttggccccgcaccgcccgccgaggcgcagttccgagggtcaggccccggagcaaccagaggagccgcgccatgacgcccgctccggcgccgctccgccctctgccctctgcccgtctctgcccctgctcccatcccacccctcccccattctctcccgtccgcctgcgctagtcggcctccctccccacgctccgcccacaccgccagtcccctcgtctccctccccctcttctccctcccctgcccctccctccttccctccttcccacctgctcctcccactatgtgccctgggccctcccaggtccccgcccctctttcctcccactctgcctctctctccccctccctcttcctctccttttccccttgcctttcctcccccttcctctcccccttcctctctcccttcccttccatgagaccctccccaacccatctctgcatctcccagctcctcccactcctgctcctccctcgccctgcccccctccacctatcccaactccactcatccgcagcccaaacactgatctgttttagtttgcattttctagagtcgtccataaatggaatcatcccatatgtacttgattttgtctggcttctttcactcaacatagttactttgacatgcctgcgtgtttttgcatggaacaatcattcattgcttcctgagcagtattccatttatggatataccaccgtgtgtttagtcagcacttgatttagcctgctttcaatttttcctgattagaactacagctgctaggaacatccctgtgcaaatctttgtacagacatatacggtttttcctctctggggtaaatacctggaagtggaatgcccaggtcgtaaggtaggtgtaaccatttaagaaactactatactgttttcccaagtggtttttttctttaccttcccactagcagtctatgcgagttccagttgttcttcatccttgccaacacttgaaagtccagagattttaactgtagatgttccggttctgtgtagtggtagctcattgtggctttattatgcattctctaatcgttaatgatgttaagcatcttttcatgtgcgtatttgcagcgagtgtattttccttggtgaagtgtccgttcagatcttttgcccatttaatgttgagttgtttcattattgagcttagaacactttatatattttggatgcaaatcttttatcaaacatatgctttacaaagattttttttcccagtctcttgtttgtcttttctgtctcctaatattgtcttgggaagagcagtttttaattttgatgaagcccaatttatcaatttgttaatggattgttctttttttggtatcatatttaagaaatctttgcctaatccaagatcacaaagattctctcctatgttttgttctaaaatttttatagttctaggttttacatttaggtctctgaccgatttagaatttttatatatggccaaaatttttgttttgttttgtttatctgttttgttttttgcatatctatatccagttgttccagcaccatttttattgattgattgattgattgattgagacagagtctctgtcggccaggctggagtgcagtggcacgatcttggctcactgcaacttccatcttccaggctcaagcaattcttctgcctcagcctcctgagtagctgggattacaggcgtgtgccaccacgtctggctaatttttgtatttttagtagagacggggtttcaccatgttggccagtctggtcttgaactcctgatctcaggtaatctgcctgcctcggcctcccaaagtgctgggattacaggcgtgagccaccaggcctggctcctagcaccaatttttaaaagactactctttctccactgaactgtttttgaatctgtcaaaaatcagtttcctatcaatgtgttgtgtctatttctggacttcctattttgtcccattaattaatttgtctatttttacatcaatattacaatatcctgatgactggacttgcaaccagctagcattggtactgtacctctgttcttttttaaggttgtttgggctattttaggtcttttgtatttcaacataaattttagattcagtctgtcaatttctacacatgatcttacttaagttttgattgggattgcattgattctatcc

SEQ ID NO: 913867 - DNA, 4001 bp, Homo sapiens
aaagctcccagaattatccagctcatatccatatcttacaacatgactcttaaaaacctgtcctcaggttaatggaggaacaaatttgtattttcctttgtactttctatctcctcatccttatgtttccatccaccctcttaatgtctccccttatcccatgggtgaatggatggtttcagtccacagaacagaaatagtcaagctcatctgtataccatatcctatatattaccttcaatgaagaaattggacctaatgatattagattatcttagggtttaagggtcatgtccttttaccaaaagagtaaatggaattgcccttcacactttagggcccaatttccaacaactaacctcattctgtcctccacttttaatcacctcacattctcattgcattttcagaatcactgccattctacaaaaagcatttatctactctacccacctgcctcaggcaagataacattttctttttctttctttctttgagacagagtctcactctgtcacccaggctggagtgcagtggtgcgatcttggctcactgcaacctccacctcccgggttcaagtgattctcctgcctcagcctcctgagtagctgggattacaggctcgcgccaccatgcccagctaatttttgtatttttagtagagatggggtttcaccatgttggtcaggctggtctcgaactcctgacctcgtgatccacccacctcgacctcccaaagtgctgggattacaggcatgagccacggcgcccggccaagacaccactttcttaaaccttgaaagaatgacttttttttttttaaataggtatggaaggaaagtgtgatttgagacaactctagggtcttaaatcccagaatttataatagatatctccctgaagttaaaacataagcctttttgctgcaatggaagcaagccacttaaggtcagaaaggtactgctttacttttccgcatttccaaggtgaggtcttcctctaaaggaagattagctcttggcaatctgggagttggctgaactggtcagaaagcaaaaggatcacacagtttgaggaagaggagtggtggtaaaaatccctaatgtcacagtctcctctgtgtctagagcacaatgttcatgatacaaatgagttagctttctggcagaaaagaaagaaggtgggtgagaagccaggtctttgatctgcatctatatacatcatcaggttcatgtttgagtttatataccccaggcccagacacagcttccctggttctaaatctcctgtaaagagccccaggctactccctgttcacaggttataaactgagagaaacaaaggaaaaaacaggggactcacaggagaagctggaaagaattgcagtaagctctttgaactttccagagtctagaatgctctccacttagaaagggaatccctttcatttttttctagccatccccagtgacttaggctctaatttagtcccagtataagagagagaacaccaacaccaagaactggagaggagacatgatcttgattgcctagaaaaacttttatccttcatgtccaaattcaagacaaaatattaatctattcctagacctaggtttcccatcttcttctttaccaccaagagtcccaagtttcacctaaactacagtcatattttcactatctccagataaggagtgctcatctaattttctgtaagtcaccaaaaaatgcaaaacgtctttggagaggtagggagaaggaagactgaaactggtcattggagatccttataagggggtaggaaaagagaaggagaaatacattaaggacactgtaattatggccacattcagctgtttaatcagtgattaacactgcctggggtgataaatactttactcaattataaactaagcaagcagacaggttgacggaaaaaaaaacttaccctgctaagtcctcagcttccttccttctctctttcctccaagtgaaatgagtgcttgatctcttcagatctaggttgtggcttacttgcagctgtcccttcatatcactttcctttgcaaactgctgaaatgctgagtctcagtgattaagtgtgccctgccaaccagacagacaaggctgaattctccctaatgaggcaaagagggatctgtccccctgcctgagggcttctctctaacctttgttctctgccaagggggctcaggactgtcaacactcccaagtgttagccaagtaaaggccaggcaggctgacaaaaaatgaaacctgctgcttcctagacttctctcactcaaggcaatatttctgttctcagtttacagcttcagaagaaaaccctttggattagtgcagaagtcaatatttgattggaaagggtaagcacctttccaaccaagtgggaggaaccagaggaccctctggagttctgtttgttgatctagacacaggatgagttcccccaggcctggtgtcctttttcagcataacaaacattgttcaaacaaaactcaacaatgtccaatcttggattaagtagaagggagaaaataaatggccatttaatggtacagaatgaaatcagttgtaggggaaacatgcagaattaacttgtaaaattcactttccctgaaagaagggtaagataactctctgagtgagagagtcatcaggagcactttacctgtattaagagaggaataaatgcttctgggatattaaacaaaaccaaaatactagttaatgactaaaaatacatactatttctaggaaaagaaaatagaaaagaatcagctcaaccattctcttatcctccttgtaattgcagctgatccaggaaattcaattccacagtcctagcttctttctacttacagctagcctatctgaagttgttagggcagtggtcctaaaagactgcaagatctttcttaccctcaaaaaatttttttaaaatttttaaataaaaaagttctgactttctgcttatatctgaccccagctctcacttacctgcttctttgaacatcatcaaactggggaacagaatcactcgcaatgaggtcccggaatgtggcaaatcaaatccacacaggaaccccaaactgtaaaaagtacaaactacatgcagggaaggtggaagaaaagtgttaaggattcaaccaaacactgcataacattatgtagaatagctgtggataaaggaaaatcagttgcaataggcaaaaaccctaaataaaataggggtaattcactttgtgcaaaagtttcaggccaacttcaaatttaacaggcttcaaaatttatctgagaacctcaaatgttttgagttctgttaataatggctgaactgcagaagatacaagacatcagagattgacttttctaattcagaagttgtcaatgaatataaaggagaatagtaatatagaaaaactttgatgttgaatacttatattttactatcactatgacttgctctggtaaacatttaaagttacgaagtctgaacttttcacaatttgtattcatcatgagttgcatttaaaaaatcttaataaatggtatgctgtgaaatgaattatgaagaaagactagaaagaggttcctattcaacatgtaggaagtggtctgtgaggcactatgtgatactttatcactcttcaggtattttgcttttcctgagtttggttcctttctcttattttcctcttaatttttaccatcaatccatagtttttttgctaatactacttaatgctcacccatgattcccacaaacactatataatgctagttatgtacctaagggctaggaaagttcctggcacctaatatactagttaaactcttacttactttttaatttttctattgggtctattttagccagataaactctttactgaatagctttcataaaacaacatcgacaacaatctttaaggtatgcaactttcataaacaacatagacaacaatctttaaggt

SEQ ID NO: 913868 - DNA, 4001 bp, Homo sapiens
ccaactttttttcttgccatcagtgaacgaatcatcacatcctgccaattcattcctcaagtacaggagaaaagccccagttggcaggaacatttaaacagtttcatagcccatctagaggattccactgctgcaccgtaccgtcaggcttgagtgacgcagatatatgtattaacaatgaagtttcaaagacacgcagtctggaccccacatcacagattctgattaactggtctagaaaggggcctcgcaattcatatttttaaaagcctccccaggtaattctaatgtgtaatatgacttcaggcagaggggcctcccctgctctgtgaaaggatatccgggcatcgtggacctcgatgatacagtccaccagcttcaggctgctctgcatcttcttcagccctggaaaacagaaggacgcctcagcgaaggggctcacaacctttctagagtgatcgattcaagctgaaccgtccagaatgacacgccaccataaataacctaaaaagactatatctgagggaagcgtactaagtaatggtaacagataacatccgctgagcgcctcctccaaggtccgcaccctcggagtgggagactgggaggcaccctgccacagggtgggccatgtgtcaaaagccagatgcggtcttcaccacctgactcatggctgactctgggtggaatatttaacgtgcatgggtcgcttttttgttttctgagacggagtcttgctctgtcacccaggctggagtgcagtggcacgatctcggctcactgcaacctccgcctgccaggttcaagcaattctcctgcctcagcctcccgagtagctgggactacagggacgcgccaccatgccgggctaattttttgtatttttagtagagacacggtttcaccatgctggccaggatagtctcgatgtcctgacctcgtgatctgcccacctcggcctcccaaagtactgggattacaagcgtgagccaccgggccgggcccttccacgggtcttaatctgggctataacacagagtaacactggctcattaggcccctgctacctcgcggggatgatgacgatagtcccctaaccaggaataccacacacaaccaagataacaaagcttccagctttcttcccctccagtgttatccgaagaccgaggacacagcctcagtcacccacacgggcccttcttccccctcggcccccagtacacgcggagccgacgcaggagtggccatcacaacacctagacgggctgggctggccccagaggtcttcttggggccgaattgtgacaaacagtaagaattaccaaagacgttaagcaggagaacgactcaagataccagttaaaactgaacaggtgccttcatacccactgtttcatttagtccccaaaagactcagaaaagtctatcttgtcaagaacatgtggaaacggaggcttcgggggattaaaagggcagaaggaacttgctgggaacagaggacaggggcggcgggccagaggtaggaggtcaagcaggccctgggtccgaggctgcgccgcgggggcactcgcgggaacgggcctctcccgcagctgcgcaggggaaggggtcccggcggctccgggagcgggtgagagcggggaaggaggggagacaagggaggaggggcggggccagcccagaacgaccgggagaagcaggcgacggccgaaaccggggtgggagggaagcagaggcgccgcggccgtaggcatgaccttgcccctccccgccgtgcctcacccttggccatgtggcccgggaaccagcgcgccacgtcgcgaccgcacagggggaagttctcccgccaggcggcctgggcggcgctgcacagcgcgcgcggggtcaatctcatggcggcaccgtccccggaaacgctcccgcagctgacctcctctgcgccgctgcgacccgcctctgaggttccggcgctgcgggcctccggcactgcgggcttccggcgctccaaggggccgcaccacggcctgcgcgtgcgcacgacgttgcctccgcctccggcgaagcccggagtgggcggggcccgggcccagagggagggacgaatggtgggtcgagcgtcggggcgggactgcgaggagacccggggggacggggaggttcctgggttttgtgggtttaagtaattcgcagatttattaacattcattaaatattaaaaatcatcgttctcccttaagcatatcctgagtataagtgtaaaaatttagcaatctctttttacaatttggttaaaatctctcaaatactttaaatttaccttataaatgtaatctcttcattttctttttaagtacttcagggtttttgtttgttttgttttgtttgagacggagtctccgctctgttgcccaagagtgcagtggcacgatctcgctcattgcaacctccaactcctgagttcaagggattctcccacctcagcctccggagtagctgggattactggcgcctgccaccacgccggctgattttgtatttttagtagagatggagttccaccatgttggccaggctggtctccaactcctgacctcaagtgatctacctgtctcggcctcccaaaatgctgggattacaggcatgagccaccgcgcgcagcctcaagtacttcagggtttaatataacaaactgtttccaaatactgactgcagttctgctaaattaaaccgattaattaatgaggctgaaatattctccactgtccaagactagacataaatatagtcggatttcaactctaaatcagcagtcagcaactgctcaattgcacactgcgttacaagagtattactctaccggaatttttatttttgagacggagtctcgctctgtcgccaggctggagtgcagtggcgtgatcttggctcactgcaacctccgcctcccggggttcaagcagttctcctgccttagcctcctgagtagctgggactacaggtgcgcaccaccacgcccggctactttttttgtatttttagtagagatggggtttcaccatgttggccaggctagtctcgaactctgacctcaggtgatctgcccacctcagcctcccaaagtgctggaattacaggcatgagccatggcacccagcctctactggaattttttaaacaagctactgaaaataccaaacatgctcaaattctaagtacaaaaatattgccatggttctgatgttcttaaaccacctaataccctaacgcctagctgtaaatatttttgggcatgagagagtggcccctccgtggaagacagaagcctcccaggtggtttctgggctgagtgggggcagtcagggcctcctgctaggtcaatgcccccaagccccctcctcaccaagccggtccctcacacccagagggggcagcctgggtcttgctgcctttctccctgggatacagaattgatgaaaccctaaatgtcaatgataaagatttttgtactttaaggaagctgcattccctcatggtcctaggagcacaaaaccacaataaaaccctgtggaatctgaatttctctcccaggcgtctgatgggcaggtgtccccagagagaacagtctggtgacacagcaaatgcaggtggggctgctggctacagagggaggctggggctcgggagggtggggtcagggaacatcctaggaggggcaatttgaacagagaccagagggtgagaagagaggagccctgcagatccaggctggggtggaggggccggagaggggcctggactcccagcacattcaccccaataccacgtggtaccccagcactgcccacaccccaacatcccccggcacccagcacactcaccccaacaccccccagcacccaacactacccacaccccaacaccccccagcaccccagcactgcccccaccccaacaccccccagcacccagcacactcaccccagcactgcccacgcccc

SEQ ID NO: 913869 - DNA, 4001 bp, Homo sapiens
cacactgaatgaaaaactgaattggatatttctcaagttccttccaattataaaatcacatgcttctaggtgagtataaggtgtacttaactgtccttctttaaaatggtaaagacatccaaatgaggattttgttatttcctgcaagaatccctgaatatttagtcgtattattctaatgacacaaaatgaaacatttccttaaaaaagaaaaatagcaaagctacagtaaatgaagagtatagtcttggaattagaagtgagttttactggctgggcgcggtggctcacgcctgtaatcccagcactttgggaggccaaggcaggcagatcacctgagtctggagttcaagatcagcctggccaacatggtgaaaccccatctctactaataacacaaaaattagccaggcgtggtgccacgtgcctgtaatcccagctactcgggaggctgaggcaggagaatcacttaaacccgggaggccaaggttgccgtgagccaagatcgtgccattgcactccagcctgggtgacagagcaagacttcgtcccgaaaaagaaaaaaaaaaaacagtgggttttttaatttttgccaccgaatagctgagtttagcttgaactactcaagctacccttggactaccctgttccctcatctataaaatggagtaacagttatttccttccacacctacgctacagggttgtttcatatatcaaagagcatatgaacatactctcaaatttaaacacccatacaaatgttaaattacaatagcttttttggcagaatccttactcaaattttcagcgttacttagaaatgttcaacagaagtagcttccactaaatacaatccaatcaatatttgaatgaaatacataaagatttctcactgcctgccaatgtaagtcttttatacagtctgataaagacaccagcttattttagggaaaaaatagctccaaggaatcgtagaagtcaatacattttgtttaataatttgactagaagtctaaattaactgagctagtgaccttgcctaagttatttacctctttgaaccattttctacatctgtaaaatggacacagtgatacatttcttgcaagatcgttttaagaactgtaaatagaatacacaagctcttgagtcacaagagaggttcaataacactggcttctcaatacacaaagaagcatataaatgtagaacgaacgcgggacaacagcctgttgcagtgaatccaaatctgttaccagactgatttggttcaaaatggccaaaaagaataaagtaaacggcagtacatttcatagacagaaccctatgtctaggaaccaagaatcctcttgattcatcaggctacaatataactcggcctccagcaacaacttaatgtatcaaaatcagaaatatacgtacacgatgcagcgactggctcaggtgtgtagcattactatcattgggaacactatttcgtcaaactgtaaagtgcaagcaaactgggttcctgacctgaatttcatggaagtctaaacaactccattactgtacacaggagtcgccccaaacaaacatcacacatctcacttctgcctcagcaacggcggcgaccctgggttcccctacagagatcagaggagaggagaggacaggacacagccccaccctcttgccaaagggtccacagccgtttccacaggccacgtgtttccccgtgatcccagactcctcgcccgctgtgggacggaactacagggcaaaccggcgccatcacctgtctccacgctccctgaaggctgctcgtctctcctaaggtctttggccacagttcctgggcaactcaaaagcctgacgataggccgctggactcgagttcttctccgggcacacaggttcaaacgggtcaagagccccacgccgggaaccgccattgctaaaaaaaaaaaaaaaaaaaaaacagcactagcgcgaagctgaaaggtcagcgcgttttcgcgcatgcgtcgggggggagggggggggcaaaagaaatgggaagcctcgagggtcaaactaggcgaaagaagttcgcttttagaggaagagaggaaattgaggccggaaagaagatacctaagctttcagacatggtttacttccacagtcacacaatttaccaaatgaaaagttccatagaaggagcgctccacctactcttgtaaatagcatcatgaaaatagaaccagagcccgggcgcggtggctcatgcctgtaatcccagcactttgagaggctgagggaggtgaatctcctgacgttacgggttcgagaccagcctggctaacatggcgaaaccttgtctctactaaaaaatacaaaaaaattagctgggcgtgattacatgcctgtaatcccagctacttgggaggctgaggcacgagaatcacttgaacccaggaggcgaaggttgcagtgagccgagatcgcgccactgcacttaagcctgtgcaacagagcgtgaccctgtctcaaaaaaaaaaaaaaaaaaaaagttaaaataatggaaaggcttttaacctctctgaaaggggcaccaggagcaggcagggcatcatcatcttccttgaaccatgtgaggacattttacaacctctgccaatatgcctcaattcaaattaaaattcaagtggttttgccagcccctcctccaagtgagaggtacatacctcatcttaaagccatacgaaaggcattggagaggactggttcagtcttctcattttggacatgagaaagtggggcacagatcagacaacgactggctataggtcacacctggggagtcaaagtttaaagtcagagctctgcccttgattcaaggctcctcctcagtgcctgtgtcataaccagtggcccttgctcgggtgcctgggaaaaggacatacgaaacagtgcaaagaagcctgcaactgaaggcagcctccccgggggaatacactgctgctggaggcgaaaggaaaagcaaggggcctcgcaatcggagcgtgagagaggacaaaccagcaccggaactgactagccagctctgtgttagcatggtgctattgccttgcaggtattttcctttttaatcatctcaacaaatctgagtgattaaacccatttcatggatgagaacacggaggcttagagacagtaagtaacttgtctaaggtggcctcattagaagttggctgtgctggctgggtgtggtggctcacgcctgtaatcccagaactttgggagaccaaggcgggaggatcacctgaggtcaggaattccagaccagcctggccaacatagcgaaaccctgtctctactacaaatacaaacattagccaggtgtggtggtgggcacctgtaatcccagctacttgggaggctgaggcaggagaatcacttgaacccaggaggcagaggtttcagtgagccaagattgtgccactgcactccagcctggcaacagagcaagactctgtctcaaaaaaaaagttggctgtgccatttgaccccaggtcagtccccagatcctgggccttccactcggacacacactcaaggccaccctcaggccacacagagtcctgccactcccacatggatgttgaagaatctcaaagttagatagaagtatatttgattttgatacttccaaggaaagtcctgcgtaagcaatgagtttggggatggatgtgaggactttttaatttttgtgggggatatttaatccctttagcagaataaaatgttctccagccacttggcagtaggtactttttttttattttattttttgagacagagtcttgctctgtcgctcagggtagaatgcgttagtgcaatctcagctcactgcatcctcctcctcctggattcaagcaattctcctgcctcagcctcccaagtagttgagattacaggcacctgccattatgcccggctaattttcgtatttttgtagagacaggttttcacca

SEQ ID NO: 913870 - DNA, 4001 bp, Homo sapiens
cagacctcaagtgaggtgggaaactaccataaatatggctgaaaatatctgtaccacaactcccagacagtctgtaggatggagccaaaaataaataaataaataaataaattaatttaaaaaattttaaaaaaggagaagggcaatgcagcttagtggaaagcataagaacctgaaatttataagacctgggcaccggttctacaatagcactcagtaaccaatagcatattgtgtaaaaatcctagtcttgtaagggcactttgtgaagtgggcccggtttctcatatcctttcatactgggaaaaatgctaaatagatagaaaccaacctggattgctctggtctgaactcagatcacgaaggactttaatcattgaacaaatgatcccttaatagcggctacaccatttaggatgtcccgatccaacatcaaggtcgtaaaccctgttgttgatatggatgctagaataggattgcactcttaaccctagggtcacttatcctgttgatagaattattgggtcaatgtgtaataactgacttacactagtgcggtcttagtttaagtcgtttcggaggttgaattatgctccaaggtcaccccaaccaattttttttttttttaagacagagtctcactctgtctctcaggctggagtgcagtggcaccatctccgctcactgcaagctctgcttcccaggttcatgccattctcctgcctcatcctcctgggtagctgggactacaggcatgtgccaccacacccggctaattttttgtatttttagtagatacagggttttactatgttagccaggatggtctcgatctcctgacctcgtgatccacccacctcggcctcccaaagtgctgggattacaggcgtgagccactgtgcccggccaccccaaccaaaatttttaatgcagggatgatacattggggcctgttggcttgtttgaatctatttgcattaatgaattcaagctccacagggtcttctcctatttatttatacccgcctcttcataggtaggtcaatttcactggttgaaagtaagagacagctaaaccctggtgtggccattcatacaagtccctacttagggaacaagtgattatgctacctttgcaagttcaggataccgcaacccttaaacatatgtcactgagcaggcagtgcctctaatactagcaatgctaggggtgatgtttttggtagagagatggggtgaaatgtgccgagttccttttactttttgtaatctttccttagagcatgactgtattgggttaaaataaagataataagatgtctattaatcatttgttaatattaggttgttaactgtcagtggattattctggtctgatgtaagcttatgcaatggataatgtcttaatgttacttacactaacattattgcttctactgaataatagattagtccaatgtaatattaggagtttaacagggtgattagaaatgaagttagtcagatgttgagcttaaacgctttcttaattggtggctgcttttaggccaattatggtggtaaaatcttttactctctataggacggttattttctagtatctgaagatccgtccccctttaacagttaaacttacaggaggattaagtaattctgtaggttaagtttaaagttgaactaaaattctaccttggacaatcagctatcaccagcctccgtaggcttgtcactgctactaatgaatcttctcactattttgccacataaatgagtgtactcttctagctgttctggagaagctcctctgattttgggggacttggctagagctctctttgtgaagtttattctagttaattcattattcaaaagatgcaaggatttgtctttgctttttggtgcttgatatagttctttcattgttcccttacggtactatatctattgcaccagaataagtaatttctatctcctatacttttgtcgagggtaaatggtttgatttaagtagttctaataatattttttagcaaggcttggagctggagctggctcaaagcgatcaggttgtaatgaaatcttccgggtgtaagccgagtgctttgggttaagctacactttggtttatccaggtgcactttccagtacacttaccgtgttacgatttatctcctctgtatgtgtgtaagcaattattaataatagtgatttctagagcactacttgaagagggtgacgggcttgtgtgcttgccttatggccttattcaatcaagcactctgttcttgatttactactaaatcctcttcgaacatttagatttcatgaaggttattgtgagatatttctggatgtagaaaatgtagcccatttcttaccatcccatggactacaccttgacctagtgcatacttgtgtttactatatatatatatatatatatatatatatatatatatatatatatatatatatattagggtttgctgaagctggtgttatataggctgagtgacaagagatggtgaggtatatcggggtttatcaattatagaaccggctcctctagaaggctataaagcaccgccaagtcctttgagttttaagctgctgcatgtagtactctggcgaacagtcttgttaatataactatttgtgtaagcatagtggggtttctaatcccagtttgtgccttagctgttgtgtcctcaggacattaaagtccctttcgtagtatattttatttcagctggagatttttacgatttagatagagcttaactttgttgactgaagaccttaaacactctttatgccgagttttattagcttgggttaatcgtatggccgcggtggctggcacaaaatttaccaaccctaaatattgtataggttagtcatactttcacttatgaattaaaatttatcactgctgtttcccgtaggggtgtggtcgagcaaagtgttttgagctgcgtttatgcgtgcttgatacctccttcttttgaaccaggtgatctggagggcattctcactggggcggggatgcttgtatgtgtaattttactgagaattcataaaaaggccaggaccaaacttctatgtttatggggttttgcggacccatctaggcattttcagtgccttgctttaaataattaagctacattaactggatgaaaaacatttgagtggtattttgaaatactagggggatgtcagggtagaatcttgttgggtataaatctgaagtggtcatttgcagtcctggaagtttagggcctttaaaaaagttgaattagcagaggttttggctaaggtgacatttgtagttgaagttatatttgatttaggactataatatctgggatacacacttttcagagagggatgcttgaagtattatataagtattaagacagaaatttagttaacatataaataggagattttatttggttggagaatattgggattttttagaaaattacgttaatcgaggggctagtgttggagtgttcatggttaaattatgatttttagggttctgactaggttcaatttaagtatcttgtttctgggggtcggcaagggtacctcttacctaatttaacaataaagtcagagatggagggagggtggattttcggatttaatcagaagtagtcctttaaattatgcgtgaacgtatctgcgtgaacgtacgtgtgcgtgaacgtacgtatgtgcgtgaacgtacttgtgtgcgtgaacgtgtattgattgttatgcccttcaagcatgaatgaattagcaccttatggttgggtatgttgactcagaatattcaagataagtccagccacaatcgattccgcagggatcaggctcccgccatggtaagtggcagcatctcgaaaattaaaaaatacgaaatgcatgacaatgctcccgtgactagttattagggtgatagtcactagtacattgagatataaggtttgcaaatattttctcccagt

SEQ ID NO: 913871 - DNA, 4001 bp, Homo sapiens
agggtgacctcatatgaaattgtctgggccatagctcataatgcatggattagtgcatattttgaattagatgctcatcctgatcatagaatagagtagatggttaagcttgatgtggctagtataaatagaagacctatattaaaattaattagatgatctggcatagggaggggagttcataagaggagagcaatagaaagggctatggttggagcaataatataaaaggtaatagtagatgttggaggctgtaagggttctttgttgaaaagttttattgcatcagcaaaaggttgaagcagcccatagggacctacaatgttgggtcccttgcatagttgtttatagcctaagatttctcattccatgagcataaggaatgctatagtgataagagtggggataatgagtaggagaaggttaattataggcatgtagttaagaagaggagttcaactctgattacaaagttttaagatttatgcaattgctgggctctgccatcttaacaaaccctgttcttgggtagggtggtgatgattttttagattgagatagcatcctctatgaagtgagggcactttatgaaagggactctatttctcttgtcctttcatacttggagaaatgttaaatagatagaaaccaacctggattactccagtctgaactcagatcacattaattgactttaatcattgaataaatgaatccttaacagtggttacaccattaggatgtcctgatctaacatcaaggtcataaaccctattgtcaatatgaactgtagaatggattgtgctgttatccctagggtaccttactctgttgatcaaattattgggtccatatgtattaactcacttagactagtgcagtcttagtgtaggttgttcagaggttgaattatgctccaaggtcaccccaaccaaaatttttaatgcaagaatagtaggctagagcctgtaggcttgtttgagttttaatttgcattaatgaattaaagctccatagggagcttctcatcttatttgtttatatctgcctcttcacggataggtcaatttccctgattaaaagtaagaggcagccgaaccctcctgtggccattcatacaagtccctatttagggaacaagtgattatgctacttttgcatggtcaggatactgtggctgttgaacaaatgtcactgggcaggcagtgcctcaaatactggtaatgctagaggtgtgtttttggtaaacaggcagagtatgatttgccgagttccttttactttttgtaatctttccttagagcatacctgtgttgggttaacagtgtaaataatagggtgtttattatattgtttattaatattaggctgttaactgtcagtggattattctggtctgatgtaagcttatgcaatggagaatgtcttcatgttacttatactaacattattgtgtctattaagtaatagattagtccagtgtgatgttaggagttcagtagagtgattagaatttaagatagatgttgaacttaaacatgttcttaattggtggctgcttttgggccaactgtggtggtaatattttttattttctgtaggaaggttgtttcctagggtctaaagagctgtccctctttagactaacagttaaacttacagggaggttaagtaattctgtgtataagcttaaagttgaactaggagtctatcttggacaaccagctatcaccaggctccatagccttgtcacttctactcatgaatcttcccactatcttgccacataggtgagtgtgctctttcagctgttcttgggtagcttggctggttttgggggacttggctatagttctctgtgtaaagttatttctggttaatacattatgcagaaggcataagggcttgtctttgcttttcagtgcttgatacagttctttcatctttcccttactgtactaagtctattgtgccaggctaaaaatttctatcacctatacctttatttaaggtaaatggtttgattaagatagtttgataatattttcatagaagtgtgtagttaagtttcatagaatgtctatgtagttaagtgtttttgtggtggccagtaacagtcttttgttttcatattgagcactccctttaagatctcttattgctctaccgtaaagatatatccatgtgtatgttcatcacagtactattcacaacagcaaagacatggaatcaacctaaatgcccatcaagggtagactggattaagaaaatttggtcatatacaccatgaaatactatgtgcccataaaaaagtatgagatcatgcttcttgcagcagcagcatgcatggagctggaggccattatcccaagtcaacagaaaaccaaataatgcatgttctcacttataattggaagctaaacattgaatacacatgaacacaaataaagaaacaatagatattggggcctacttgagggtaaagggtggagaagagaagggatctaaaaactgtcgggtactatgcttattacttgagtgacaaaataatcagtacaccaaaccccagtgacatgcaatttacctagatttcaaacctgaacatgtaccccctgaaactaaaacaaattaaaaatcaaaaatccgtaagcataagcaagtatccattgcaatactttagagaaatctaataatttattggggaagcagggtatcttctcttaactatagctctgtcctgatttatgagcaattgcaccatatcatatgtgatggttaattttatgtgtcaatttggctaggctatagtaccaatatatttggccaaacaccaccagtctagatattgccgtgaagatattttttagatacagtaaacagttaaatcagcagacttggagtaaagaagattaccttccataatgtggtgggcatcatccaatcagttgaagactgtaaaagaaaaagactgaggtccccagaggaagaggaaattctgcctccagactcaagatgcaacatcagctctttcctaggtctttagcctgctaatttgccctgaagatctcagacttagacttgctaaccttttgcactgagtcacagcacatgagccaattcattaaagtaaatattaaagtaaatctctctaggtaggtaggtaggtagatagatagaacacacacactcactcacacacacatacacatacttacatgtgtgtgtgtgtgtatatgtatatatacacacacatatatgagtttttttggtatttatgttgcttaaggatcttatgcttcttaaatatgtgacttaatatgttttaccagtttcaaaaaattacctcttcacatatttcttttagccataaaacatcttttaaagggctaaaggaaattaaattttaaacacacttgcaccccaaacgcatacagaaatactagtaacaaactatagaaatgatccctgaaagtataatcttgaaatactaagagttcttcagagtcatatgtctaggtggagggaagggaaggaaaaatcaaaagtactaaatctaaaagaaggtcatgaaagagagcaaaaggaacacaaaaggtagtcaatagaaaaccatagtaaagagttcatttaaatccactgtagaaaacaaaatgatggaaaaagatgtatcaggcaaaagctaacttaaaagaaaccttggatggctatactaatatggtacaaagtatacctgaaagaataaacattagtattgacaaaaaggacttttatgagtctaaaataatcaactaaaagatgtataattctacatttgcatgctcctaataatatagtcacaaaatatgtaaactcagaactttcagaaataaaaagagaggcaaatctgcagtcatagttggtgattttcacacacttcactcagtaactgataaaatattttggtgtggatagaacttgcatatggtgttggttagagagtaaattggaacactcactttaaa

SEQ ID NO: 913872 - DNA, 4001 bp, Homo sapiens
accccaccctcaaacccaggtgatccactccaaggagccttatggctttctactctcatctgatcgtccttccctatcttaagtgttgcctccaaagcaacctcctccagacactaggaagcccatttctctcctccagaccttacctgctctcacagcttgtttcacttacctgccagtcggctcttatgcacataacatccctttatggatctgttcttctcttttagttttaaccttttccaagatctttttctacttattagtcagtccttaattcccacccttccactggactcaaaatgcatataggtgatgatgtcagagattatttacatataatttctgaatttgtggtaataggatcacagccttcatgattaatatttctggaggccttcaatttgtgatccgtagagattcacatcagttggagttttgggagaatgtacctgcctttcctagggaatcccccctgccttgcacacagcagacagtcaacaatgtgacttaatttgaacccctcctccaagaaaactcaacctctccactggaagtaattcagccatgtggccacaacttggtgaacactaccagtacggaaacctcaacaagggaacgaaaagcagttctggctacgatggaaaataaggcaagctcctgccaagtaagtacttcgcaaacagcagtaaaaacggaacgtgttaactcgtgaccagggtccaccatgcatctcagaaaggtctcaccgaacccgaaatggagaatcggggcccgacactcatctccggacagaagagcgtccctttaagaagagactggaccagctggccgcactacagctcccagagatttcctggcttgcagcctggctccaccccccacccagcctccggccccagcaacgcgtgacgtcagaagaggctggagctgccgattggctgaacgacgcagctaggtcaagtccagtcggaggaaagaagtttgtctccatgtggaaaccatgtgtctctagctgggagggggaggaggagaaggcggagaaaccgagatcaagtgattataggggaactcgctgaaatgaaggcggggaggttgtgcacctgagtcggccaacgatgcccttttgcagtagtgaccgaaaaaaaaaaaaaaaaagacgtacacaacaaactacccaaccccacccccaataataactactaaaaagctagggtccctgcttccttccagaaaccagggacccggtagatgctggaatcctatcggaacgcccagatccctctccctcccccaacgactgaatgatgtaagcgtttcggaaagcagagctctggagcaaaacaagccccgcgcgcgccgagcgacccgcagtgcccgagccgggcgcacgcacgacccgccccccgactcgcgttattgctgtgcacacgcggattgccgtgacgcgcgggcattgtgtgcagcgagcagaaaacaacgacgagcgccgccagcgcgaagaagcgccccccataaaacgaggcagatgtagggcccgccgttttccgtacccagagacctagaccgggcaggaggaggggaggagagggggtgggataaagtggcccccgtggaccgcttctctttgcaagggggataacagagggcctggcggatggtcgcacggagtttgccggaggtcaccccagcctgttcgagctgttggggacggggcgagggcctggagcggggtctctgcagccaaactgggcacggcgcggcgccccaagctctcggggaaatctgggggccgttggcatcacgtcatttagagccaaacagcagcggcgaaaagaagcaagagagctaaaaatactcccgccgggagccggccggaggaggggggctgcggggccgagggacttattacgcacatgaagttgacttagacttgggtgctaaggttccaaacccctctcgggggctggcagatttgcagggcggacgcctcgggcgatgggctgggaggaagcccctcggcttcaccagcctctggagcccggttacgccgccacgggcccgccccgcgcggggcagcccaagcccggcgcgcccggctctctgcttacgtgactggtggccacgccggagccccggcacggggtaaacaacgaggtggcggcggccagggcggcggggtggggggtggggggtggggcagggggaggtctccgattgtctgcgggtgcgaagtggggggcgggacgctgaggaatctccgaccgcctcctccatacacctcgctggtgagggggggtggctggggtaggggggcaagccaggtttgccacacactgccaacgtgccctcatggggtgtacccctagtcagagccaacgccacgggacagactccagagaactggtagccggggatgggggtagctgaagaaatcgcgcccctcccccctgcaacaaaagcaaacacaccaaacaaaaccacgtcttcacccagctccccaccagctctggcttttcagaaactaccctccagacaaatgcacacatagcttcccgcgccccatccccctccgaccagcatgaataattgcgaagcgattcggctgcacagcctgcgatgcgcctttctcgcaacccaggcactccgggaaaacaggcgagaagagaaagaaaagaacgcaccaccgacctcacaacacaaatcctcgttttggccttacagcgtctgcacaattgcgctgccaacacacggttcctttaaccctgaagacctggggtatcagtcagcaatggtgtttttgtgtctgagggttgttgtgttgggtggggggaaggttgcaagatctgacacgttgcaatcgggacctttcttctttctttctctctctctcacacacacacgcgcacacgtacacacacacactcgcgcctcattgatcttcctacttgttcggacacattaaacatcccggtttccccctatctgtcggtctgtctgcctagttcccttcctccttttcacagctattattctgaggacggtgctggatacgctgcacacgcgtgcccccgttagggcgctgagtcgactgcctggggaaagctgggtgacctggctggtaggggcaaaaatgaaacaaataaatacaaaaaagaagccaggccagggtggggttcccagcacacccccacccacgcactactatccacgtgaatctgggggtgggcgggtggggggagtagaaatcgaccaggaaggcgtttgccttgcttgccctgtgcgctcactcaagagccgtctcccggaaaataaagaaaaagcacagaacagcccacaccttcttccccaactattgtttctcaaagatcccaaagtttccttctagccgcgtccccacggccaagtttcccgggctcaggacggcgtgtccggggcgagctgctggcgttgcttggccccgccggcctccttctttgggggggggggggcggcggtggcaccccacggcaacggacgtgcagggggactgtgtccgtagacgtgatggcctgagcccagtcctgctgctagagggaaggaaaaaggcgaagtaggagggagagagagagacagagccgagcccacgccgtggagagctgtttggttgttattgttgtagtgtgtgtctgtgtgttttctttctggaacctctgagctctgcctatggtttccaactttcggcttctaatccccaccccacccaggaacgagcaacagaaaaacaacacttgtctgcctgagaaggctccggaaaaaaaaaaaaaaaaaaggaagaaaagcgacctcaaagagatgagctctcggctcagttgtcagcaaacaacaacactcccccgctcctccgctgggccatcctcccagccccagcccgccggagaggacagaccgacgcaccgacaggcccctctccccctcgcccgtctttgttacatctttagcagctttgtgcgtgcgtgtcc

SEQ ID NO: 913873 - DNA, 4001 bp, Homo sapiens
agctggaaggtgttttgatacctcctctaaaccaaagagtttatcccccctttccaaaatccttctctcccaagaacttgagatttcagatgctttagaacaaaaattttgtgaccagttaccattcacctcattgacttcgcttgcctcaaaaattcccctttactttcaactctctctgttctaaagagtctctttaagcccaatatttttgtgtacttcgaacaagtcttagaaagacattttctctctcgacaccacagtctccgagttcctggtctttctgcgccatctctacagccccttgggctgccaccgctaaagggaccccatctcatcaccccgcaggtattcaaaggcccctctccaccggttttcccccgctcagtgttctcccggcctcgtcccttcccctgaccccccccagcatccgtgttcctccttcctcttatctcccagcaccctctcccgctccggggccctccaagcttctccacggtcaccctctctccagccccagaccgccctctctccaacttccctccacccgtctccttcccgctcgccgcacacccacagccccaccctccgtgcgcaccctcgcacctcccccagcacctgcgcgacctctcacacacgcctccactcacgatctcagcacacacacctccccacgcacgcgcgcccctccccgcacccgcccctcccacacgcgcacgcccctcccacacgcgcacgcccttcccgcacacgcccctcccccccgcgcaccatccctcccacgcgcgcacccctcacacacgcgcgaccctccccgcacacgcgcgaccctccccacacacgcgcgtgcccctctcctcacacgcccctcccctaacgtgcgcacccctgccctcacacacacgcatggccctcccctcacacgcccctccccacacgcgtacgcccctcccctcacatgctcgcacccctcccctcacatgcgctcacccctcccctcacacacacgcgcgcgcccctcccctcacacccgcgcgcccctcccctcacgcgcgcgctcccctcccctcacacgcccctcccctcacacgcgcgcacccctccctcacacgcgcgcacccctccctcacaggcgagctcccctcccctcacatgctcccctcccctcacacactcctcccctcacatgtgcacgcccctcccctcacgcgcgctccccttccctcatacgcccctcccctcacgcgtgcgcccctcccacacgcgcgctcccttccccacatgcccctcccatcacaagcgcgctcccctccttcactcgcccctcccctcacgcgcgcgctcctcacacgccccccttacacgcctgctcccctacccacacgcccctcctcacacgcgcgtcccctccctcacacgcccctcccctcacacgcgcgcacccctccctcacacgcccctcccctcacacgcgcgctcccctcacgcgtgcgcacccctccctcacacgcccctcccctcacgcgcgctcccctccccacacgcccctccccacacacgcgcgctcctctaccctcacgcgcgcacacccctcccctcacatgcgcgcacacctcacctcatgcgcgcacctcacacgcgtgccctcccttaccggccgcaccgcactgccgaaaaagattagtagcgctcgggctcacgcagcggcgcccagccattacctcgctcccggcgctccaaaaactcggcagcctccagcagacgctgcacgttgatcatcttcacccgctccatgggcaccgcgggtggcgaccggcgcctctccgcactcccttctcgggccgacaggaggcgccgcaggcggctacggccgggcgccgttccggaacatgtgcgacgggcgggcgggccagctcggccgcggctcggcgcgctctccgccgcccctgccgccccagccgcgccagccgcgcccgccgtgccgcgggcagcccgcgcgtggtttgtttacctctccccgcgagcacgggggaggggcgggagcagcgccggggcccgccccctcccgcccctgcctctgccccctgggaaatgtagtcccgcacccgcccgcggctgccgggaatcgtagtgcacacgccgtttcagggcgcctgcgttccgcaagattcgcaaaggtcgtcggaaggtgtagtcccgctgggtttcctttcctgtctctagggaagactaagaagttgcgggactttgcttctgggagggaagaatttttttttcctccctccagacacgatgtggaatgggaaggatttgagcgagctgggagtctactcccggggaaacttgtttctcagcgactccctgcggttgcccaggggctgagacattctttattcgaagtatcatgttccagtcctctatctcctactttctcatgtaacttatgtgcctcagtttgctcatctgcaaaataagaagagtaacacacctgcaccaacagcgcacacagaaactggaaaagccaaaattgctgttcaaaaacgagggatgatttcatcagagagggtttccatgaagcccttcttccacctcagcttccacacagacaagtagttacttttttctttaatcttactttttaaaactttctcctctcctcactagtgcttttagacgccagaaaattctccctggtgcggaacagtttggttcaaatcctgactctgctacttacactgagacctgtgtgaactcttccagcctcattttccttatgtataaaatggatatgatcatatccacggcgttgagggcgtgccatgtgccaggcactgtactagacttagtttgcatagtaagagagaaacggacgcagacctgctctcgaggtttgtgtattcagtagtgctttttgcaaagattaaatataataattccagcacttagtatatactaggcactcagtaaatagaagcgatgatgatgttttctcttatgctctcctctgtagctaaaaaggaagttagagagcggagaccacattaaaagactaccactggccgggcacagtggctcacgcctgtaatcccagcactttgggaggctgaggtgggcggatcacctgaggtcaggagttcgagaccagctttgccaacatggtgaaaccctgtctctactaaaaatacaaaaattagccgggcatggtggcgggtgcctgtaatccaagctactcgggaggctgaggcacgagaatcgcttgaacccgggaggcggaggttgcagtgagccgagatcacgccactgcactccggcctccagcctgggcaacagagcaagactcagtctcaaagaaaaaaaaaaaaaaaaaaagccactgactgctcattcatggccactctctttctaagtcctccacctaaaaaatcctcaaagtctagaccagggtttctcaactttagcatcattgacattttgatctgggtaattcctccttggagcaggagctctgttccgtgctttgcaggatgtttaggagcatccctggcctctacccactagatgccagtagcacaccaccacccctcaggtgtgacaaccaaaaatgcctctagacattgccaaatatctcctggggcacaaaatccctcccctgtcccccagttgggaacaagggatctagggagaggaagaacaagagaatcgtacttgaatgctctaggaacaagctgggaaccgtgcaaacatacccataacttttttccaccccaattatattaacctgctgcttgacatcacatccaaaataacaggaagctcctggtgaggggggagtttccccctcccgtggtcattccattggctcctgcagaaaataccatcttgagatggaaatcttaccctcttaaaaatgttatcggcttcatgctgcattttaatatacctttccctcataccttttgttttcttacctttccctcataccttttgttttcttttttctt

SEQ ID NO: 913874 - DNA, 4001 bp, Homo sapiens
tttctcgcaacccaggcactccgggaaaacaggcgagaagagaaagaaaagaacgcaccaccgacctcacaacacaaatcctcgttttggccttacagcgtctgcacaattgcgctgccaacacacggttcctttaaccctgaagacctggggtatcagtcagcaatggtgtttttgtgtctgagggttgttgtgttgggtggggggaaggttgcaagatctgacacgttgcaatcgggacctttcttctttctttctctctctctcacacacacacgcgcacacgtacacacacacactcgcgcctcattgatcttcctacttgttcggacacattaaacatcccggtttccccctatctgtcggtctgtctgcctagttcccttcctccttttcacagctattattctgaggacggtgctggatacgctgcacacgcgtgcccccgttagggcgctgagtcgactgcctggggaaagctgggtgacctggctggtaggggcaaaaatgaaacaaataaatacaaaaaagaagccaggccagggtggggttcccagcacacccccacccacgcactactatccacgtgaatctgggggtgggcgggtggggggagtagaaatcgaccaggaaggcgtttgccttgcttgccctgtgcgctcactcaagagccgtctcccggaaaataaagaaaaagcacagaacagcccacaccttcttccccaactattgtttctcaaagatcccaaagtttccttctagccgcgtccccacggccaagtttcccgggctcaggacggcgtgtccggggcgagctgctggcgttgcttggccccgccggcctccttctttgggggggggggggcggcggtggcaccccacggcaacggacgtgcagggggactgtgtccgtagacgtgatggcctgagcccagtcctgctgctagagggaaggaaaaaggcgaagtaggagggagagagagagacagagccgagcccacgccgtggagagctgtttggttgttattgttgtagtgtgtgtctgtgtgttttctttctggaacctctgagctctgcctatggtttccaactttcggcttctaatccccaccccacccaggaacgagcaacagaaaaacaacacttgtctgcctgagaaggctccggaaaaaaaaaaaaaaaaaaggaagaaaagcgacctcaaagagatgagctctcggctcagttgtcagcaaacaacaacactcccccgctcctccgctgggccatcctcccagccccagcccgccggagaggacagaccgacgcaccgacaggcccctctccccctcgcccgtctttgttacatctttagcagctttgtgcgtgcgtgtcctttctccggtgtcatcggctttactgccaagggctggatgtgtatgttgggcgggggggggacgggccgagctcgcaacaggggtcgcccaagtgggcgagaaagaaagaaccgggcgccgaggaagagcaggggcccccaaacttacttttgttttctttctcgatctgctccaggtagctggcggcctcgagcagaatctgcacgttctgcagaaaagtgttgatgtgcttctccatcgagttctcgctggtgttgaaaatgtctgagaaggggcacctgggcttggccccagcggggtcctcgggcagggccgggggctggggcgcggccacggcggggggcacagccgggggcgcggcgggggccagccccgcgccctcgcagcgcgcctccttgcgcggccgcccgcgtttgcccatggaggagcgggggtccgccgagctcgtcctctaacggggctgcgcggcccggccgagctccgggcccccagggagacccggccggctggagcagagaaggcgccggggcgaaaagccggcctgacttcccgagcctcgctgcctgcagttgtgtgtgtgagtgtatgggagtgtgtgtcggtctcgctgtgagtctgtgtgtatgggagattgaatgaacctacaggacagacggaggcactctggcgcctgggtcctagtgcgagcctgtcgccatcggaccggtcaaaataaaaggtggagactagcgagcgaggcagggaccgcccctgcccgtccccgcaggcttccctgcctctccccaaggcttaccacagagtagaacactgtcttttaaccggaatggaaaaaaatacctgatgtctctgggtgcacctgcataaaaacaaactacttttttcacagaaaaataatgcctcagaaagtgtccagcacaatgcctggcacatagttaggtccccatacatggtggctgctatgacttaaaaataaataaataaaagctccccaatccaaatgggaagaagggaaccagtgtgtaaccagaagatccccccacccccaacacaaacactcctactcacagacacacatacatacgtaatcacgcacacacttgcgaggcacctgtgtgtgccttcacacagtcaaatgaaatcccaggccgtccaaatccgagttacagatttactcatgcctttctcccttcaaatgcaaagttattttccagaagtgggaggagatgtcagcatccctctccacactcctctgcccagccttggttcagctgtgcaaagctcacaccaggatgcctccacacctggctccctttaatttgagaggcagaagtggcagctcaggaaccacccccctccccagctgaattccaccttttgcctctgaaaacccctaccccagctgacattgtttcactgccactgctgtccgcaatcatggatgctttccagccctgggaagtactggaggtgtcaggggatgattgaaggctgctctagggtgccataggaaagggttcaaatcccagctctgctgcatacagactgtgtgagcttggacaagtcccttaacctctcttggcctaagtttccacatcattgaaatgtgtgataagatgcttgtgtattgtatctgacttagcacactctggcccatggtaagctctttttcttccaatccagacccaggcaagagcctgagtcccctattctgatgtaacttgtatctaagaaaggaacaagatgtagtgaacaagactcttctgcacttccttggaaaatatctctatgacaagcccatctaaatatggttactttgcaaggtcacctggagttttcctccaggggaaccatttatatagaggacaaagacaatgctgccccctggaggtgtgcgatgcagccaccctactcaaaggcagcttcatacacattgtcataaaaactcttgatggccggacgcagtggctcacgcctgtaatcccagcactttgggaggccaaagcgggcagatcacctgaggttgggagttcgcgaccagcctgaccaacatagagaaacgctgtctctaccaaaaatacaaaattagccgggcgtggtggcgcatgcctgtaatcccagctactccggaggctgaggcaggagaatggcgtgaacccgggaggcggagcttgtagtgagccgagatagcgccactgcactccagcctgggcgacagagccagactccgtctcaaaaaaaaaaaaaaaaaaagtttatcttccattattagaacaattactgattttttgcttctgtgagaaccacaacctgagttattcgtgttgaaatgcctgtaaacatctaaaaatgttaggaagacctcatgtatgcacagtttcaaacaagctttctccaatgccattttgcaaaaactggcccttgtgtgaaacagctctgatctctcttgccccaaatgaaagatggtactgagacaatgaaccagctaagcccagagaaaaccttgctttctctttaattgcccattggtggcatgggtcagatgtatagtactgcaacatacatgcaccaccaagacaggcacacgcatgcatgagtgccatggtgggggaagggtgttttgtaatt

SEQ ID NO: 913875 - DNA, 4001 bp, Homo sapiens
ttttaaaggactaagacaaatgaatgtaatttttcacatgctagacatctcatcaatatattcataaagcccatgttatctttgaaagcttatgcatctgtaaattttcccattttaaaataattatcttttataatgtaataaaaatcaatatggcacgaataacatgcacccaatttatctgtcaaaacttggcacttaggttctggcaaacccagaacacttgtcaattttatcacctaccgttagcaaagcttgaaaataacgcataacaatgctcagacgccaaaactttgaatactgtgtccaggctgcactggggccctgggcctgtaacccaaaacaaaaagatcatggctttatgggagtaaacattcaggatctggggaaaataatcagaagttgaacttagaaacttctaggtagaagggcaagacaaatagtttattcctcagtaactaagttttcgcacttttacacaatgaacaaggaacttaaagcccctcatttcatatgctggcattaaacaactctcaagctaccagatccgtctgaattataaaaatgcttaagaaggtttaagtgcacctgtacaattagttaattcaccaagaaaactagaaacaaccagaaatgaagattcttttgagttttcaaaaacgcttagtgtgtagggttcagtggcattacaacagtcatttcaaggcttatggccaatttccattctaacaataataaaattttttttctggaagggggatagtagcaaggtgcgagttagcaactacttggagaacagaacagagctgttggtgagcagacttgaaaggacatcctttcctggtaggtttctctatttctcaataatgatcatacttttcttgtctgctctttctccttaaaattaaaactcctttacggatgcatttggggttgcagggagcccagctccaccgacctgcttgttctgagaaatcacccggaacgcagttccctcagggacgggccgacccagcgccacctgtgggcggcgccgcaaagcccgcgcgcgccacaggtctccgaggcgacacccgccagactcggcgcctcctccctccagtctccctgcagggccccctcagttctcgcccctcgttactcttcgaggtcctccccttacgtttccttcccaagttcacccctaaagatcttccttcaccccttacgccacccttcccgttccctcctcctgtttccacttcacgttcacccctcccgttccctcctcaagttcattcctcacgttccctcctcgagatcccccctcactatcccctcgcgttccctcctcgggttcacccacaagatcttccctcaagtccacccctcaggttcacccttcccgttccctcctcctggctccccctcgagttcacccccgcccccgtttccccctcaagttcatccctctcctcccctcgagctctcccatccagctcgttcaagcctcacattccccctcttggtttcccgctctacttctcccctcgagtcccctctctcaccccaggccccgacaaacacacaggtcctccggatctgacctgggcgggcgggcggtcgcggcagcctcgcgctcagagagccccgggcccgccctgcaagccccggggtccaaggaagcggggccgtttccagcgccgcgcgggcgccgctacccaccgccgccccaagccagtcccctgcgctgtcccgacacgtacctgggcgggaagccgggcgcctccttatttctttacgggggcgctggctacgggcgctccctcgaggggcgggcaggggcagccgagcaggggaagaactgggccgcctgtagagggcgggccgaaggtcggcgggaggatctgacctgggtcaaccgagccgaaggggccccttatcccggctcgcggggaatattcttcctctcgccgctctctccactgcccgcaggtggaggccgcgccatccgcgccatccacatcctcgcagggcccttggctggctgccgaggggcttcccgggactccggccgcgcttccttggcccggagcccggcgagaagggagtggggcccctggatcctggagccctcatggactggcccagtgcctggagcaaattctgctcccggccccgcgtagtatcttcctcccaggaaattccccacactacgagggtctcggacccggaaaatgtaatgggtttcaggtccaagagggatagtgagtggctaatgagatcgctcccagggtccagttcccttttgcagactgctaaggagtttggggctggggctgaagttaaaggcaagaacttctaccctcgggaggcagcccgttagtcaccaaccctctacttggtcctttgcaatcctttccagaccttctgtggtctcctgtcacacagggctcacctggggggaccctgatggccagattctcttgaacagtctctagggacatattgggtattgctataccttcatccattgaacaggtgagaactacaaccaaaacatcctttgattctgttaattatctcaatgggtctgtcgttcatgttatctaaatgagaattatagaagagaccaaagagaggtcatctaatcctaatcaatgcatatcttaaggaaaaaatgtgatgttaaaaatctgtttcaaaaggtcattcagtatattcaagacccttcctcttaaagtagctttaaaatttagaaattgggccgggcgcggtggctcacgcctgtaatcccagcactttgggaggccgaggcggccggatcacaaggtcaggagatcgagaccatcctggctaacacagtgaaaccccgtctctactaaaaaatacaaaaaaattagccgggcatggtggcaggcccctgtagtcccagctacttgggaggctgaggcaggtgaatggcgtgaacccagaaggcagagtttgcagtgacggagccgagatcacgtcactgcactccagcctgggcgatagagcgagactccgtctcgaaaaaaaaaaaaaaaaaaattagaaattgaatagtggacttgtaatagggattatattgaatcaaaagcctaacatatatgaacagcttcaaatcaagaagttatctcatcaaaaacagatcacagcaaatatattattcaacataattatggccatttggacatacctgggagattttaagaattagagcaactgagtgctcacatgcaaaataaagtcacaatctcaatagagacaaacaacacccaattaaaatacaatagaaaaatagatcccattcacaatagaagcatgaaagaacatgaaataactaagaatgataaaaaatgagaaatataggagaaaagtgggaaaaaatttaaaaatgcaggattgttgacagactatttataattggaaagacactggaatcctaagttagaagacaagatgttaaacacataattactacctcccaaattaagagacaaatatattctagaattcatatgaaaactacagaagctagaagagctaagtccagtggttctcagagtgtggtctaggggaaatttgttgggggtcagggggcggtctctgaaaccatttcgggaggttcacaggaccaaaattactttaataataagacttttttccactcctttttctctcccattttttaaatgaatttatgatgaagttttccagtggctccataatatgtgatatcacaacagattgaatgcagaaacaggtaacgtcttctgttatgccagacattaaagaaatgtgcaagaatataaaataatgccattcttaccattaaacttttttggttttggaaaatacaggtatttttcacttaaaaatatgctattcatgttaacatgtaatgagcttagtagtgaaatatatttttaaaatttctcagttttaattgctataacataaaagttctttggagtcctcaaaactttttaagagtgtaa

SEQ ID NO: 913876 - DNA, 4001 bp, Homo sapiens
agatgggaagaaagtttgagcaagggaattataaccagcctgggcaacatagcaagacccagtcttattcaaaaaaatttttttaaattttttttaaatccaatttttgccctttagattttttttttaaccaaccaacaatttgccagcttttttttttttttttttttttttttgagacggagtctcactctgttgcccaggttggagtgcagtagcatgatctcggctcactgcaacctcctcctcctgggttgaagcaatcctcctgcctcagcctcccgagtagctgggattataggcatgtgccaccatgcccggctaatttttgtatttttagtagagatggggttttgccatgttggcctggctggtctcgaactcctgccctcatgtgatccacccacctcagcctcccaaagttctgggattacaggcagaagtcaccacacccagccagccagctttgagtttcatttctttcattttcttgctcatcctcagagagagaggtttaagaagagaaataaaggggaaaaacgggaaacagaaaggcgaaaggtatagatgcctcaggaactgacagggagtagcagtcaggctcctggaagaaacgagaaatgtagcaaggcatggtcaggaaacacatgtctatccatgctcccactctctctgcctttccctctctttcccatccctcttgccaagaagtgagttggcagtcttaccaatgacaaacaaaatagataaagcctccacactgagatttagaaaccccactttagccaaaactaagtcacttacatcaaattgtaccatgacaccaagcattcctgtcccctcccctgcaatggcaatcaagtgtcatagaaaaatagccttttaaaattaccatgagccttttatttttatttatttttacacccaggctggagtgcagtggcgtgatcacggctcactgtagcctcaaactcctgggctcaagcaatcctcctgccttggcctcccaaagttggctcagggttgaggagccactgtgctcagccaaccatgaggtttttagagatgatcttgtctaaacccttctcgcctgttttgcagaaaagaaaattgagatcccagagaaatgaagtaacttgcccaaggtcattcagcaggcaagatagaactagatccccaaattgcaaactagctgtccagagttctttcctcaatgagcaatttaaaagctacagaatgtacaaaaaaagctccccaacagtttagatataaaaacaattacaaaggcacaaaagggcaggaaaactcaataaaactatgaacttcacccatcccacctcccagaaacccagtgacaatcaaagcagcgtcaggctggttcaaggagtaatggtgtctccaacaatttaattgctcttcttcctcctttacccatttctcacaggcagagaaaaaatgcatctaagactactgaaacttactttgaaccaatacagatgtttgttgatacctgaaatttagtgattcgcaaatacgttttctgccaagagcttacagaaatcacactcttagagctaaaacatcaggtcattccatgagtctcaagccctggagaaaattaaatgccttccccagaaacgggtcctctcccctgtcctgcgcaggtaacaaacgctgctggagagacttggcttcatcagctgtctaaatgcagacttttcaagaaggtgactcaagaaactaacattccaaaacaggacttcagaaaaagaagaaaactttttcttacccttaaaaatgacagaaacaataggatccggcttgccaaatttcgttttagggatattgctggcagattccacaatcactcgcagcatggttcttagctggtagaaagcaagtttcagcaaacgaagtggagactagggcgctggagctccgggtcgcaccgccctgggagagaagttctctcccagtgaagggaggatttctcccagggcaaggaaggggaaaaggcaaaatgggtggacctctggcggattttactgaaggcaacgtgtaaactgataccgaactccccgcgtctacgcagtgccgcaggcacagacttatgaattcgggaaatgtggaagtgaaaaggacaaaccctaaactaaaaataattccgtgcgacaaatgaaaccaacatgaatttggagctaagaaatacgggtaggtcaggaaaccactaaaatgttgctgccttttagcaatggttcgtgaaactgaattaattgatttttccgtcactgctttcattcttttctgagtttcaaggagttttaaaactttagtcattatttgcttttgacttttcgctgttacttctcacgccattgaacacacccactcagtaaccctatgttcagcttttttaaagcagctaaagggtgcctcttactggacggcaaacgaatgacagcgtttatttcaagtaaacgcgatccaggcatgggatatataaataattacatatatgtataaataattatatatatatatatatatatatatatatatatatatatatatatatatatatatatataaaggactgaacatagaatttcttcaaaaccccttcagaggtgagagctgggcgcctaagttttcccggctcttcaaatgctgccaattgccttcagtgaaaatggagaagtgactccccactgtttctggacctacagctgcccatggtgtctttctgtcccagagggtgcatgaagacagtgcagcttggctgagatcacaagaggcggcctggggttagtcagccagatctgagtgtgagactctgcctcaccaccctgagctacgtcatcttagcaagtttcttttcttttcttttcttttcttttttttttttgacggagtctcgctctgtcaccaggctggagtgcagtgtagcgatcttggctcactgcaacctctgcctcccgggttcaagcgattctcctgcctcagtctcccgagtagctgggactacaggcgtgcgccaccacacgcagctaattttttttttttttgtatttttagtagagacggggtttcaccatgctggcaaggatggtctcgatctcttgaccttgtgatccgcccgcctcggcctccgtggcttgagctttactggcttgagctttactggcttgagccaccgtgctggcgagcaagtttcttaacccctctcttcctcagtttcctcatctatgaactggggataaaggctgttataagataaaggtcatagcataggagctggcacaaagcacacagtaatttgcacatgtaagaagttcatgcttatttgtggtctcacagcgtttctgttagtgcaggctgactttaaatcaggatctcgttatatttcagaagaaaaggctaaaacttgggatgaagaaacattgggcttctttttgctttagaacacacatcaagcagacccacctgtaaataaacatttcaagtacattgaataagcatgacttaacctacaagaattcttctgtctccacgagtttctccaaggcttaaagcaaagaaccaattacccagtgctgtgttcattattgtatttagtggacatgttggcagttttagtggaatatagagattattacttttattttatctggctgctttctatttgccatttttactgtgaaatatatttacagaaaaatgcatactacataaacgtgacagtttaacaagcatccaggtcaagacagaacattgccagtcctccagaagcccctggaataccccatatatcatatccacctccttctcccagaggtaaccactctcctgatttttttttctttttttagatggagtttcactcttgttgcccaggctggattgaagtggggtgatcggctcactgccacctccacctcccgggttcaagcaattctcctgcctcagcctcccaggtagctgggattacaggcgtgcactac

SEQ ID NO: 913877 - DNA, 4001 bp, Homo sapiens
gaaggtgttgaatcttttctctctttctccttacccttcttaatcttccctctcccactccccatcacccgccttcccaccacttaatttctcttgtttgttcaccctaagatatatatttctgggactcttggtttagggatgctcttaagaagtcccacactagggagatgcaaacatgtcctacctccagtgagttccatgatcagcttgctggatttcctcttcttattaggggccggggttcctgagagcggcattgtggaggtggattcagcctggacagggtgggaaggaggagttggtggatggacagggactgggaagagtgagtgtctgtaggagagcagcacttcttaacctgggtttaagggcttgaggggacaaaaaaatttttttttcttttttagagacaggatctcactctgtcgcccaggctggagtgcaatggcacaatcatgcctcactgcagcctcaacctccctgggctcaggtgatcctccaacttcagcctcccaagtagctgggactataggtgcgcaccaccgtgcctggctaatttttgtattttttgtagaaatgtggttttgccatgttgcccaggctggtctcaaactcctgggctcaagcagtcctcctgcctcccaaagtgctgagattacaggggtgagccacttcacctgacccagattttcaaagaagcatgtatttccccaaaaggtgaaaacttgcgctttagggcttctcttttcttgggatacaggacaggaagtatagatgcacaccagcccctgttgtctaccaacctgttgtgagctgtttttcatagagtcagtgcaggaattaggaacatagctaggtgtggggagtgtttaaaaaacaataacacaagcagggcaatgcacccaggtttcattggcttggcatgatttgaagtttttatttgcactgggatatcagactggggctgtgattccaggctctggtctctcctcagtcttcccccagtccccaggaggacagagaaatattctgccagggttgaggagattcagccaaaaacactctccataggaaggagaggttgttgctccttcatcaggccagctggaacatggcctgggaagtcatggccctgctcctgcaatcactcccgccacagaccccagagtggaggcaggtgtggaactgggaagggtagggagcattcaaatcccgacacgtcaattcagcaatatcatagcagtggggaattgaggtggggcagaaacatagtaataggatctggcaatggaaagggacaaactgggataagatggactccaatcccttcttaagagaagttggcactcagtgaaatgctgtcctcttctaagtcctgtctcaaaaaatacatctgcaactctactgacttagtggggtctcccttcccattcttccagtgcctcccccgacatctccattccccccaacctcctgggcccctctccttccaactctccttcccctctccttccaactggacagctgggagctgagcatagatgaggagaggggagactcccccaggatcaagaatcacaattgtagacacagacacagaagtcaacacagtgggctccagcctttctaacgatagagctggagacttaccggctgctcgggcagtggtcagctctccctggggtccagcagctttggaggactgagctgctgtgaccggagaacacgagctgggcaggcgtgggggcagcactggcagtgggggagggaagttggttattaatagagatgatgagcgcaagcagctcaaatggcacagggggtactgagaccctggaaccaagatccctccctccttgcccggaggctcaggaaggagggaaaaggcctttgggattctcccactgaactgtctgagccagggatcagtctgcccagggactccccttcacattgcacctagagcctgagatccaaagaagcacttagggagaaactgaagactgagagggagacaggaagtagacagcaagtattggataggaattcagtcagagagagagagtctggggaacatgccctgagggccacacagagccaatccagggcagagtggagagacctgtgggtgtatttggagcagggagggcttaaagtgctatatttggggacaaaaagggaagtcttcacagtggaactgctcttttaaagttcctggataggttggtcttttctcggtaagggctagatcttggcaggttaagggaccaaattaactaaacccagtacctcctacaaaggaatgatgtggggaagacttgacaattattctgtctgcctcactccctattctttcctcttgagctctggcagttttaataaaagacaaacacttggatctgcatttttttttttttttttttgagatggagtttcgctctttttgcccaggctggagtgcagtggtgcgatctcggctcactgcaacctccacctcctgggttcaagcaattctcctgcctcagcctactgagtagctgggattacaggtgtccaccaccatgcccggctaattgttgtatttttagtagagacggggtttcaccacgttggccaggctggtctcaaactcctgacctcaggtgatccacccacattggcctcgcaaaatgttggaattacaggcgtgagccaccgccaggatctggtctctaaggagttattctctagccaccacgcccagccaggatctgccttttaacctccatttgctgttgagatgctcagttcaacctgctgtgcgggatagacatcgatgtctccctgagaagcacatataggctctctgaggtttcttttcttcttcttttttttttttttttttgagacggagtctcgctctgttgcccaggctggagtgcagtggcgcaatctcggctcactgcaagctccacctcccaggttcacgccattctcctgcctcagcctcccgagtagctgggactacaggcgcccaccaacacgcccggctaaatttttttttgtatttttagtagagatggggtttcaccgtgttagccaggatagtctcgatctcctgacctcgtgatccatccatctcagcctcccgaagtgctgggattacaggctctctgaggtttctacttgagatttcctgcaaagggagcacataccacataggatctggactgtgccatttgtactgttccagcggagtctctgggcagggccacaggcttgaaagcccctttggggaaagcctatcatttccccaggcccttcttcagtagctgcatgatcttcctccaccttctgcttagattctggaaccagttgctgcagcacttctgctgcagccaccacaaccctgttgctgctacctgaggaagtggctttatttatttatttatttatttgagacagggtctcactctgttgcctgtgctgaagtgcagtggcacaattttggctcactgcaacctcagcctccccaggctcaggtaatccttcgacctcagcctcccaggtagctagggctgctggtacatgccaccacgcccagctaattttcatatgttttgtagagacagggtttcactatgtttcccaggctggtctcaaacacctgggctcaagcaatcctcctgtcttagcctcccaaagtgctaggattataggcgtgagccactgtgcctagctggctttttaaaaaattatttctttctttattttagagatgggggtctcactatgttgcccaggctggacttgaacacctgggcacaagtgatcctcctacctcagcctctgagtagctgggactacaggcacgcaccaggaagtggcttttgtaacttcctttgtccccttctgagctctttactcttcctgaccatgtcctttttccatcctgtggagaccctaaaaggtatcccctcacagttggcttctgcccaggctagttatgcctccagacc

SEQ ID NO: 913878 - DNA, 4001 bp, Homo sapiens
tcaatgtacagatttattttttctcttacctaatcttgtgctgatactaatgtcaagaccacttaattgtccttctgcatattctatttatgtggatatgccaacaatttctttttatttaaaaagaggatcttcctccactatcccactcagatcttaagccgtaatcaatgttaagtgctgctgggtcttgggtaggtctctcccatgggagaatagaacctctatttcaggtggctagtaaaggcaatgtttaaacacactataagtaaacacatttttactttcctgcaaactgccatgataagcctggtattctacctttcacccaggtatagaatactaaggttgaaggagactcatactaaaaggtagaataaagctggttgggcagtgaaattaggaatctatatgaagaattaaagtaggtttaaaatgcaaaagaagagttacagaaaaaagaagccggccgggcgcgggggatcacgcctgtaatcctagcactttgggaggttgaggcaggcggatcgcctgagctcaggagtttgagaccagcctgggcaacgtagcgaaaccccatctctactaaaaatacaaaaaaaaaaaaaaattagcagggcgtagaggtgcatgcctgtagtcccagctccttgggaggctgaggcaggagagtctcttgaacctgggaggcagaggttgcagtgagccgagatggtgccattgcactccagactgggtgacacagcaagactgtctcaaaaaaaaaaaaaaaaaaagaaaagagaagccaaagacattctgaatggcagtcatctttctcttttcatttttactgcaacattttcaaatacagataccatacacaatttttgagctctttgaaaaaaagctgaatataaatgttttaaataaataatatttagtaattgtgaacactctggttatagtacatcaaacatattttagattttagtttttaaaaactaatttctgcttccaaataacccagctcctgccttgcttatcttcagttgtaattgtataaacattatatcacaaacctactagttcaagatttcatcagagtttattgatacaaaaaataatctttaaaactttctaatgcccaacatagttaaaaacaaactttgttaagtggcaagcaaacacaaggttggttacatgtcttaagccttccccataaagttgagtggctcatccaacacatgtgtttcttgtggtttgaacacgatcctgtgcttgccttcagctgttttcttaattcagtcagtcagccacagaaacaatttactcacattgggatgatccacaggaatgccaaggaatctggaagttctatggcagaggaagtcttcacttggacggtaagcatgggagaatttccatgctagtagattcatataaaatgtttgcatttgctatttttttatatcgctataggctccagttctctaaaacaaattactcacatataccaaagcttcaataagttttgcttgaagttcatagattcatcttgacatatccagtatcagatgaaaaaactaaacaaaacctctatgccgtatttttgaaaaacagagaaagtatgtattttttagccatttttaatgagaaaaattttcacagcaaagacaagttcttgactatccaaaacaatagatgggtggtggattataaaagatcttatataaaaggcatgacaacaatataattgaaaaagacaatgaaatcactaagaaatttctttttcatctaaactactgaaaatgcttgcctgggaaaactaaaaacattaaaaaaaaaaactaaaagttcaaaacccacttagttttaaaaactaaaaacatttttaaaaactaaacagaacacccactttaaaacattatcctgagaagtaaatttgtggttacctgtctcaggagaagcaccattcctatatcaatcaaccaggatcatctaaagtccaaatctcactgcctaacttgtgtcagacacaaaagtgccatgaaggaaatgtgatactgccccgccagagtaatgaagggtatttacagggttccgttgcagatccagggacagtcatttagaacagattgctctttcagatcaactttaataactcagtctgcacgatgttcttagcctgcagggctggtgggggtggataatgactaagatgactaaggaaataggctttcttgatttctccttagtctaaatgaaaataagagtgaagaaattctcaagaataaagcatatggaatacataagatatctatacacaggatgcatattacatgtataaatatctttatctggtaccaaactgggactatggtcaaggcatttattaaggtaaatacgaaaaaacaatcaattattacaacacttcctgtttgttcccctaattttaaggtgattaaattaaagctttactgtgtggtttgcattaaaacacaacaaagcttcctttacttgttcttttggtatgtagtacatatcaaagtttacacttttcaaaaagtattatttccaagaagaaaatctattcagaactttttaaaagagcactctgagactaagttactgaagaaatctggaacaattgttaccatgtatgtactcctcaaggtatacagttaaatcctacttctcaccacattaatataatgattatattaacacacataaatatactatagtcttggtagtaataagttaacattccttagctatgtgcgaggcactatgctaggctctttgtgtgtgtgttttatttaatagattcctttaacgtctatgaagtaggtactgttataattctcattttacagatgaaaacttgaggcttagaaagaagtttaaaacttgcccaaggtcacacaacaagtaagtgactgagccaaaattgaacctgagtctgtgctcataaccactgcaaatattcaaatgattatatttccaacatatttgtgaaaaattcaaggtaaaaatgaatagaaaacatattaggccgggcatggtggctcatgcctataatcccagcactttgcaggctgaggcgggtggctcacctgaggtcaggagttcaaagccagcctggccaacatggtgaaaccctgtctctattaaaaatacaaaaattagctgggcgtggtggtgcgtgcctgtaatcccagctacttgggaggctgagacaggagaatcacttgaacccaggaggcagatgttacagtgagccaagatcacgcccctacactccagcctgggcgacagagtgagactctgtctcaaaaaaataaataaagaaagaaataatagaaaatatatctttcttttagtaaatattctaagggaacactatatagggtttaagtttgtaatttttctgactgaaaccgaccctgacattattttgtatgactaagcaaacaaaaagaagtgataatttagaaagaaaaaagcaaatgcttgcaataaactctacatgcaatgttttatctgggaacatgaattgatatgtagactggagttaggcattattgctgaaaagtggggcattggaagcagtcagaatgctatgacagacctattttttcatttctatttgttataattattgtgctgaaataatacaagaggtttgttcttttaaaactaaatttaaatgctttggtgttatttctgagcacagcaacatgggtcaataaagtttttacaagttaggggtaggaaaataacagcttgaatattctctcttcataaggttagctcaaaatatgccaatatgccaggatctgagtgattccacacagattctatttttggtctgcttggacatctccaaaaactgaaaacaaagttcagtgttcttactcatgacccaggtaatcacactaatgttaatgatgtgcgggaaaggaaatgggaactaacatttcttacaagtgtattctaggctggggagtagtctaagt

SEQ ID NO: 913879 - DNA, 4001 bp, Homo sapiens
caacatctttgtcaaatctcaatgtgaatgaaaaaaaaattaattgttctagggttggcaggagcatttgacttatattttcaggttagtgaactgagtctactattcctattacgtgtaggaactaactgttgaaaaattgaactctcactttttcacataccaacattagttcattaaaaccctttcaaaatggaacctgatttacctgttgtctcatatgttcaaaagcaaatttgcaaaaactaccactatgaattccaaaaccagcttggacaaaaactcattcaacttcttgtgtccataaattgtggttctgtgtctgttctactgaaagtgcctttgtaagcatattgtagtagtgtctatattataaattgtagatatatggaagactggggttttaacacattattatgagttccagtagcattagccatatactataagtggggatagagacacacttccagaatttggatagtgttcaactgtttgtttcatagtccattattataagattctgtaaggcctataattttatctcttgacacctctgtaagtatattatccatatatttcagatttcttgggatggccttgattttaaatattttgcttgttgtcaaatcatgtgtcggacagtatatcttattttctgttttaaaaaatatgtttatgatagctgtaagtatagacattctcaatttcctagaaaaggattatgaattttatgtgaactcaagagctgttattattaaggagagactataaagttatgacaaatttttaatttagtgtttgtaggattcatttcattattactaaagtaaaagtaattgaatcatacttttttgagaaagaaaactggatgactgtgttgtttctttcaagctgatgttaatatctttaataagcatataaaaatctgttgataagttactaaaattccttaacaccattactgtaatgttcacttttgaggactggaaatacataataatccatcttttctctgtctttgcttatacagtttttaaaatttaactcaagatgtgcatctattactgctaatagtgcaatgtaccaggccaaacatttgccactgactgtcaagtgtctttctgatgcagctgaaaagggagagagagaaagagacggagagagagagagagagagaaaggagaaagaaagagcaatgtcccttgagcaagactttctgcagctgttgtgtacattaatccagggagcagatctcccaacactaaatatagcaagcgtatccttttacatgataaaaaaatttaaaatgaaagtctttatgcaggcatattattttagattcaacttcctttaaaaaggaaactggcattgcttacatattctctatataaacaacattcttttaataaatgaatgtgtggaaaatgccaatgagatatgcaacatgtcacaacttcttctgttgagatatttttccttaggaactcaagtagtctgtgatctctgtgagtctcatcaatcccctccaaaatctttacatgtggaaagctttatttttcacttaatttcgtgtcccgtcatatgtaattagacagttatcctaggtttcatttcaagtaacagtaatgagttctttgaaatattcgcttttccactgtcagtgccctgttatcaaaacacacttgtgaacttaaatctggatattacctttctttttttagttgacccagatgaggatgtccaatccaggcactccactgcaatgataattatccagggagaacttttagatgaaagcacaggagaagagggaaattcttcacgcccttggaaatagagagtagccgtccatagagagtgaggagttaaccttagtttcagtgaagatggctgtaagaagctggacaacctgtcaccaccggagccagagcatttgtcagctcacaggtcccaagttattttgagctgtataaaccatgtgcctgtgaaacattccacctgattggacaggagaaaactgagcaaagggattccatagcaggacagcacctatgggggtgggggtcaatcagttcttttacctatagaatttcccttatagctagaggcccatgttatttattgattgacgtttggaatgaacactaaatgcattataccatagttcatcattcaaaaaaatggcattatttttaaatgtatgaaaactcttcattttaatttttaagatctttaattttaatcaataggaaatttactctcattaaatcactgatacattttaggacatttggctatgaaaagccaacctgaagctaaggtctaacgttttaaagctgagagcttttttggattgttcgtccaaaggctaagcaaaagcagacaaggtaactaacgttaaaaattccttggctgggcgcagtggctcactcctgtaatcccagcactttgggaggctgatgtgggcagatcacctgaggtcaggagttcaagaccaggctggcctacatggcgaaaccccgtctccactaaatatacaaaaattagccaggtttggtggcgcatgcctataaatcagctactcaggaggctgcggcaggagaatcacttgaaccggggaggtagaggttgcggtgagccgagatcacgctactgcattccaacaagggggacagagcgaaactctgtctcaaaaaaaataataaaattaaaaataaataaataaataaacttgaaaaaagttaacctgattgcttagtatagattaaatgatgctataacattatcaatcatggtagaagacaggactttgaaaattcagacttaaatgatggttattattctttaaaaagatcattcttagattctgatagcatgaaacacattggtttaaatctagctttcttaattaagtcatacaactgcttatagggtttcttcctagtcattcattcatttgataattattttcgtaatgcctactgtgtaccaggtactgagtataaaacagtgcacaaaatacacaaaaatttctgacctcgtggaatttacgaagagatctttatcctcttcagtcatcgtgagactattgatagtacattgaacagatataaaatttctttgcttattgtgatcacattggaggtttaattacaccttttttatgtggttttatgcttacacaggcaaaaaaagatgaagaacacttttaaataattcagattgaaataactggtattgaggagagaagaggatacaggaggaaatgaattatctgtacaggttattctcattaccacagtaacccagagcttcaatgtacagatttattttttctcttacctaatcttgtgctgatactaatgtcaagaccacttaattgtccttctgcatattctatttatgtggatatgccaacaatttctttttatttaaaaagaggatcttcctccactatcccactcagatcttaagccgtaatcaatgttaagtgctgctgggtcttgggtaggtctctcccatgggagaatagaacctctatttcaggtggctagtaaaggcaatgtttaaacacactataagtaaacacatttttactttcctgcaaactgccatgataagcctggtattctacctttcacccaggtatagaatactaaggttgaaggagactcatactaaaaggtagaataaagctggttgggcagtgaaattaggaatctatatgaagaattaaagtaggtttaaaatgcaaaagaagagttacagaaaaaagaagccggccgggcgcgggggatcacgcctgtaatcctagcactttgggaggttgaggcaggcggatcgcctgagctcaggagtttgagaccagcctgggcaacgtagcgaaaccccatctctactaaaaatacaaaaaaaaaaaaaaattagcagggcgtagaggtgcatgcctgtagtcccagctccttgggaggctgaggcaggagagtctcttgaacctg

SEQ ID NO: 913880 - DNA, 4001 bp, Homo sapiens
tcttctatttgtttgacaggcaacagctggaatgggctttcctccactaggaaccctgaaattgagtaatctagggtgaattaatactgctgtcttcccttcctccctttgatcttaatatcataaacgtttttaaagaactggaagagggtgagtgtgtagagaaaatgccaagtaggaaagttacaggtgagattaatgaattcatactgttactgtataaatacacaatttttttaaacagcaccatttccaagttatacacaatatgattatgacttggcacaacttttaaaggtggaaaaggctagttgctagttcagtaataaaatacctggtacatagaacgataaggagctgtattctacctgctacacattgtgcattttacacctccagctaggacagaaacaagccacaagcggggaatacccgcccaaattaatactggaaagtttacaaaaccttcacttctcataagggtgatgctaccagcggcttgcttcacctggaattagagtaactgatttttaaagacaactgagaatattaactcgcttcaaacaataaaatagtcattttgccgacatttcataaaatcgccagttttaagctcagttcagaggcttttaaaaaaatattctagacctagtaaagtgcctccattcataaaatgaaacatccaagattgagacaatttcatactgatgcgcatctaaaataggtcgacgtatacagtaaataaacagcgcctctaagttgccatatttcagttagtggaatacacacccagccttcgccgttctggatgtgcaaactagaaactgaagacaaatggggatttcagcgtctagtcccaatcgttcagcacggaagtactccacacggtcggctgcttttcaaaaaccaccaggacgacgtcccatgtcgagccgaccgctgagccgcacgcctccccacggcgggggcgagatggtgcgcagacctagcggtgcgaggggcggcggcgaccctgggcggccgggagcccgggccttcagcgcagcttcttgccaggcgggccgtccctggcgctgcggggcggcgggcgggcgggcggcggcggcactttggagagcgggcagtacttgatggtgtgcgcgttgtcgccgctggcgccgcacaggggacacgtgtagcggcgcagcacgggacacagcactcgcccgtcggggcccttgaggatatgggtggtgtagagcgccatcgcctccttgttgttccggcagaacacgcacacctgcagctcgggcttcagcagccgggcggccgccgccccggaggccgcgtgcagccggggctcggccgcccacgccggggcccgctcctcgcgcggcgtcgcctcgctggtggtggtggcggcggcggcggcggcgggcgcgcagcccagcagcacggcggcggcacgacccgcgaacgggctcagctcggcgaagcgctcctccagcagcccggcctcggcggggcccgcgcacagctccagcgcgcgcaattccagcgcgctccccaggtagcggccccgggaccccggctcgtcgctgtcgtcgtcgtcgtcctcgtcgtagtcgggcggccccagcgccggccccagcgccccaggcccggcccccgtgtggggggagcagcaggacgacgaggaggaggagggcggggagccgccgccgccgttcccaccgcgggcgcagccgaagcgcggctcgccgtccaccgctttggtgatgagcgtggcgagccccaggtagtcgttccaggagctgaagggctgcgggtgcgccgggcccggggcgctcacgtagcgggcgctgggcacgagcgccatgggcgggggggcgcggccgcggcggggcgagcggggcgcccaggggaaagcctccatgggcgggctgcgggccgcgcgccgcctccccgccgccggcgcgggccggacggaagggacacgccgagcctgcccgccggcctgccgcggggtggggccgccgcgccgccttttatcgggcccactcctccccgccccccggcctcgccgccgcggccctgccccctgcgttcccccgccccggccacctcgcccgcgccccggacggaggcggagcggaggcgggctggctgtgtgcgcgctccgctccagcccgcgcggctcccgcgccccgcgcgctgcgccagcctcgccagctgtcgggcggccttcattccgggagggggcgggcgaggcgccgcctcgagccgtggcgctcattggctgcagaccagagccccccggcgcctcgggcgccgctccggacgctgattggtgggaacacggggagggggcgtgttctccgcgcagctgggaggtgaggagaaagtaggggagagaagggccgggaagggagggccgctggggcccgcattcgagcgccgggcctgggcttggagcaggtgaccaggcctgggtctcctcggcctggtggtgaggccccccgaggacaggggtcagggtggccacaggtttacgcccccacctcccagcctttaatggccctaggccctaatcctgagaatccccgctatccacccccttctcaccaacatcagcatgaaaagctggacgcgttggaaggatgcagctctcccatcacagccgcccaaccagccagtggcttccgtttgcaccgcgcgttggagcgctttcccctgggcgaaatccatacaaaccctgaggttcggggaggctgtggttcctgccgcggtaagagcggagggacgcaggactttccggctgcacgcagcagccttcctcccaacaggtgctcagggacttcagccaatgggtggccgatagccggttacttaggtcggggttggggctgggccggaaaatctcatggctggagagcctaggacagtgactgggatgtgtgtgtgtgtgtgtaccccctcgccccagaggcctgagtcaaaatgtgggttgtatgtgcagtttgaaaaacaacgtgtattcaatgttatattttgtcttccttccttccttccttccttccttccttccttccttccttccttccttccttccttctttccttccttctttccttccttccttccttccttctttccctccttccttttctttctttttttttcttttctttccgcatcccgggttcaagcaattctcctgcctcagccttccaagcagctgggattacagatgcccgccaccatgccgggctaattttttgtattttagtagagacggggtttcactatgttggccaggcttgtcttgaactccagacctcgcgatccgcctgccttggcctcccaaagtgttggtgttacaggcgtgagccaccgcgtctggcctctttctttctttctcactctttcttttttcttcttgatttttcttttttcttttttttttttcttgagacagggtctcactatgttgcctaggctggtcttgaacacctggcctcaagcgatcttcctgccttggcctcccaaagtgctgggattacagacatgagccaccacacctggcctcaacattataattaaatactttgaaatgaataaaacatgttgtgtaaaagccatggagaataagagccagaagatgagttttgattaggaagatggcaggtggtcttacacttcccaacttttttaaaaattgaaagtaggaaaggctttagatactgagggctcttctaggatgaaacctagaactgggatcaggaaaatgcctcccctggcaggtgggccctggcagggtgggcttcatggggcagatggggctttccttcctcactctggaccatgcagtggctgtggaaacaatgagccctcactaggcctgaggccacactcacaggtcttggctgtgcccagcaggtttagaatggctcagcaggggatgcccagaacctagtgctggcattggttaatattagaatgaatgaatgagggaatcagaa

SEQ ID NO: 913881 - DNA, 4001 bp, Homo sapiens
tattgagtacctaaactgacactactgtgatagtccctgagaacacaatggtgagcttgccacctagaggagaactcgtgtcatagattcaccaaccaagcagaaaatactaattctttgaaataagagactgagttcaaagtccatcagcagcagcaatgactggctctgaatgctaacactatgtgagggaaagtattataaaacactaacttagggactctcaaccgggggagggatatgtgtcaggatatcctatggagttttatgaaacccctacaccggatcctgagattctggcacagctatactgatttaataaaaaaaaaaaaaaggggggggtgaggggtactatgtagttctaaaatatcttctctccctttgagaaggacatcttcctccccttccatagctcaacatgtttttccatttccgaaatgcctgtttgcacaaaggtaataatgtaattgtagagatttatttagataaaaactaccacaaaactttcaaagagtaggattttccttagagacccaaggacaaaggctccctggaaggcaggaaaggagaaaatgaaaggaacgttattgtgctggactttacatacataatctcatttacttatctgaacaaatctgcaagctagcaaatcttcaaatgagaaaaccaagtaaattgcctaagccactgcatccttagggtaagtctttctcaaacggtctcaagtactttaaagtttggaaatgtcacactaggatctcggtataaaaatgggccaactatgacttcctgtgccatcctcattccaataagtaactcaagagtctctataaacttagttccaaattaccaagtgcgtggtggaaagctaagtccatccaaaaggcaattactgtggtgaacccgaccctgattagaaagtgacacaaaaaggcacagttaaaagtaaaaaagctctgcctttggggtcagataaattcagcactctgacttctgtcattctacttctgccattcttgatggcatcattccatgttaaatcccgtgccacgtaagattatgattattgttttccccacaacaagaatttagttccatgagaattaggtgtccatttttttcattgctatcctcaacatcctgaacatacaggcaccaaataaatgattgctggtggaatgaaccaatgaatgagcaagccttactcttctcagctgtaaaacagagataatcaagctacttttcgggattattgggagaattaaatgtgacagtatgtgtttggcacacagagggccaaaaaaacccaatatcttctttgcatttccacctgacaagctagaaatggattatgttctgtgcccgtccggcaaaacagacctcgcctcgccccacatccaagcaagaggcgagagaaacaggaaacttggagctgtcacacctaaagagaggggaaggccggcggggagcaggaggtgtccgagccgggtgtgaggagggtcggggaggaaaggacaggcccacggccgggcacgaggagggtcggggaggaaaagacaagcccgggcccggcgtgtggcgggaaggcgagaacgtaggcccgggcccggcgtgtggccggaaggggagaagacaggcccgggcccggcgggcaggcaggaagaggtgcccgggcctggcgtgtggaggggagggaagggaaggagaaggcagaccggtcccggtgtcggtcgggtcgggaaggggcggacaagcccgggcccagcgggccagcggtcatcgagcctccacccggcccacagcgttcttaccaggtccgagtgcctctccaggcgatccgaggagaccttgggtggactgagacacggccccacactaacctacggcccaaaggcagagttctcgcgacaacacaatcttcctcccacacctctcgccatacgtctgacagtctcgcgagatctccgctcgggtcagccagaagcccttgactgccctctaggaggcgcagagcgcaggcgcacactccctccccgcccttgcagtgtcctttagtccttcgtgaataaatcgaaattaaatgaagcaaatgcttttttgaaggcaaatttggtgccaaggaccatcctaagtgattcagatggcctcacaaggtagatattatttagtttgaacattcagatgcaaaaatgaatatcgtaagacacaaaaggccatatgttgtatgattccacctttgccacatttgtttttctaaggattgagttaataggccgggagcagtggctcacgcctgtaatcccagcacgttgggggccgaggcgggcgaatcacgaggtcggaagatggagagcatcctggctaacacggtgaaactccttctctactaaaaatacaaaaaaattagccaggcgtggtggctcgcgcgtatagcctcagctattcgggaggctgaggcagaactgcctgaacctgggaggcagaggttgcagtgagccgagatcgctccactgcactccagcccgggcgacagagcaagactccgtctcaaaaaaaaaaaaaaaaaaaattgagtaaataaataaatggcagaacccagattctttttttcttttcttttttctttgagacagggtctgactctgtcgctcaggcgcagtggcgcaatctcggcttgctgtaacctctgcctcctgtgttcaagcgattctcctgcctcaacctgctgagtagctgggattacagacatgcgccatgatgcccggtttttaaatttttttgtagagacagggtcttgctgtgttacccagactggtctcaaagtcctgggcacaagcgatcctcccacctgatctaggattacaagcatgagccaccacgtccagcctacagcccagattataacccacattatttacttgtgactagatgttaaatagcacttctttctgtctcagttttgacagaggtcctccatactcagttgccaactgcttccccacattccgcagcaaaggaggtgatcatagcagggttttatggatctcatccaagagtgactctgctacaaggggcaaggcaacctcattagaaaacaataggagacatagattacgatgcagaagctaagataacagtcataggctgtgagtggaaggggagctgtggagagagaagcccacaaaagtcccatgaggaagtcagcctagaacatgacctcaggcagaaggagcccttaactctcctgtcccccattccctctcaattcagatgcagcccctggaatgagactttgtgtaactcaaaatgtaactcagaccacttttttaaattatctgaaggtgaacaagaaagctaagggacctgtctagattgctcaactggcccacatagcatgtttaaacagataggggacaggggaaaataaagctctttatcagttgcccactgattgttcaacagatgactgtttgctcatttctgatctgtcacgtacacacagctgagtccaagccccaggagaacagggttctctcctgaaatctctctggttcactgctgtatccccaggtctagagcactgcctggcccaggtgctcagtacagacctgttgagtgaacagatgttctttaacacagaaacagttaaaagagaatcaatgttgtcgttgtcttaagccactaagttttcggtggtctgtgtgtagcaagaggtagctgatgctggggccttgcacccaggccactctccatctgcaaggcagagcccctggcctttaattcccctcgggctgcatgtggtcttgggggcactttcttcaggcttgttctaagctgttttacaggcttgttctaagctgtttcttgttctaagctgctttgacctcaagcaaacacagaggaatgtgggggacacatcatagaagacacttcctgatgaagaggaaggagggataaacaggaacaccgtaaagaaaagaagggatctaattccagcttga

SEQ ID NO: 913882 - DNA, 4001 bp, Homo sapiens
gtctcaaaacaacaacaaaaaagaatataacagatatagagatacatgttttatatagagagaatatatgtaatatataatatataaaagaatgtgcattatatgtaacagattatatgtgacaaaatgatttcatgattctcatataaaggagacacagaaattggtgtgggtaaatacagagttctctaagaagcttgggtttaggagcgaaaggaaacacaaatgggaagaacagcatataatgataaaatgagactgtaacacatgagtgtcagtaaagccataacgtaaaacttgacaaaagctactgcaagaacaatgacatgatttttaaacactgagaaaatgacagcagtgattactagagctcagaataggttcactaagccttgtgataccagttatttccttttggattgttttactaaactggcaagtcaaggtaatgctgtagacacaaagggatgacagaagacttgtggcaagactatatgttatcactgtggaaaaagtgaatattagctaaagagaagcacaattaaactgaataataagattattttttacaaaatactcaaaggatgacagactaaggccagtttgtaaagttttgagaggcacatccctgtttttcctaattacctgtatgaaaacacacaagacaaacattaaagctggaggtaacatggggctgtgacagaaacagatcccaaaacaatctctacatagctgttcaattttacaaaacaaaatgtaagttttttcactttaattagggagggcaaggaagagaataattcctttttaaagggtggaaatttttaaccgaaagtaaattctctatgaattcgcagtgtgctgggtctgtgggaaaaaataacttacacactatttgactacatttaccaaaagtatagtgtttgtcacaggattagcctgttccatgtttattagactaaattcaaaacttatttctgagtaacacactttagaagaggacacttagaaaagggagagaggcctcaaaaccatgaaacacttctccaggaaggaaggctgtttagcctagataagagacgtctccaggaggacatgattaccattctcaagtatgtggagacctgtcaactagaagaactaaatttgtttggaacagacacaagggggtaaaaaacattaataggaggcatgttaggcaatatatcaaataacttcctaacagtcctgaaagcaatgactttcttggagaagccagctttggggtgaaaagtggcctacccagtgtagagtcctccaagtggcttgactgcccatttcagacaaaggaactttgccaggccttgactgcatctttaagactaagtttagggccaggtgcctaactgaaagctggctagagacaaaagtggtgagttcttccctcagaaataatgtattctgagggaagtgggaagagcagcaaaacaaactttctgtacactatctcagcaaaagactcagattcaggaactagagtttccacaagaaactgaacaattcaggaaattttttaacttccccttgctgattttgtttcgtcagtctcttttctccataatcatctattaaaaagaaagggctgccttaattggatttcacagaaatccctgtggaaatttttctaaccctggacacaccaacagtggttactttgcagcctccttttgcatgccataagctgcctgtgttaggcagaagcattagtgtgcacttggaactcactgcagggactatgaaaaatacctgtatcacatgggtgaaatgccggctccgatttggagagctggagcgtgatgggctgcttcactttgcacttaggccagtcatgcaagacctgtttagcagtctttcaaatgtgttacccagccttcttcacctgtgccaaatttctcacttttagcttctcaccatttgtgtggaatgccacaatgcctggcacagtgtaaaattgaatcaataaaattaaattgttgcttcacaatgtcaaaactccagaattccggaacatacgggagacaaactcaaatacatacagtgctgactgtattactagattcctaaagcaagtcctctcaattcaatcacaagtattaatattacacaataagagtagactacagcaagagttcacacattggactttgcccttatcagctatagacagaatgtaggatgagatttaaaagttacaaaactgatttttccacacacagttatcacatttttttcaaattaaaaggagtgttatccttcaaaagtcatcttgagaactcatctgtcagccacgaagaaaatctgtttcatttctttatggtaagtcccaggatgcttgcccctttgctgcctttggctctctctgtccctcctcctccctgtggcgcagttagagcactgtcagctttcagagcccagatgccaagaaaggagctatgcaaaggcttgccctcttgcactgtgatgaagaggaagccttcagagcggaaatgaagagccccaaccatgggtgaattcaaatcacaatgagcctaagccagctgtacgaaatgttacatccaaagagacttgtatgaggtaactagttcacatggccattttcaacagttattcaccatttgtttcaggttcaagagccagagtagcaagcatgaccgttaagaggtcactctggagtctgacaaacctgagttatggctgtgtctccaagcttgagacccctgagctagtaacataatctctctgggcctcaacttcctcaggaaaaagggagacaaggatggttgctacagaggggctgcagtaaggttaaagtgagatattatatgtctaccggcacttagcctagcacctgcacaccgtaagccctccacattgcagtggttattgttatcaggtttagctgacaggctgtgaacaggacctgacagaatcctttagccatttatcagggctatgaccttgcaccatttgcccttgtggaacctaacttcctaattcatatgtgaggaatatagactcacagacttaggggtaaggaggtcgtgcttatttaataaatattagatttccatctagtctttcactatacagcacagcaaaaggcaatcttttatttactccaaaaactcaatagtctaaatcctctaatatataccaagtatggatatttttgactgttttcttacgtgtagaaagattggaccaaatcagctctgatcctaatattcaaatcaataaaagattactaaaaatgtctttttatcttcaccattataatccaaaatattgccttgccatcttcaaaagaggactgccttaaatgtttatgttttgagacaacattaaaagtttaagtgctttctaaaacttccctgcctctagtatccctgtcctaaatttgggggtggaggaagtaaaggaggaggaaacacacatacccttcaaacgaataacaaaacctggagtttccgcaacaaggaattctttaaactatatatgccatgcttacacaatgctttgcacaaatctatttgtgaagtctgaagatcatggcaccagaattgagcaactaaccacaaatgaagtggttatgtaatgaagctaagtcattactgtatggcttaaccataaaatttccaaagagctttaactcttgtgacccacacaaactacaatttaaagctgaaaaatagctcctcacaagcctctttaaaaaaataaaaaataaagctggaaaaaatcttggtcatctctttaatataacactctcattctacatatgaagccacaaaagcccagatagtttaagtgacccatctgaagggccacagccagaaggggtaagatttgggtttagaactacagtttccaaggtctagtcctgggttctctctcccagatgagcttgttcttcctttagtgtattatcacctgtaaagtatttttacttgccaacactagtg

SEQ ID NO: 913883 - DNA, 4001 bp, Homo sapiens
gggttctctctcccagatgagcttgttcttcctttagtgtattatcacctgtaaagtatttttacttgccaacactagtgattaaaattaacattccaatggattactattgaaataacttccgttaagattttcagtcaattttcatagtcctcagtaaattataaccacaattgttcagaatcttctgccttggataacactaacaaaaatagtactggccgggcgcggtgactcacgcctgtaatcccagcactttgggaggccaaggtgggcggatcacctgaggtcaggagttcgagaccagcctgaccaacatggagaaaccctgtctctaataaaaatacaaaattagccgggcgtggtggcgcatgcctgtaattccagctaatcgggaggctgaggcaggagaatcgcttgaacctgggaggcggaggttgcagtgggccaaggtcgcagccattgcactccagcctgggcaacaggagcgaaattccatctcaaaataaataaataaataaataaacagtacccttgtatgtcatgataggctcagaaaaaccaaaacactgccaaataccaatgcaaatagttttgattcaacgtctgtatcacagccactccaggcttcattcgtctgtaagaatgaaagctcagactagatcatctgtaacctcaccttccaactctcacattctctgccccccttgccacctgcccctgcccctccaaagacctctactttttacttatttgcctggcatcctagtcattgctaaaaggccaagcgcagcatctatccacaggatacctatgtgttctatgagtactacactcgaaatactaactgaacaatttggttatctttgatgagacaacctgcattagaccgtctgtaaagcttttagtttaaaaaaattatgttaaaaaatattttgcaattttaccttgagacttttttcacttcacacgttctttcttccgtcttttttttaaaggttggttttgggttttttttttgttttgagacggagtctagctctgccgcccaggctggagtgcagtggcgcgatctcactgcaagctccacctcccggcttcataccattctcctgtctcagcctcccaggtagctgggactgactacaggcgcccgccgccacgcccggctaatttttttgtatttttagtagagacggggtttcaccgtgttagccaggatggtctcgatctcctgacctcgtgatccgcccgcctcggcctcccaaagtgctgggattacaagcgtgagccaccgcgcccggcctaaaggttgttttttatacaactcattaactcaaggattatatacatcttaccttagccccagcccattttaaattccttatcaagacaagcagtttctgaaatccagaatctggttctctgtaatctttttaaaaccacacaaacaaacgttaatatcgcaacagatttaaaataagataataataaattcactattgaacattttaagatttaacacttcagagtttactaggctcagatttgtccacctttatacaagcaactgagggcaataaatcccagcacatcaattttctaaagtagtaactgaaaaccgaccgcaaggcatttctaattcgaaaacaaggcatttctaatacgaaagcaacagtgactcatgcggctttctagacttcccaaaagccctttccaagcggcctcaggagcccttgccctcgccccggtcgccgattcgcacgcagttgtgcagtcagccgctgcgacccggctcctgcccggcgccagccctgcaaggctaccggcctcaagggctcccgctacggcccctgggctgccagacgtacctcacaggccaggtcaccgactcaccagctgcccggcaagcgacaggctgctttacccctgacccgagtgcgaaaggtccccgagcccgggcctcgtcccgcccacgcgtcacacggcaactccagttcgcccgggccactagcgagctggagcgctcaagccaagggcggggaggagcggaaaactccgcccattgttgccctgctcccagccagtccccgctggcgctcgcggcccccctgcagctccctccccgctgggcctccctgctagacgcctgctgcccccgcccggcccccagggtaaggccagctagaaggacctcggatggcacctggggctcctctccagcctctcctctccccacttgctccacccgataatgggcccaactcaatgagaattatatatgaactataatgaattacatgaattaaaatgtttaggacagtgcctggcaatatagccctacctacctgtgactatcatgcttatggtacttctagctttcccttttctccaagataatcctcatagcctgcatatgcaatcaggccaaaagatgaaatctagacaatgttgtaattctattacctttcagtcgattttttgaatgtaaaatacttgctgttgtctatgcatataaagctgtttttgttaatattaagagtaaagcaaaatcacatgagaaacaccaaaggggaacactaaggagccattaccctaaattaagtatcccttagatttcagatgaacagagtggaagtgcctgctttgtctgtgatgcatacaatttctgggaccccaatccaggcattcattatcaaaaataagaaaatttctccctaattccaaaagccctccttggataatacatttcgtaaagacacaaaaaaaacagacatacttctgaatgactaaagttacaattttatggtcctttgtactaatttacatcaatggcaacaaagaaggaattctattaaaatataactcatgtcaggaactttcatctattttatgtgcctctgaaaaatggctgatcacaatgtaaatacaaagaaactttgttggccgtcacctacttaaccaacggtctctgttctctctctaaaagatcctgaccaacgccccagcacagtaaagtcttcagctactcccctatgtatatgttcactgagtttcacagttatattcatttgtgtttctctcctcaagccagctgtagctgttactataatgatgtgatttattaaatattacataaacataaaaagactaaggagaaagaaaatcacaaaaatctaaaattctgcactcagaccactttacatgtagctttttactcccttatgcttcagtatttgcccttgtgtctttataaaatgtttaggttctaaaggggaaaaatgcataaggtattttacctctcttctgcttcaagaatttctatgctgtctcaaaacaacaaccaaccatcccaagtagatcatctcatctaaagcagcgtagctctcctatggctccccatttgcctacaggataaagtccaaatttcttttaaaggcaataaggctcctgagttagggttctccagagagatggaacattatatagacagacatagatatagacataaagatatatacagatatagatatgagaggggatttattaggggaactggctcatgtgattagcaggctgagacatcccatgacaggctgtctgcaagctggagaccctgggatgccagtaccatggctcagtccaagtgcaaaggcctcagaaccaggaaagcagatggtgtaactctcagtctgaagccaaaggcctgagaacccagggggccaatgatacaagtcctgaagcccaaagcctggggagcctggagttctgttgtccaaagacaggagaggaagaatgtatcccagctccagcaaatagatctgccttttcaatgtttttgttctctctgggccccagcagattggatggtgcccacacacactgagggtggattttccccacctaatccacttggattcacaccccaatatcctctggaaacagacacaccccaaaataacattttaccaggtttctagatgtccttaatccagtcaagt

SEQ ID NO: 913884 - DNA, 4001 bp, Homo sapiens
aagtgatcctcccacctcagcctcccatgtagctgggactacagctttgcaccaccacaccctactaatttttaattttttttagagatgggggtcttgttacgttgcccaggctggtcttgaactcctggggtcagacagacaatcctccggcctcagcctcctgagtctgttctttttcttaaatcgactgcttctgtaagctttattgtcactatccccactcagcctccttgtaaggctggcaatccctctctaccacccacccccaaacacacatctcaggggtgataaggcagagctgaggtccttcagaattgacagagatgatttaaaaacagttcaggacaggcgtggtgcctcacgcctgtaattccagcactgtgaaaggccgaagcgggtgatcacttgaggtcaggagttcgagaccagcctggccaacatggtgaagccccgtctctactaaaaatacaaaaattagatgggcatggtggtgggcgcctgtagtcccagctactcaggaggctgaggcaggagaatcacttgaacgtgggaggcggaaattgcagtgagctgagattgtgccactgtactccagcctgggtgacagagctagactccagctcaaaaaaaaataaaaataaaaataaaaataaaacagttcagctttggcctaggtaaaacgacacgagaagacagctgggggagaggatcaaaatggtgacgggaaggggtgaatgctaagaatgtgatgcaactttagagaaaacattgtagtgaggaggtcactgacgggaagttgatactcagggtgtatcatcccgtatttgagaaattacaacttgccagccattcttctaagagcttcacatatatttaatcttcacaccagccctaagaggtagggaaaaggtacatgctccattatccccatttcacatatgagtaactcagagaagcttagaaccttgcccaggatcacacagctcagttggtgggagggctgggattcgacgtcaggcctgtcaagctccagagccgcgttcttagccgctgcattttagcttcatacctggaagaagcagcaaggtttagggaaggggcgccgggagcgccgcaggccgggccagtgaacactgagggccagcagggctgggcggggtgggtgtgtgcgggagatctctgaggacggcgaagccagacgggggccggggccgggcccgggcttggggaggccgggacggccggagcagcggcgcggaggctgcgggcgccgagggggcccggggctggcgggtggaggggccccgccgagaggagacgggggcacaggtggatgcgaagagcgcaccggatgtgggacaccaaaggggaaggggccacaggcgcgcggcggcgactccggggtgacatcgagacagcctctgggctgggagagccctgcgggaagaagggagcccgcccggtccggaggggagcgaggcggttctgagggaggccggcggaaaggacccggggcgcggcgcacgctgggccgcccgggacgaccctgcgggtggtgatggtggcaacatccaagggagtctgttgggggggcctgagcgcgaccgtgggcgggggggtctcctcaggggcggctcacccggaggactgggcggcgtccccgctgtccccgggctccgccgcgtcccggggctgcccggcttccctgctttcggggccacgggccgcgtcgcggctgctccgccatctccgagcgaacgctctgccgcagcctggcccaaccaccgctcccaccgggggaggcggcgcgccgccgctggtggcacccgctcggatccaccggctccggccctagcagccgcgcgacctgggttccgggaaatcaagcggccctccgcagtgccgggccgagccgcggcctccgagacggcgggctccgcgccccgcccgcggaagcgcaccccctcctctccgcgcgatggcactgccggccgagcgtcggggaccacgacttcggagcaggggcgggctcaggcctgggctcatccactcagccccgcggagggggagccgggccggcccactcgggggaggggaggagtaagaggcggagcggcctaaccggaggcgggaccaggggcggggcgaggccctcagccggctcccagggcactcaccctccctccccgccccgcgtcgcctgcgcagcaccgagcgctgtttggaggctgtttatgagaagttttttttttttttttttttttttttttttttttttgagacggagtctcactctgtcgcctgggctggagtgcagtggcgcgacctcggctcactgcaacctccccctcccaggttcaagcgattctcctgcctcagccttccgagcagctgggattacaggcgcccgccactatgcccagctaaattttttgtattttttagtagagacggggtttcaccatattagccaggctggtctcgaactcctgacctcgtgattcgcccgcgtcggcctcccaaagtactgggattacaggcatgaggaagttttattctcaaaagtacccaaagggagtaggaggaggtactctctccaacctggtaagccaggctgctaaaatctacgcctctggccgtaaacctccaacagcagtaacacaatggactgtttaaaggttattttattaaatattttcagttcaaggtttcattgtaacaaagctatgaagggtctaccaacattcagaacaaacactatttttaaattatttctatgttgtcatgcaaaaattctgcatcaaatgccttccgtttcttgtttaaaaggtgattttttaatagtctattgtctatagatgctgacattagccccagaagaggagtaagaatgctaagaagtggggctggagcagccatatgaagctatgggtctcaatgaattctaagaccatttgtcttcaagccagcaaaacgaaaccctgtggtgaagggatttgcgtgctggcactgcagactgcagggcaggaaagggctagggcccaggggctgggacatgcatgaggtgctcggaggagcctggctaaatccaagcaccagcacctgtgagtctgctctcttctcagctggctcccaagtaaacctgtagctttgcctcttctcccagctctcgtgcctcctgaaggtagtccagggaactggaatctacccacctttcccccaaaagtggagatgtttgtgcagataaatctgcagcgttgttttgagggaaaccaaggccatgaccaattgctcctccattatcttctttgctatctgcttagggtatagatctcttcctcctggaatggaactccttgagcacagagagggacaatgaaggtagaagccttggctctggacacctcttttgggttacatgcggggaggggtgatgcccatgcagattgtccagcagtaagtctatacttcagttggtcagtaaagaggcctctgtaaggacacctcttcttcttgccagagcagtcaggtcaatctcaaagacaggaaaagagatggacgtgcagcaaggaagaataagaagggaggcagccccaaaggcagcctgaatgcatagaaacgaccaccacctcttctcccactgcctcactcctcccatcccacaggggcacttggcagagggcccaggcccagatgagggtcagcatggggaccactaccgtgaaaaggcaagacaaagatggtccagatcagcacagaaacagaaccgccaaaggcggcacgggagccctgaccagggcctggctctctccttgccaggttagaagaaaacacgaagcaaagcagcaacaacccctccccctcctagctgcagggataaggcctcaatattagggcccacatgcattgtgcatcctatagaaatggatgagtgagtgcatgtcagactaacacgaggtttctcatcggcttcatggcgggtacacttctgcagcacc

SEQ ID NO: 913885 - DNA, 4001 bp, Homo sapiens
attctcccgcctcagcctcccaagtagctgggattacaggcacctgccatcacgcccagctaatttttgtatttttagcagagacagggtttcgccacgttagccaggctggtcttgatctcctgacctcgtgatctgcctgccttggcctcccaaagtgctgggattacaggcgtgagccactgtgcctggcccattttttatcttttatagcatacttttatgtaccttttctatgtttagatacacaaataccattgtgttacaatttcccacagtattaagtatagcaatatgctgtacaggtttgtggcctcagagcaacaggccataccataaagccgaggtgtgtagcaggccataccatctaggtttctgtaagtacactcctaatgttcatacaatgaggagataacctaacaacccatttctcagaatgtatccctgttgttaagtgacatatgactgtactctgattccctcattagatagaaaatgaaaaattaaagtttagagtctgaatccaaagtcacccagctaattggaataaaaacaaaaagggtacagattagaaaagcactcttctcgtaataactgtgttcttgaccacccagttggcattcatctctgcgtctcaaacacctcatgggacctcttgctaagctgggttttccccaacaaatccaggttcatctgacactggcttcgaacaaggctgctcttgtccacaacataagaaaaaacaggaaatgatgacaactagacatatgctacagaaaatgagtgtataacaagaagaatagaagttgctgaaaccaagattgaaagagtgacattaggacaggaaataaaggcgatgataatcacttcagataattaaccattgggatgttatgtgggtatggatacggaagagtgtggaagggataggataacatcaactggagtacgtaagggggctggctgtttaatctgcttaatagttgctacgatttccacagcactaacagaaaaacattttttttaaagagacatacacacaaatatagagtactccgtttacaaataagattctcatgacaggagtccagctccagcctggtcacatgcctggatgacagcacctgagcgcagcagatgctcaatctaaatgaaactcgacgctctggatagagccaaggaaggctcctgctattcgggggtcctcgagggagccattaaaacctcggcttcctcatttgaggaaacagcctgagccaaggagaaaattgaagtcctctcagctgcagctgctcacccacccccctcccacctccctccacagagaaaagcacccactccattgactctgaggggtcacgagaaggttcgggaaaaagggtcacagtcaagccacccaacccagccggccttctcccatcactacttgggtgcgagcataccctctctgtctcaccccatgccatcatccgggtaaggttcgtagtcttccacacgcatattatacttcttggcggcggcggcccgttcttctggggtcctaggatagggccccgggaacatgtccttggtcatgtgggaggctagaacgcagaagagaacaggtcagaagcgagcccgctctccagccgctccgaaggcttcaagtcgcaggggctgcagaggtccgagcccgggacttcgcaggatcagtgcgatcctccaccccattttctggatatatcaacgccacctccactccctacccggaggctgccgccgcggcatctacgatcccccctcccgatacaccaaatttcaggtacccccttcccacactgaggtctcgcccgttctcgcggacctgtccgtgcgcccagcggcatcacgttccgggatgccctttgcagccactggactcccaagaccccggccctggccaccgccatcttcaccttcttcacgtttcccttctgcacatgcgcaaaggcctgtcacggcggctgagccgggccaaacgtgacggaggaagccgggagtgaagaaaagccgaagggttcaacaggggcggggtttaaatacgcagttgggaagccaagggttggatagaggctgggaaggataagcgggaagaagggaaaaccaggcaggtctctgacatttcagaatgttgtgtcctttttctccctgagctgacttagacccatccagggatgatgggaactcggaacctgagcaactcaggtagacagcttaaccacctcccccaggagctgtactagtgaaatgagcctgtcttactctcttctctggctgcttgctttcctctccttcacgggcacttccttccatccccaaacatgatcattcttcaaattcacctgttggtcttgcttgttgttctgttctccaaatgggttgatcttcacttagacgccagtgcaacacacaattcggccctgaattggctccttagtttcagtccgtgtttccatctgcatgtctcagtcacctcaacccaacaaatgtaaaattaaacttatcaccagaggcagctctccagagacagcttaaagcctcagagttggtaggacttggataaaacaaattacaaaccggcccataatgaacaaactaactcaacagaagaattggagacattattatgtttgcatatgaatgttttcacttgggatttgaataacttacacattataaatatgcacgtatttccagtgacttttcaggtgaccactgttttggagcagaacctattattataaacattctcaagtatatatcagagcaataaaaatgcatataagctgggagctgtggctcacacctgtaatcccaacactttgggaggcctaggttggagaatggctggagaccaggagtttgagaccagcctgggtgacatagtgagacttcgtctctttttttttaagttataaaaagtaaacaaatatggatatatactatttaatatataaattttgggaaggactacacagcaacttgctgtcttgtaaatgacatcactagttgatgttcagaataattgcacaacatctgcattcaaccaatagcaaaccctgatccaatttaggtcaagaaacagagttgatctaatttatttatttttattaagatattattcacataccataaattcacccttttaggccgggtgcggtggctcacgcctgtaatcccagcactttgggaggctgaggtgggaagattacttgaggttaggagttcaagaccagcctggccaacacagcaaaaacccatctctactaaaaatacaaaaatagctgggcatggtggtgtacacttgtaatcccagctactcaggaggctgaggcaagagaatcacttgaacacaggagatggaggttgcaatgagccgagatcacgccactgcactccagcctgggtgacagggtgagactgtctcaaaaacaaaaaacaaacaaacaaaaacaaaaacaaaaaaaccttttaaagtgtacagtagttatttttagtacatttacaaagttgtgcaatcatcatcactatctaaaacatttttattgcttccgaaaaaacccatacacattagcacgttgcccctacctctacccactggcaaccactaatttactttctgtttctatggatttgcctattcagacagtttatataaatggatcatgcaatatgtggccttttgtgtccattttctttcacttagaataatgttttcaaagtttgtctgtgttgtagcacatatcagtacttcattcctttttgggctgtataatattccattatatgaatgtacagtacaatattttatttatacatttatcagttaatggacatttgagttgtttctgcttgtttggctattgtgaataatgctgctgtgaacattcttgtataagtttttgtctggatgtatgctttctattcttttggttatatgcctaggagtagaattgctgggtcatagggtaactctgtggttt

SEQ ID NO: 913886 - DNA, 4001 bp, Homo sapiens
ccaacacattagaaaggtataaaaagcagtgatcgtcaacaaagtacatggccccagagtctgtgatataaacaggtaactggcccctgccacacctgggtgacacagtgagtcagttcttcaaaacaggcaggtccactggctctcaagctctgaggctgtgccacacctggacagcgtgttgacaatacttacgcattacaatagggcttcttttcatagcctttgtagttgttcatgttgagtgccatcttgcagacctcacaatggaaacatcctttatgccaatactggaaaaaaaaaaaaaacatttaaaaatacagtacaatgccagttctcaccaggatgggcacagaaggaaggctttttagtgcatcacagtccctgtagctgaaaatattacaacaaaaagagtgtagggaactggggatgtgtttacctactttcagctaagtaaataaagcaggcagctctgaaaatggagtcttaaaggaaaacccaccgcaatacacagacgcaccatggacgaactgtcaaggttctgtcgaaacagcacttctttgagcagccagaaacgatttctgagctcggttaatgaagaaacggggcccagagagtggcttcgaaaccaaaaggaatccagttcaaagtgtctaaatgcagggtttgtaggatctcaataaatatgtgttcacccgaagtcaggcaagctgagggggctgcacgagagctatgtaagtacccctacacctgaccagcttccactaaaatgctggacctcggactctgcccgggatgactgtcaggatggcagcttgttctaaggaagcatttgtatcttcagacgcaaatttccccagaacgcccctggctggtttcaactgtcagtcactccggatcgctcctgggtgtctctctcccgggctgttcatctccgtccctgcccgggaagggcagggggcagggctggaggggcccggctacagaactacttcccctggaattccccacccggtggattagacacccgtgggtccggcttgccgcgctgagccggagctctccagcagggattattcttagcaatgcggcagcggccgccccatgacatattaattactatttgcctctccccctcgccgcggtcacaggaggcgctgcgggtgggcggtgaggtgggatcgcgggcggatctgtggggcggggggcgggggtattgtggaacacgagtggaggtggagggggcgcggctcgccgaagtgcccccctgggtgcccagcctggtccctccggggtccggggctgcgcaccgccgtgcgccctccgcagaggctctgccgatgtcgcaccgccccgcaccgcgacaaaagcccttcccggttccaacatcacaatcgccaagcgtggtctctgacactcccgctggcgtcttcgttcgcgcgccctccccccgtgccaaggcacacgcacacgcaccgacccactcattgctttccatcccaggtgccaaaacttctcgaagcaggtgcagcccctcgcccggcaggtccaggctggcccggcgccccctcgctcaccttatccaggcagttgactttctcggtgggatacacgacttttccgcaacgggcgcactgggggttcatgatcgcggttcccgggggcggcggcggcggcggctgctggctcccaggagccgctgtgacatcccccggcgagccccgcaccgcctcctggcaggcgggagggctgcgggcggcgggcgccgggtagggagtcggcgccgggccacgggtgagtgcacggggagggcgacggggcctggcgcctggggccggccgcgctctcgggctcgcaggcgctgggtctcggctccggctccggctccgcgccgctggctctgcgtcgctcgcactccaggtacgggtgactcacacagtcactcgcgcccgcccctcgcgctcactcgctcccccgcctcgccgccgccgccgcgcaggccaaacccaccggcgcgcccggaccgaagtggcagggaacgtgcacgtcgggcaccctgggagggagggcgcagcgggggagggggcgggcagagacccggaaagctccgcagaccgccgtgggtgcgactgtgcggcctggggagtgagcctcgcgccaccgccgctgcaggccggggagcccaggtgggcggcggctggggagggagggatccaggcgggggaggtgacaaacaccggtggggagagtgctcaaacccgcgtactcccttccctccctcttctcttccccagccgggggcaccctcatcccaggctgactgacgtccctggcacccaaatgtcgcggggagtgcggggccagggtgcgccctccctcctcctccagccagtgaaacccgggacagcggcacccagccccagggcggaggccgtctctgctgcgcgcagcgacgcacccaggcccaagggccgggagatccgcggggaacccggagacctgcgtcccagaggggccgagggttgcaccgcgcccgctcccacgggcctcttccgagaggacgcttctccctcgtgtccgcgggaagtcctcggatcctggatgagaaagagccttctctcaccggctcccagaccccgcgctttttaatacctgtccttgcagagcgactggtcattttaggcccgagtcgagcctctcttgattaataaatgaatatggctcgttttgttttaagtgtgcgtggatgtatacgttgtattgttttgcaattcaacaccgcaaagatctgggaaaagttcttcacctgcattaaggaaagcaattacaaactcgtagtccaaaccagaagagccagaaaatcaagtagaaggctcagggtaggatgaaaccaaagggaacaggaatcgtttcttccttttaataagatgtcaggttattggactcacttgatgagaggcagcaaaatgaatcgaacacagcctgggttcaaagcctgaccccgccatctaatgatgtgaccttctgcaaattcttagtcgctctatgcctcaattctttaatctacaaaatgggaataaggacgcagctaccgaacagcttctactctcctgctgtgaggattaaatgagtcagcagttccgaactgcttcaatcggcctggctcaagggaagctccacggaagagtcagctaggattattataaattggttataacaaagaagcgaacacattccgttgctagcgcacagattaagactcaataatgccacataccaactgccactgctctgacaaatatttctgtcatttcaaaaaaatatcatggctgcagcttttcatgacaaaagaaaaccattggtttctgggcctcttaaacagctgcactgatggacatattcataataatgctgtactgtttgactttccagaagatgtaacttctttaaaggattcaccaaattcaacagcccctgagccactcactcactgccatgttcacaagtccacctcaaaagcaaataaaatgagaatttgctgtcagagaggatcagctgtcttttaaaaatatttcagagctcattagaaatgtatgacgaggggaaaaaaagtatgtgatcgcctgaaaggcagtagtttttttttaaacatttacattttcataactgtagatcatgaaatatagtttgaatatcttattctctttttcaaattgtaagcacaaaattcagagcaagaatgttggtgatatgtgacattatagctgattacatctaacctttgaactttaagttatgtttaatctttttttttttttctgagacagggtctaactctgtcacccaggctggagtgctgtggcacagtcatgactcactgcctcagtgagtggcagcctcgacctcccaggctcaggtgatcctcccgtctcagtctcctgagtacctgcgaccacaggcatatgccactatgccctgctaatttttgtattttttgtaga

SEQ ID NO: 913887 - DNA, 4001 bp, Homo sapiens
cttattattactgcaatttacagagaactttcacatacaatagctaatgactattaagtaatagcacaaagaaatacttaatttaaagggtaattacatcacatgtcaagtatatgggaaagggtatgatttccaccagcatcctttgtgcttgccttctggtttgtcagaaagagccagtcatatctaaattgtgattggatggatgtaaaaggaagtaacagacagagtagttaataacagctaacatttatggagtactcacaatgttccagatagtttattcagcatttatatgcattaccattatttaatcttattataaatgttacagctgagggatggagccaagccaggttccataaccttcccaaggttactggggagtcaacccaggcaggttgactttggaggatgtgccagaccactaccctcctgcccaggactgacttccgttagaaaacaaacgtgcaaaacattctgatcattttgcttattatcaacaacagaaacaaccagtattgtgctcatctctctaaatgaagacacaggcacatattcactttacaggagttaccctttctctggaccagcaatcctcttagaaccgctaatgaggatcatctaaattctcatccctggtgagcaacatttttccttgtacttcttgaattctagcttacatatttaacataaaattatatgttcaatcattcaataattctgggattcccttaaagtgtaatatcaaccaatcccagttactaaaaaatgtcacaacaaaaataccccttgcactaatatccttgcactaatatcagggttcttagcaagcaggtcagtaatcaacaaatcctgaattgtaaataaatattatatgcatatatatatatatatatatatatatatatatatgcattttcctgttctggaagacaagtccattcattagattgttcagaaggccccaaaatgttaaaaaaatgactattcatttagatagagggcctcccaagacaaattacatcattatattcattttaaaatctttgggggttctcaaatggaataaatactgcaattcaatgccttatgatttcatgccagcgtgacagcaaaactcataagggacaggattctggattaagaatgaggagacttgctctagcagaaattctctgtataggtgaccttggggaaatcactgaaaatttcaggactttgttccatgatctggaaagtgactgtgttttaaaaggtgatttcagggtttcccccacagctctatgactctataacataataataccacaggtgcaatgcaaaataagacaaaaattactccagccacttacatcgctaatgagttccgtgcattttctggccaattccatgcttaagtcttcaataacaggcttatagaagacctatttgaaaaaaaagaaaagaacagaaagaacatttttctcattgtcaatttagaggaacaaacgctggtctgagtatgtgttttctcactcacctggtcttcttcattttcttcttcccctatcttttcttcttcagtttcatcttttatatcctcaaatacagggaccctcatttttaccctttaaaatatttatatttttaaaatttactcatgtggcgtccttttccataccacagtgcccttgagatgctgacgtctctggtgctctggcagaaatgcccttgcccaagcctcagccctatttagcccacacttcactccttatctcagtggtgtgtgagtgaacagaaaaggatcccagaggtctaccaggctggcctcacaagtggaaataacatattcttaagcaaaatttgattttatgaacttttaaagtcaacattttttccactggttaagaaatccaaaagaaaaaatttatttatcttttactaattctattcattcataaaagagcataaaaaggacttagagattctgggaaaactactcagctctaacactcaagatagcacagtccaaagcctgttatctcaaagattccttgtctctgtctaaataaagctttcactggaatgtcagacttccttctgacttggggtagtgaatctggatcattcaaactcattttgtcaacctaaattatatgttttatcagacataccagtacttctcacatcctaaaaaatacccactttatattagctgattagaggctacttatttattatgaaaagccctttgaaccacttcaaagaatctattctgagttaattatgactgttagtattatactggcgagtatggtattgtattaattgtaaacatcattaaacatgagaagttgcagttaacatatgttgatacataatttaacaattctggaaacatcgtttcaaaaatcatcatcatcatctttgaattctgcagttctactcatcatgtcaatttttacaaagtcattggtgatttgcattattactcaatgggcaccccacattcagaaaagtttggaaaaataaaccatcacaatatttataatgtagtgtatgtccttggttacgtaaaaccaaggttaaaaaaaaatttctcaaaacaaatattttaatgtcaattcaggcaattccaagactccctacaactcacaatttattaatctggttatgtaaatcctagggtaaattaattttaccaagtcatagcacattagcattgggcataaaaaataccctacactgaatagtaatactgatgatacaaaatacaaatttattaaaaatagtatgtcattctaagtagccaagcataattttttctcttgatatcatatctagttttcaatgtactgtaaaaaaaaaatgccttggccttacctaaactgaaaatcctgacaagaaaaacattctacacagtcatcacgtataaattatttctgaaattgtgttccatgaggcaaaagttccacaaaagattctgggggaaaaaagcaggtttcttaaacaaatatgtttgggaaatctgtaccccagtctctgtccctgccacttagagatctacaaggcatattgacatactagaagttctgagaagaccttcaaccaaaaaacctgcttaggcttgcttaacctcgtgttcccctgaacacaaacctgtttatctcatcaaatctaatccaatttaatctaatctacctacctacctatctacctatcttttttttaatcatacccactaccccagaaaactaacactcctctgtgaaatatgaccgactgcttagggaaacattgctctattctcctaaaatgttgtgttctagaaggagctgttggtcttgaactagtttttgatacaggctaaattaatggtatcacatatcctgttcaccaacaaaataccaaaaagaaattgcctcaagcatgctgaacttggaaaccacaactctaagattacagccatatcatgctggcccagtgtagtggattccacaaggacattccttgtatattttatttgttccgtaaaaggaaagaatgtgtgcattccaattatttccctcaagtcctctgctggccagaagactattctaatattctatagatctattacattatctttatttggaaatagggaggagtaatttctgtaaacttgtcttgcaaatttctaggagtgtagggagaaaatcttgccaaaactgcctgagacacaccttttggctcatatttgaggagacagtactggtgttactcagggtgacacctattccccaaggtgaattaccttcatcaggcttgcagtgcagttatttctcatttcccatcacgtaatatgttcttagggactcttcactgtgctgcaagaaaataagctgttgagatttaatgcacaaacttttgaaaacaaaaaccaaacaccacgtgcaatgtgaacacaaattttccatttgagattctagaatcagaatttcaagccaaagggatccttaagaaatcaatacacctaaagc

SEQ ID NO: 913888 - DNA, 4001 bp, Homo sapiens
tttagactactgcagactgatttcctaccaatccatcagctaaacttggaaattttaatttggtatacacagctgggtccacaaatctcctgaaatgtttatgtatatgtgcacatttttggggaatagttttcataaaatatgaagagtgagatgactccaaaatgttgcttatttttctcatggaaggcaaactgatcttttaaaatgcaaatatgtcatgccattggctcatttaaagtctttcagtatttccccattaccatgaagataaaacccaaactctgtcaaggcatacaaggtctcttcatgatgtggcgcttacctctttagcatcatctctcatgactacctcctccttctccccatattggtttcctctcctctatacaaatatcactgttaatatagtaataaaatagaatatatacccagaactcatcagactcatttgcttcagggcctttctacatgcttctctgcctgaaatcatccatttacatctgctctctaaactggtccttaaagactcagggattacaataggaaatcatttcctattctctccagtcaggattaagtgttccttttaatctacggcattctgtgtatatcactataataacttttatcacatattataataattattaacctacttatctttcttccccactagattataaatcttaaatagtaacaagagtatttttccatttccatattcctagtgttggcactcacattattttctgaacaaatcgcacattctcttctcaacctgttgcaaaacactctaagttcgatattgtaaccattcttggaaaccatctaagatcaatactctcttctcattaccaaatttaattttcattcctcatctagcttaatcctcatcttattttacttaatcctcattttatttgacctatcaataacatctgacatagctcgccacgtcctcttcttgaaattctttcttcatttggcctcctggatactgttctcacttggttcccttcctcctaattcactagctatcccctgagcttcgctttgtgaaatttcactgagccaaacacgagtcatacactctcatttcaatgtatacttccacaaaaagtaaaaagaaaaaacacgaaaatggttgtgatgaactctctaataggcatctcataacatatcccgaagtcaacttatcccttagtcttttctttctcaggacatggaagcccattctcgtggtgctcaccatgacagtttcggtctgagcaaaggcatttgggaacgccagcctacagccagttgggtgtgcagaacaaaaccattgtggtttttcctaagtctcccctgagaaacagtcaggaggcgaggagactcaataaacccgcccctttgccacaggcagggaaaatcgcagtttggggtctcaggaccgacctcggtccaaggccaggcacactgtcactccagcctgtgccaccctcacttccagcggcccccgtccccccccccaaccccgcggtcacctcccccaccccccactcacctcccagcggccctcgcctccccctggccctcaccaacacccccactcgccgccccccacatccaactcccggccagccctcccctccccccggcccttgcctctccaacactcacctcccgttcggccctccgctcccctacactcacctcccgttcggccctcccctcccccacactcacctcccgtccagctccgacccggaggtgtcggccgaaggccccgtcgctccctccgtgctgagcccagaggcccggcggcttcgcctccgcggtcgaggctgcttctgagccgccagctcgggctccatggcacggaggagggggtggggcggtggccgggtgcccgggagaccggcagggacgggcacgatgcccgccagcctctgccaggcagaaagcgcctgtcagcggactgcagccgccaccgccgtcatccggggatttgaaaatggcggctgagcagcgatcagccaatcagtgagcgcgcagcggttcctaggagacgtggagtcccgcccctccaccgctcccgggatctacttgcctaggaaagaacctaggaaaatttgcccttaactcctgagcgcatccctgagtccctaaggcccggtacctccttcattgttcattaggactttcactacaggccaaggcaaatggactggaagcattttaattcaccagatctttcttagcatttgaggagaagagaggtccaaactaatgacctgtaaacaaggcatgtttattggccatattcacactgaattattgtgcacgtggccaatatgagatatatttccaattaccaaaggttatgcaagtgtgttcccgggactgtctctagggaaccagcaaaatctaattatgagcccttatgtcttccaataagcatgacacagtctctccctagcaaaacagaatgaagtgacttcatcctttgcttgtaaaagtcagcaaaagacataatataaaataaaagaccgcttcaagtaaaaaaaaaattgttaaacaaattacactttctttgattttaaatattgctttatatgtgtcaaagtctttaaaaatagcttctcctgaccgggcgctgtggctcacgcctgtaatcccagcactttgggaggctgaggcaggcggatcacgagatcaggagatcaagaccatcctggccaacatggtgaaaccctgtcgctactaaaatacaaaacttagctgggcagagtggcgcatgcctgtaatcccagctactcaggaggctgaggcaggagaattagttgaaccagagagtcggagcttgaattgagccaagaccgtgccactgcactccagcccagtgacagagcgagactccgtctccaaaaaaaaaaaaacaaaaaaacacttctcttttgccagtatatttccacttatggaaatttatcctaaaaaataaaattatataaacatgaagctattaatgacattgtttataatagaaacatttaaaacaacctaaataaacaatgatttatagctcatccactgagaagaatattttcagccaacaaaaatgaagtgtgaagtatgtaatagtatactggtaatttgaaataaaaacatgaagtatagaggtatattcagtatattcaaagttatgaattacaagagattatacaaagaaaaaagataatgtattaaaatgtattaaatgtattaaaaagtcaatgtattaaaatgtctctaggtagactttaggtattcaaaatttttatttttattttttgcatttaatttttttaaaaataaggacatattgaatttgcagtacctttataacatgagggaaaaatgtttttgttttaaaaagagtaagaaattagggagtaacattgagatgtgaagccagctagacttcctgggtagagtggggacttggagaacttttctgtctggcaagaggattgtaaaacacaccaatcagtgctctgtagctagcaagaggattgtaaaatgcaccaatcagtgctctgtaaaaagcaccaatcagcaggaccctaaaagtagccaatcacagggaggattgaaaaaagggcactctgataggacaaaaatggaacatgggagggcacatataagggaataaaacctggccaccccagccagcagggcaacccactggggtccccttccacactgtggaagctttagttctttcactctttacaataaatcttgctgctgctcactctttaggtctgtgccacctttaagagctgtaacactcaccatgaaggtccatggcttcattcttgaagtcagcgagaccatgaacccaccggaaggaaccagctctgaacataagttgaccttggtcaagaaccacttctgttctaccttccccatccctccccaaaaattaaagaagaaagtactgctttgtagcagttagagtgtaagaatacagaaat

SEQ ID NO: 913889 - DNA, 4001 bp, Homo sapiens
actctctaacataagtttatgttgtcaatttaggttaatttttaatcagactaggttagccaggcagtcacatacattattataggcaatctgtccacagatcagggtattaattaatgttagtaatccacttgtagttagattttatgccttaaaaatttctcgacatctataaacagaaaattgttgagaataagttaaagtatttttcaggttatgccttacagctaactgcaacgacatggaaaaatcctgttgagaagtcagcattctgtagaaaggctttttcttctaatgatgccagttagagaacatattttaggagggtctcttctataaccaatcatatcaagacactgaataaaaaaaatagtatgcacctgggtctattcctttgggttataatagttaaataatcttctcttaaaatctttagcaaaactttaaaatcaaaagaaaataaaagttatttttaaaaagataaaaacgagttatgatcacatgggatgaattccttttctagaaatactcaaattatttagagctgtgtcactagatctaaaaccgtgacaacattcctagtgcttgtaacttagaaataaaggtaaggcagaaacacagcccatgctgatactaaacaaaggccagcttctatgggcccaacagatgataagctgcaggattcacactagtgactgtggatgactgctctactcaaaggaaatacttacacattttgagaaaaccgacacataggcaaagaccaaaaccaagaacaaaaaccaaagccaaaccacaccaaataaaagtgtacttcctgaagacggcagctattttaactaccaaaaggtgtgtgtatgtgtacacatgacaagcaactttgctggggtattcagtaagctttacatatttaaaatgcacaattagataagttttgacgtgtgtatagagacggaaaccactaccacaatcaagagatacacagttaactgaatgcaggaacactattcctagcatataagtgacaatgtagtatatattaaagtatatagtataaacagaatatcacacaatgttaaatcaagattacataaaatggcataaagtaatttgatttatattgataaatgttcataaagactaaaaaaagactcagacaaagcaaggagggtaaaaataatgagtcactggtttaaatattctaacatgcctctttccttctgaagaaaaaagtggcatacaatgaactcatcagatggaagaaaaatgcacaccaggtcagactaaactttagttgcaatttgttcactagcattgatttacaagaacgggattcttttcctcttgctccattaaggtagtttctaagactggatgatatcaattcaagttaaaaaaacaattatattaagcatcagaaatgtgacaaacgtaacccgagtaacatatacatttaaaatcttttccttttttataaaagctgtgtacactcaagctatgctatgtataaactatttaaacttagaccacagtccctaaacacatttcaagcttgcacataaatcaagaacatacattgtaataataagatcaaaagtttaaaattatactgttaataccttgttaaaaattttaaaagctccgtggagttagaaaacattccttttgcctaacgtttctcttaaagtcttacctcttgttctctgaaggactggttattgacatctaggactcgtatggtccttttaataggtaggagacctccagtctcatcatgtgccaccatgcttcccaagtactccctcaaacctttccaatcaatccacaccgagtcagcgctgtagcgacgctatgcagaggcacacgggcttttcttcccagagctcggccaccctcggcagccacgtgcccatgcctctcgccgcggtggagcagaggcttctgagagccgcaggcagcaagcaccgaccccagggctcgggggcggggccacagccaaccgggccctgggggcggggtccaccaccacgtgacttcagttaactgagagctgggcacacctaggcctctcagctttcgcccaggaggagagtgaagctgggttcaagtaggacagaaacttctcttcctgatttaaaatgcattcccgaagtaaaacaaattgttacgttatctactctggtgcttagtcacagacaggcagacttttcccataaaaccctattgcatgggaataagttcagtatggacaacttgacaactcaaataaggaaatagaaattcttattcgatagggctgaatcaacatatataatgaagaaaagcctaattttccaggaaacctgcttttattttacagaagtgcaagcatattcacaattataaaatagattatctaagtctttaaatagttcccactttttcttaagactagcagggtaaatacagcaggtgcacttctgttacctctcttccagaagaaaatctcccatgaggttacgggtaaactgggctacttcagatttcaaaattcagtatttcttagaggtagatattttttctggatctttttaaaaacttgattatctgtgtactagatattttataacaaaggtgatttctgttctctatattgtatacatagtatgtaattgtgtatatattatatataagtgtataatataacagggtccttctctagactgaattaactgatcttgatatagctcgaacagggtcaaaagactgcttaaaaagtcttgcattttacaggtgaagaaatgaggctaacagaggtgaagtgacaataatgacagtgaccagtgacagtctccaaatttctagcctaagtcttttcctctatggaacaacactacttttgttggcttggcaggcctgctgtgaagcagatttccttttaaacacaaaattcgttattctatttggaatggtaaaattttacactataaactactataatatgatggtagtatgttggaaaaatatttctagtctgaggatttatagaatcagataaatctattatataaaagtcactattctagatacttgggtaataaaaaaaaataggcttcatatctgctaaagagaccattgtgtaaaggtaggccacatgaagagataacagaagatagcttttgcaaattcaaaactaaggtgtgtagctaataagtgctacaggagttctggaagagaaaccacttcaggtagttttctaagctaagacacggctgggaacaatgccaggaagaggtttaagatgttatgtctgtgcggccttgaatgtaatatttttcatagatttgaacaagagaaaatttcaaggaggacaagggagtgagcccacactgagatcacgggctgtgcgtaaagatggaacagatggatgtactcaataggtgagagagataatgagagctatgttgtaataagatatatgtgactggtgtttaagatggttgaaagatgactgaaaacatcatgcaaaaatcacagtcgggcaacaagaactttgcctaaagtaggaccagtagggaagaaggaaaaggatataagcaagaagtcacagacgcctacaattctttaaataggaggggtaactgttagtgcaaatcaagaaataagaaggaacaagctttgaaagaaaattctaagttacattttagatatactgagtgtgaggcggtggaagaacatgcaaatgaaaatattctgctggtagttggaaatgttggacaaaaacctgaaagaggctggaggctagatttagactggagagtcagatacagagataaaaatcgaagctatgggagtgaatgagatgactgggagagaaaatttggacaaaaagaacatggtccaaggatctaactttggaggaaagccaagggaaggaaaattctgcaaaaggaatagttagaaggaaagaaacaaagcaaaagccaagggaagaaaaaaatgttaattacagcaaagaggtt

SEQ ID NO: 913890 - DNA, 4001 bp, Homo sapiens
gcaccactatgcccggctaatttttgtatttttagtagagacagtgtttcgccatgttggccaggctggtctggaactcctgacctcaagtgatccacctgcctcagcctcccaaagtgctcggattacaggcgtgagccaccgcaccctgccaacaaattgatatttttaaagtatcttgacatgtattgccatattaatttccagaaagacacaacaaatccactgattttcctgagccaagtgaaagctgaagttctgaaagagctggagtattagaatgcaggacagtggtcctatctctcctcctcttccctggtcttaaaagttaactgttcagcaaaagaagggacagaattccaagtcaaaagataggggtctacagcctagcacctagcgccgaggtctggctggctttgggaacctgaagcaagccttggttctcctcatctgtaaaatgggtatagtgtgattagctctgctctgctgactaccccaagcagtgtccatgctcactgaaaatgtgtttgagaaagttcgatgccttgtgttaaagggcactattgttatccttctcataacctgaggagcttaggaagtggggtattctttctgaaagcccaagggcttcccttcctggcttttagccatcatgcccaggacaagtgccactggttctgaggtgacagaaaagcaccttccggaaggaatttagtagggtctgagggcccgggaggacccagcagtgtcttccaaaggtcagagacagcattggaagatccaagacaggaatggcaggctccgaatggggagactgggcctagggccaccctgagggtgctgagtggatctggggaggtgaagagcaaagacattcctagtaaatgtccctctgtttcaaggctcccagaccctcttttctagggctctgactggatatctggtctttgggaaaaccagaaatcaaactaattcaatggatgcaaaaacccaacggctgcaaaggaccccaggaaccagcagctctgaccctttcttccaggctgctgtaatcctgtcctgaatttttaaaaccctcccattggaaatgcaactagtgctcccagcctggtctctccagccctagggccgatggaaaggagacccatcgaggtgcctccctggagacacggacgacccaagcttccctcctcactccccactcccctatcgacctggcaaacatcctttcccatctcttcaggctcgcctaagaccatggcctgaggggactccagtgacgttcccagtgccagcagacagaactgcgcagaccccgcgggacgccatcctccatcaccatcatcgccggctgccctccacccccagcccactccacggccagaggtgcatctccggcctccagacacgcacaacaggtggcgtctgcccgccctccccaaccacacctccctggccctccacctgcgccccagtcctccagcagcgctcggccggggagcctacctttgaggttctgggggtggccccgcggcgcgcggctcgggtttcctcggggcagcgaggggatactggagaagttgttacccatggcatccggccccaggaggttcggcgctcgcgggtgggggcgaggccgggcaggcgctgaggtgcggtgtgcgagtgtgcgcgcgcgggtgcgcgccaccgggggagggccctgctggggctgcagccgggggcgggcgggcagctcctcagcttcctttctctggacttcgcggtccttggcgggttccgcccgccacgggtgtcctggcgcaggctgggctacctgcctcccatgccccgtggcgggagcgggggccacaagcagggccctgggccggggccggggacgcccggggctccccgcttgctccccgggacgctagggttccggctgggggtgggcggcgcggcggctccggcgcgctcccccggggccatagagtcagggtcgctggcgtgggcgttcggcggctccgaggcaggctcggttaccgccccgcggagacggccgcggcggcgatgtgcgtggctccctcccgcccgcgggtctgcgtggagcggggctcggcggagcgcggggcgttctgggcgctccgacgcagctggtgtcccccgaccgccgcggtcccgcccgcgccgggtccctcctgcgaccgccgcccccgccccccgccccggcagtctccaggattccctcgctccggttgttatggtgacagctgcgccggtgaatgagcgtcttagtgacacgcgcgcgcccgctaggccagatgtggccccggggcgcgccgcgttcccgtagccgcaagctctcggcggcgcgggtcggggtaagacatcaggcgagtatggtggcacccggggctggccttattcccagcacggaaacatggaacttgcacttgaaaacaaggggagcagggccgcgagaacgccgagctccccggatgcgggggcgggcgagccagcactaatgttcggtttccctagctccaggtaccgggcctggcgcagagtggagagcccagggaaacatgtaaatgagcgagcggatgcttggataaagtaattgagattagaaccccggcacttgaccctccgttctcagccaggctaggggcactagggcaagggttcagagcaggaaccccgggcagtctcactgatgcacagatgccactgagggcctttgaatgcccgcggaccagactcacaagcctggagctctggccaagctgagggaacagatctccgggacagatcatcagaagaccaccagctctgaactgagtggttctgttagctataacaaggtgggggagaggagcctctgcagcctatggcagtcaaagaaggcttcctggaggaagggggtttcagcaagggccctgctcatgtggctagtgccttcctgtagctcaacactgcaccaagaagccttcaggaagggaaacagaagtcattcttctccttcctggacccggggcatctctcctggtctatcagggatggaagatgttccaaggttccccccagggaatcagacttcctgctcctctaagtcatctctagctccctgctctggcttcagcaactcagatccagagtccagtgaagacatgggtgggcagggggacatctcatgtatccttttctgtaataaaggttcttcccccaagtctccatttggcagctcctcattatctaggcacaattcgtgtcctgacattccctgactgccccaactaaaggaccccctccactgtcagtcactttccacaatattccattttattttcatcatagcttttatatggaacttgtttacaagtagcctttcctcgtttatcttctgcctccctgctagaacataagctctgtgaggggagagcacaggtcagtcgtgttcaccagggtgtccttacccactgggggaatgcctggcatgtgacagattctcagaaaataattgtggaatgcatgcttcccactgtgggccaggaggctccactgagatccctgggggcagagcctcctgaaccaccctttattttcctctcctactctcctctctccatccccattccaggcattctacccttaaatgtctgggactccaggcaagctagaaatatctgtgacagccactgtctctctggaatctggagggaaaggcagccccgaacccggcctccagcctcccagatgcccaggatcacgtgtgcaggcagctgcagatggccacagcaggtcagggatggctgtcttatttatgggcagtatcttcccaaggctcactcccagctaatgactcatgcatcagaaatccacaggctcttaatggcaacacactcacacatgtgctaacacaccgctacactatctcacacactcacacctatacaagcacacacacttatattccccctgaaatctgccggaatgaagtcactgtgagtggccactag

SEQ ID NO: 913891 - DNA, 4001 bp, Homo sapiens
cacacaatggagtcatcttgccaaggcttcttgaaggtccatttttttttattggcttaaaatctcatccagcaatccctaaataatctaatatacaaaatataggcttttccctgctgtgaaatctcattaataaatacaaatgtgtaaaacaggggaggggccatataatttactgtaccaaaattgatttcaaaaggcatcatataatttacaaacagatttaaaaaaaaaagatgcgcggtgctccaggcacctgcagcgcagctcacgtttcaggcgcagttcgcagggaggctggggagatgctccctggccgggctagcgctttcccagttcacagcctggtcttccgccccgggagggcaatggctccgaaaagtgcacgaggagaaggcagagggtcgccttcgtggctttaaggcagagtgaggcgccctgaaatcccggacctgattgggagtagagcagatcggcagcgtctttggagcaaggcaaggggagtaagcgctgagagaccaaacattggattgaatcacattggaggaggggtggtaagagactgagaggcagacagacttgagtgagggtagggcgacccaagacggtgggcggctccggccgggtagtgctaccattctagtattctttgaatgagattatggggtggtggcagagaggaggcctaaaatgagcgcactttgcaatgcccacttcgcgcgggcagcagcaagggttgcgtgcgttggcgcggctcggagggccggggaatgaacccagcctgccgcccccgtggaggcctgggccggccaggggtcagccagggagaagcagaaggaacaagtgcttttgagggccgccgccgtcggccaccctctacggctcccggctccctccctctcccttacccttagcacccacagcccagcgacagacaggtcctttcacagaaaatctgagaaagccagactgcctgggctcaagcaggcggaaaaggtggcccccagcagcccgggtcgctcctccagcgacgcggcgggactcaggctgccagcctgggagactggggagtagagggacccccagtccccgggggaaccgcctgggctgcccagctccccgcagtgcggcgccggcggctccagcgcgtacaagctgtggtccgctatgcgcagcgtttgagtcagcgcccagatgtagttgtgggcgaagcgcagcgtctcgatcttggtgagcttcgcgtcgtctgggaaggtgggcaggacaccgcgcagggcgtccagtgccgagttgaggttgtgcattcgattgcgctcgcggtcgttggccttctttcgccgactccgtcgctgcttgctcagtgccaactcgctcttaggccggctgcgtcccccgcgccgtgcccggagcttcctcggggcccctcggcagcctccctcttccgcctctgcgcagttcccccgtgtgcgagtggggctgggcggggcggacgtggggcaggtcacttcgtcttccgaggctctggggaaggaccgctccgtctcacgggtcacttggacagtgggcgcacccgagggttgaggcgtcatcctacggcggggtcagagggaagggtaagtttgagtccgtcactgggcgcagtccgcgattccgaggctaggtgggaaaaaacaaaaacagccatcctcccagcccccgctgggtcagaggatccctctttcccctgcccgtccctcggaggcctccaaatattacctttctaccggcgcaaaagaatagagagcgatgagcagcgagggccgtggggagctcagcgggcttctggtcgccaagttcagctgagctgcaggcgcccccgcctgggagttgccccagccccaaaggagaaaagaagagagaatggggtccgaggcctctgtcacgctctctctcgaggcgcggcggtgagaccgcagggatttcctgagcagcaagtcgtgtgccccttggcacgctttatctgcttcgcccgggccaggagcgtgcctgcccggctgctgcccgcgccaccggccaatcagcgccggggccctggggccgcgccacgcgagcccgctcctcccccgcagggcacagctggattccggacaaagggccggggtcgggggaggggagcgccgctctgtttgctctctcgagggcgggctgggtcccagcaactctcggttcctcaaagagcctcgcccagtgagaagagcctcgtgtggctctggtcaggccacctcagacggctttgctcctagcctatctttccttagcatctgtcctggaggggactttgatgcctctagggtacaatgcctgcacgttacacatggggaaatttaggcttagtgagggaggtggcttgtctgaaatcgcacaggaagatagtggcaaagacaaccacgagctcattgtcctgactagcagcctggagaagggtccaggaattctaaaggacgccctgctctcctggtgtttcactgcctctcttcatcctggaagacaggggacatcactgagagagatcctgcctatgtcccttccattcgcagaccttttgggggtgtccgagcctctgccacaccctgagatgctacctcacactccccagaggcgcttagaaccccacccccatagatcccactccagaggcaggggttggctgtgcggggacccctcaagcggacattccattactacaagcctactacagcttgtagatagtatcccagcgttctggccaggaaccgtgacaggaagagttctgggaagtgtgaggaggggaggaaggaaccaggagttcacagtgagctcttgcttctttttttttttaaacgaacaaacaaaaccaaaaaacggtctccttctgtcgcccaggctggactgcagtggtgcaatcacagctcactgcagccttgatctcctgggctcaagctatcctcccacttcagccttcccagtagctgagactacaggcatgcgccactgtgcccggctaatttatttgtatttttattttgtatggggtgaggggcggtcttgctttgttgcccaggatggtctcgaactcctgggctcaagcgttcctttcacttcagtctcccaaggcgctgggaagcagagctgctgtgcccctccccctcgtgtcttttgaactaccacagcgtgcaggcactgggagaagctgataaactttttctccccttagtcctccggtccaatcacagacagacagcagctgccagcagtcacctgctccagccccctgcctctgcatcactcgggcatcgcacagagagcacaaggcagggacttccccagccccttgggttgtccctggtagcgctctctggaaacctttccaaagggactctgaactcatcatccctcctttcttccccagcccctcctcttgtccccgcctgggacatcccgtggtcttctgcttccggtcactcagagtgaggggttgcagcttccgcttctctctcttgacccggtcgtgcctggaggaagacgccgaggcgggaggtttaagtatcccggtttaagtctccttaggcgaggaaggcttctctttctagcaggtccagatatcctgagtctcccggaaactgcaggaggggacaggacccgacttcgagactgtagggtggggtgaggggatgaggtaggtctgtgagtctgccctagtgatagcctcttaccgcctaggctgcttgggggcaaattttcctccaaggaagagggtggtatgctcaggaaccagcgagaggggggctctaggactgggcgggggtgtggcgcggtcctgctgatcttagctggtgctctgtgagcaggctccttcccttgctgtggggaaatgaagcctgagaccagggtcagaaccaataaagggaccatctgggactgtcaggttagcattttgctgcagctgctcccttaggtcaccactcactaggagcttgtcttct

SEQ ID NO: 913892 - DNA, 4001 bp, Homo sapiens
caatggctcctccatggccagccagctaccactaccccatttgtccccaaagctgaagccattccacaccctcccttttgctcactcacctgcttaggctgttccacgatcaccaggtaggggccatcagctggggacagagagaccttgctgagccacgatctcccagcccctcccccagagagagggcacatgctctccctcccccgctttaggactaggggaggttagtgaacttgctgacctgtttctggggctggctccttgggttccacaatggaggagttcaatttgaaatcatcatattcaataataccatccagaccctggtttggagacagactgggggtggcatccgactctcagcaccccccacagccccacctcccatctccaagtcttcagtggtcactcccccctcctcctcagacccaagagaaagctccttttggaggcagagttgcagacagatggacagactggcaggctgagagcatctgcgagcatacaggtgtaaggcagcagagggggctcgggcagacaggtggacagacacgaggggcagccggccgggtcaggggcaggcggcatgactcactgggttgtagcaactctccatgtctctgggctaggcccggctctgtctagtggctccggccaggttctgcttcccagaattttagacgcccgcctaaagttgggaggagtggcgtgggggagggggtcagatctaaatgggggtgggcgggagatgggggcccagatttgggggagggtccgacctcctccagccgcctgtccgggtgtggcgggtgagatccggtggagagcgagatccggagttgggcttggccggggaaggggcaggaaagttagagcagcttaggaaagtcccgaaaataccaaggggaggcggggccggagggggcgggcctggaaatgacgccactggccccgccctcgcgacgggaggggcgggaggccctcgacagtctacgggctcccgctgcttttcagcgggcagaggtctaggagaatccgggaagccccggtgggggttaagccccctcctccctccagggcagggaacaggagggtctttcacggccgggaggaggctggcagtctggggccaagtccgcctcccgctcccctcccccggtctggagcaaccttgggattttctgccaggagggaggccacggctgataaaccccgggggcttttggggggacattcctgctgtcggacggcctccccttcgaacagcctgtaggcgggggctctttcctgtgggaggccccggggttctgccccgagaacgcgattctggggctgcgggaaaagtgtctcctcctcggagtgggctcttttctctctctcccaaacctcacaacagcagctggtcccacaccgcaccggttctgggcgcgcaggcgacagggagatctctgcacgctcccccccccccccccccacctaatacaagagtgtgtctccatcacagctccacaagtgtgtttcggctgtagtgcttggttgcatgttgtgtgtccatggcgtcaacatgagtgtgcaagcgagcatgtgtgtagataggtgaatcccgagcttctcagtgtgggtgtgtgtcagcgcctgtcttgatgtacggacacgggtgagcgtatcttgagtttgtgcgtgaagggtgtgggtgcaggcaccagtgcaccggtgggcacgtctccgtgtgcatgtgtgtgcgagtgcgactgcacggacgctgccgtgtgtgcgccagcacaggtacaggtgtacgtacgggtccgcgtatctttgtacaacggtgtcgacgtggatccgagtgtcgtcgcctgcgcgccctttccggctgtgtgcagctgctgctctccagccccaggcgctgtccgctaaaggccctcctccctcttttctcttgtcccggccacccaggggtctgaatccagccactcaccgtggcggcggctctggttgcggcttctctccgcgcccgacccacctgggaccggtcgcgacacctcgcctgccagcagggctcagggccgggaaagccccttctcggccccccggaggggggaattcccatgacgtttccgtgcgtcacgcctcgcgccctttttcattggctgaaagtttaactctggactggcgcagccaacccggagcgactcgggcgcgcccctgagaggggacaggctcactcagggcggggagcggggtgacaggacaccaggcgcgagttcggccggccaggggaccgccgagaaggtacccgctgacccagcgccaccccgggccgggagcttccgctgcctctcggctttggctgcgcctaacgcttggctttctctgaagcgggggatccccagggggaagccgacggccccagccctcggggcccccaccctgagcggcgcgctgccgggaagttagcggaagaggaaggaagttattcttgcggtcggtcccgggcgccctctggcggcctccctgggcccgcgagtagactccattcggccccggcccctctctcgctccgtctcatcagcctcaaggctccgggagagacagtccggacctcgaacttttttagaagtgacaggttcccagcgggccagggctcaggagctctgctcaggagaagggaaatgaagtgtttatccaccaaggagatctggaatattagaactgaaaaaggcatccagagtttaaacagctcaaatttccaccgatgtgggaaatcgcctcttttttttagtctcaggctggaatgcagtgaggggattttggctcactgcaacctctgcctcccgggttcaaaccattctcctgctgcagcctaccgagtagctgggattacaggcggccaccaccacgcccgcctaatttatgtatttttagtagagttgggggtttcaccacgttggtcaggctggtcccgaactcctgacctcaggtgatccgctggcctccgccttctaaaatgttggaattacagtcgtgagccactgcgcacggcctatttatttatttatttatttatttatgtttttgagacagtgtcttgctctgtcacccaggctggagtacagtggcgtgatcatggctcactgcaacctcgaactccggggtgcgccgattctctgactctcctgagtagctggggctacaggtgcacaccaccatacctggcaaattttaaaatttttagtggagatggatctcactgcgttgcctaggctggtcttaaactcctgggcttaagtgatcctcctactttggccttccaaaatgcttggattttggattacagacgtgagccactgtatgctgccgaattgcctcttatagaccttccaatttccacctgaacacttctagaggcagcgaggtcaggacagaaattcaccaagcacggagtacatgactggacctctctctggtcagtagcgtttctccttagcaggtgccatgagtaatctccctgcctggagtcctcctcccttaggcttatggtagaacataaactatctcgggtctttcctgcagcttgccccagacgtttttaagaacagaatcacaggcctgcactggcactaagtaaagagagactattatggctctcgatttgggctgtttcctattacttccccacccctcttcatcttgcctgcaaatatagtgtcctagttgctaggttcgggtactttagaagttcttattctccctcccaacaaccctaggaggtgaatattacttttactgatgaagaaattaaggctcagagaggtggagtaacaaccaaacacacagctagaaagggacagagccaggattcaaacccaatctgttgactccaggatgaagctttctcccctaagtttatataaaacaaagcagccctttccaccttactgtgggcctctcaaacaaatatcataagattctgccaaacaatttgctgaaatccagatatg

SEQ ID NO: 913893 - DNA, 4001 bp, Homo sapiens
cgcactatactcagatccatcaccttcttcagttctttggcctcttgctccagctcccgctgctcggcctctgggcagtaggtacatgtgtgacccctgggcttctccctccctgctccttccatgagcacctcccatgacccacccaccccctgcacccatacccgacccaccccctgcacccatacccgtaaggccctggggcctagagcggagccgctgcctctgaagtttttgtatcatagtccccatcatgttcttcttagtcacatgcaggacacccaggttgttaaatctgagaagagagaatcggaggcctttggccatgcagttctttcttcctgaggcacctttcccattgccagggctcagctcagccttacttcctcaaggaagccattggagtttctacttaggcccttgggtttggggccaacctacatctttccccttggtcagatgctaagctcatggaggtgggctggggcctgggactggcagacgggcataccagtgggggccaggcgtagagggcacctactgggcagtcatgtccttgggccccacagaaacggcgcagatccccagctccgagcattgcttgcccaccagactgtgggcatgagcacgaggtgggtcactgtgtgttaccaggtccacctcgatcttggctggtccctcgtagttacagatctaggagaggcagggactgtcagtcagggccttgggcatgctgtccacttagcccaccctccagcaccatcctggctcaccttgacagtgggataggtctttcggcccttctcactggaggcaccgggcagtcctccatgggaggggccttcacagccatatcgaaatcggaagcctctctgaaggtccaagggcatagtagcattgtgatcagggaagaccacccaggccagcagtgaccgcagtgcctggtagtagccctgaaccaaactacagcactctgatcagcagcagtgaccatccaatcccctgtggcctccttcggcaatggctcctccatggccagccagctaccactaccccatttgtccccaaagctgaagccattccacaccctcccttttgctcactcacctgcttaggctgttccacgatcaccaggtaggggccatcagctggggacagagagaccttgctgagccacgatctcccagcccctcccccagagagagggcacatgctctccctcccccgctttaggactaggggaggttagtgaacttgctgacctgtttctggggctggctccttgggttccacaatggaggagttcaatttgaaatcatcatattcaataataccatccagaccctggtttggagacagactgggggtggcatccgactctcagcaccccccacagccccacctcccatctccaagtcttcagtggtcactcccccctcctcctcagacccaagagaaagctccttttggaggcagagttgcagacagatggacagactggcaggctgagagcatctgcgagcatacaggtgtaaggcagcagagggggctcgggcagacaggtggacagacacgaggggcagccggccgggtcaggggcaggcggcatgactcactgggttgtagcaactctccatgtctctgggctaggcccggctctgtctagtggctccggccaggttctgcttcccagaattttagacgcccgcctaaagttgggaggagtggcgtgggggagggggtcagatctaaatgggggtgggcgggagatgggggcccagatttgggggagggtccgacctcctccagccgcctgtccgggtgtggcgggtgagatccggtggagagcgagatccggagttgggcttggccggggaaggggcaggaaagttagagcagcttaggaaagtcccgaaaataccaaggggaggcggggccggagggggcgggcctggaaatgacgccactggccccgccctcgcgacgggaggggcgggaggccctcgacagtctacgggctcccgctgcttttcagcgggcagaggtctaggagaatccgggaagccccggtgggggttaagccccctcctccctccagggcagggaacaggagggtctttcacggccgggaggaggctggcagtctggggccaagtccgcctcccgctcccctcccccggtctggagcaaccttgggattttctgccaggagggaggccacggctgataaaccccgggggcttttggggggacattcctgctgtcggacggcctccccttcgaacagcctgtaggcgggggctctttcctgtgggaggccccggggttctgccccgagaacgcgattctggggctgcgggaaaagtgtctcctcctcggagtgggctcttttctctctctcccaaacctcacaacagcagctggtcccacaccgcaccggttctgggcgcgcaggcgacagggagatctctgcacgctcccccccccccccccccacctaatacaagagtgtgtctccatcacagctccacaagtgtgtttcggctgtagtgcttggttgcatgttgtgtgtccatggcgtcaacatgagtgtgcaagcgagcatgtgtgtagataggtgaatcccgagcttctcagtgtgggtgtgtgtcagcgcctgtcttgatgtacggacacgggtgagcgtatcttgagtttgtgcgtgaagggtgtgggtgcaggcaccagtgcaccggtgggcacgtctccgtgtgcatgtgtgtgcgagtgcgactgcacggacgctgccgtgtgtgcgccagcacaggtacaggtgtacgtacgggtccgcgtatctttgtacaacggtgtcgacgtggatccgagtgtcgtcgcctgcgcgccctttccggctgtgtgcagctgctgctctccagccccaggcgctgtccgctaaaggccctcctccctcttttctcttgtcccggccacccaggggtctgaatccagccactcaccgtggcggcggctctggttgcggcttctctccgcgcccgacccacctgggaccggtcgcgacacctcgcctgccagcagggctcagggccgggaaagccccttctcggccccccggaggggggaattcccatgacgtttccgtgcgtcacgcctcgcgccctttttcattggctgaaagtttaactctggactggcgcagccaacccggagcgactcgggcgcgcccctgagaggggacaggctcactcagggcggggagcggggtgacaggacaccaggcgcgagttcggccggccaggggaccgccgagaaggtacccgctgacccagcgccaccccgggccgggagcttccgctgcctctcggctttggctgcgcctaacgcttggctttctctgaagcgggggatccccagggggaagccgacggccccagccctcggggcccccaccctgagcggcgcgctgccgggaagttagcggaagaggaaggaagttattcttgcggtcggtcccgggcgccctctggcggcctccctgggcccgcgagtagactccattcggccccggcccctctctcgctccgtctcatcagcctcaaggctccgggagagacagtccggacctcgaacttttttagaagtgacaggttcccagcgggccagggctcaggagctctgctcaggagaagggaaatgaagtgtttatccaccaaggagatctggaatattagaactgaaaaaggcatccagagtttaaacagctcaaatttccaccgatgtgggaaatcgcctcttttttttagtctcaggctggaatgcagtgaggggattttggctcactgcaacctctgcctcccgggttcaaaccattctcctgctgcagcctaccgagtagctgggattacaggcggccaccaccacgcccgcctaatttatgtatttttagtagagttgggggtttcaccacgttggtcaggctggtcccgaactcctgacctcaggtg

SEQ ID NO: 913894 - DNA, 4001 bp, Homo sapiens
agatggacagactggcaggctgagagcatctgcgagcatacaggtgtaaggcagcagagggggctcgggcagacaggtggacagacacgaggggcagccggccgggtcaggggcaggcggcatgactcactgggttgtagcaactctccatgtctctgggctaggcccggctctgtctagtggctccggccaggttctgcttcccagaattttagacgcccgcctaaagttgggaggagtggcgtgggggagggggtcagatctaaatgggggtgggcgggagatgggggcccagatttgggggagggtccgacctcctccagccgcctgtccgggtgtggcgggtgagatccggtggagagcgagatccggagttgggcttggccggggaaggggcaggaaagttagagcagcttaggaaagtcccgaaaataccaaggggaggcggggccggagggggcgggcctggaaatgacgccactggccccgccctcgcgacgggaggggcgggaggccctcgacagtctacgggctcccgctgcttttcagcgggcagaggtctaggagaatccgggaagccccggtgggggttaagccccctcctccctccagggcagggaacaggagggtctttcacggccgggaggaggctggcagtctggggccaagtccgcctcccgctcccctcccccggtctggagcaaccttgggattttctgccaggagggaggccacggctgataaaccccgggggcttttggggggacattcctgctgtcggacggcctccccttcgaacagcctgtaggcgggggctctttcctgtgggaggccccggggttctgccccgagaacgcgattctggggctgcgggaaaagtgtctcctcctcggagtgggctcttttctctctctcccaaacctcacaacagcagctggtcccacaccgcaccggttctgggcgcgcaggcgacagggagatctctgcacgctcccccccccccccccccacctaatacaagagtgtgtctccatcacagctccacaagtgtgtttcggctgtagtgcttggttgcatgttgtgtgtccatggcgtcaacatgagtgtgcaagcgagcatgtgtgtagataggtgaatcccgagcttctcagtgtgggtgtgtgtcagcgcctgtcttgatgtacggacacgggtgagcgtatcttgagtttgtgcgtgaagggtgtgggtgcaggcaccagtgcaccggtgggcacgtctccgtgtgcatgtgtgtgcgagtgcgactgcacggacgctgccgtgtgtgcgccagcacaggtacaggtgtacgtacgggtccgcgtatctttgtacaacggtgtcgacgtggatccgagtgtcgtcgcctgcgcgccctttccggctgtgtgcagctgctgctctccagccccaggcgctgtccgctaaaggccctcctccctcttttctcttgtcccggccacccaggggtctgaatccagccactcaccgtggcggcggctctggttgcggcttctctccgcgcccgacccacctgggaccggtcgcgacacctcgcctgccagcagggctcagggccgggaaagccccttctcggccccccggaggggggaattcccatgacgtttccgtgcgtcacgcctcgcgccctttttcattggctgaaagtttaactctggactggcgcagccaacccggagcgactcgggcgcgcccctgagaggggacaggctcactcagggcggggagcggggtgacaggacaccaggcgcgagttcggccggccaggggaccgccgagaaggtacccgctgacccagcgccaccccgggccgggagcttccgctgcctctcggctttggctgcgcctaacgcttggctttctctgaagcgggggatccccagggggaagccgacggccccagccctcggggcccccaccctgagcggcgcgctgccgggaagttagcggaagaggaaggaagttattcttgcggtcggtcccgggcgccctctggcggcctccctgggcccgcgagtagactccattcggccccggcccctctctcgctccgtctcatcagcctcaaggctccgggagagacagtccggacctcgaacttttttagaagtgacaggttcccagcgggccagggctcaggagctctgctcaggagaagggaaatgaagtgtttatccaccaaggagatctggaatattagaactgaaaaaggcatccagagtttaaacagctcaaatttccaccgatgtgggaaatcgcctcttttttttagtctcaggctggaatgcagtgaggggattttggctcactgcaacctctgcctcccgggttcaaaccattctcctgctgcagcctaccgagtagctgggattacaggcggccaccaccacgcccgcctaatttatgtatttttagtagagttgggggtttcaccacgttggtcaggctggtcccgaactcctgacctcaggtgatccgctggcctccgccttctaaaatgttggaattacagtcgtgagccactgcgcacggcctatttatttatttatttatttatttatgtttttgagacagtgtcttgctctgtcacccaggctggagtacagtggcgtgatcatggctcactgcaacctcgaactccggggtgcgccgattctctgactctcctgagtagctggggctacaggtgcacaccaccatacctggcaaattttaaaatttttagtggagatggatctcactgcgttgcctaggctggtcttaaactcctgggcttaagtgatcctcctactttggccttccaaaatgcttggattttggattacagacgtgagccactgtatgctgccgaattgcctcttatagaccttccaatttccacctgaacacttctagaggcagcgaggtcaggacagaaattcaccaagcacggagtacatgactggacctctctctggtcagtagcgtttctccttagcaggtgccatgagtaatctccctgcctggagtcctcctcccttaggcttatggtagaacataaactatctcgggtctttcctgcagcttgccccagacgtttttaagaacagaatcacaggcctgcactggcactaagtaaagagagactattatggctctcgatttgggctgtttcctattacttccccacccctcttcatcttgcctgcaaatatagtgtcctagttgctaggttcgggtactttagaagttcttattctccctcccaacaaccctaggaggtgaatattacttttactgatgaagaaattaaggctcagagaggtggagtaacaaccaaacacacagctagaaagggacagagccaggattcaaacccaatctgttgactccaggatgaagctttctcccctaagtttatataaaacaaagcagccctttccaccttactgtgggcctctcaaacaaatatcataagattctgccaaacaatttgctgaaatccagatatgttgtctactacgtttctctggtaagtcagattcctaaccttaaattaaaatggactaaggccgggcatggtgactcacacctgtaatttcagcacttcaggaagccaaggctggtggatcacttgagcccaggagttcgagaccagccttggcaacatggtgaaaccccgtctcaaaaaattgaaggggtgggttgcccctccacacctgtgggtgtttctcgtgaggtggaatgagagacttggaaaagaaaaagacacagagacaaagtatagagaaaggactcgaggaaccagcattcagcatatggaggatcccgccagcctctgagttcccttagtatttattgatcattcatgggtgtttctctgagagggggatgtgtcatggtcacaagacaatagtggggagagggtcagcagacaaacaaaggtctttgcatcatagacaaggtaaaggattaagtgc

SEQ ID NO: 913895 - DNA, 4001 bp, Homo sapiens
acaagactagaaaataaaaaacattccccaaatcccagttgatggcctgcttgtttataacagtgtacttactatataactaccttctgcaccaaaactttttaaaatcatatatttgtatagatgtaaacaatcttttaaagtttgatgggataagcattcatgtacccaattcttttgtaagaattccacaatatttcaaatccagtataagattaatagcaggaaaaataagcacttctcaaggtgagtagtgcaaaagacttggaaagacaccaatactctgttgtcggaggcaggttccgatatacctcccatgagataactgaattctgccacatccaaccaattaactatacatgtggtttcagtgtcacgccaggacacatgccagcaccatcaggcaaagcaatgctactcccatccaaagaaggtaaaatacgttttcatttatcatggcaagatatgcttcacaaacatccctgccgggaatatctgttccttcatgctccaaaagctcacatggccaggatttaaaccctggaaataggctataattgattccgatttttaaaagtattagtttcacgactttgaacggagaagcacagtacagctaagaaaccagcaaatccagggcctgtataatccaactggggcagttatcagctgtgaggccctgggcatgtgacttaacctctctgtgcttccatttcctcaactgtgaaaggggaatgataggagcacctcactgggatatagaggtaattgaataaggtaatatctcctcaagtgtttaggtatcccctcaagtgtttaggactgtgtgtggcaggccgggcgcggtggctcacgcctgtaatcccagcactttgggaaacggaggcgggaggatcacttgaaatcaggaggtcgagaccagcctggccaacatagtgaaacgccgtctctactaaaaatacaaacaaaacaaaacaaaacaaaacaaaacaaaacaactagccaggcgtggtggcgcgggcctgtagtcccagctactccggaggctgaggcaggtgaatcgcctgaacctgggaggcggaggttgcagtgagccaagatcacgccactgtactccagcctgggagacagagcgagactccgtatcaaaaaaaaacaaaaaaaaaccctgtgtgtgatacatgaaaaagtgatcaataaatgtcaagatgatgcagaaagatgaccagaagacactggggaaccagattgaatggacagaatggtgtggacgttgcaatcattgccaccggggacactaaatattcacggagtgtccacttggctaatatcaggcgcgggcggaactcaggatacacagacgagtatgtggatccccgtgccagggaaacccccgtcggtggccgcttggggacccctgggaattgcagaacacgcgaacagcggcccaagttaggcgaagggccactccccggggcgccagcggcacaaacccgcctagcccaccgcttcgcgggagggcgccgtccccgaggaaggggaggtgccgggaggggcccccaccccgacgccagcccctcaccttccggaaactcgggtactgacaagtcctgctcccagccgtccaccttctgcagatactggtagaccaggctgtccttctcctgctgggtaacggcgtcgagcagggcgtactctagcgaggtctgcgcggggagcaggccggagaggctgcggccccggcctccgggcgccgccatgtttccgccgggctcccgatgcggccgccgggcccgcgggagagtctcgctgggagagacgaaacgttcactgtcctgtggtttccaaacggcgcattcacctcaccctccactagccccactccacgccaatgacacttttttctttttaaagcataggtccaagtgccaaaagtccaaatcggcgcagttcccggggacgtaattaaactgccgtccgacccaccccgccccttttcggtccccacgccgcagccgagcctggacattgagagcgtcagattcaacatggaataaggccttagggacagcgtcccagaggcgctaagggaaacatccccaaccctccacattgggaattagcggactttcgaacacaaataaaatacaataaatccgtaggacttaaaagggcaatgtatttttaaaaattatttttaaagtctctctctttgaacagcatccgccgattcgacacggcactggcagcgggaacttgttcccgccaagaccctaaaggtaaagcgggtagggataacctccagagagaaggctttgtaaactggaagtgactggcgcgagtggctttcacttatacacaaacacagcgttttgtcatctgggagtgctgaaagtgcgggcgcgaacacatttttagatgggggtgccgggaggagcggatgcagctggagcggctcccttggggtgccgagtggcaggtggggggcggtgagggtccttgagggcgggccttagagtcttcagaagggcaggactctgagggctttttggagctcgctatgcttaacctggagatgattaaggccccgcttcctggcctcccagcctctaatgccaaaagataagggagaggctggcgtgtgaccccgttttgagtcaggtggacagagggctggccaccttcggaaccatgggtgcaatacggagtcagacctcaatacaagcccactctttcacatatttgaacttttttcacatatcaactttttttgttcactgtgcagggattgttcattgctgctggaggaagatcatggactgtcgcgggaaactgaagtggttgagtatccactagtcgtggatgagggcagtgacttcgcagttttttgcgaattacacatctctttgattatgttgtgactagttttgttagatagtcatttagtgtttgggatacctgttaagccctttgtccagggactgtggttggatttatgaattatttggacggttgtccacttgaaagaactgacagtagcttcataacaatgttacaaatctcgttctaagattaagctgttgaacctatatttgccattagcgcttaatttttgaagtattatttttatgaatcaagccctggaaaaggacaagatatttgaatgaaatagcacccataatggagaacttcacagttgctactcctgtgataggtttatcttagtttcattgtggtataaatggaatagcaggtgttgtcaggtacaaggtttgtagcttgccaatatgttcattaccaacactgcagattcccattgagttggtgggggttttgttacctttgttttttttctcagcaaaataattctataactttttgtttgtgacaagaaatggactttcagtttacttaagattaatacttcttgaatgataaaatcattttgccatgttagaagacatttccgaagaagacatttgggaatacaaatctaaaagaaaaccaaaacgagttgatccaaataatggctctaaaaatattctaaaatctgttgaaaaagcaacagatggaaaataccagtcaaaacggagtagaaacagaaaaagagccgcagaagctaaagaggtgaaggaccatgaagtgccccttggaaatgcaggttgtcagacttctgttgcttctagtcagaattcaagttgtggagatggtattcagcagacccaagacaaggaaactactccaggaaaactctgtagaactcaaaaaagccaacacgtgtccccaaagatacgtccagtttatgatggatactgtccaaattgccagatgcctttttcctcattgatagggcagacacctcgatggcatgtttttgaatgtttggattctccaccacgctctgaaacaggtaagactgcagaaaacgtagtagtttctaaataatctaaaaagtcttcattaggtcagacataccaattcagtgaaacaaggaaggcaag

SEQ ID NO: 913896 - DNA, 4001 bp, Homo sapiens
gacgccaatgccccggccggggcgtcaggtgagcgcgctaggcccggcagcaagcgcgcagcccgctcccgcagccgcggcctcctcggatcctccgcatcctcctcctcttccgcctcggaaccctccaggggggacgcctggccggcgcctgggcccgcagcatctaggggagaaggggtcggtgaacagaagcctctccaggtccccaaacctcgtcctcgtcctccctagagcaagcagctgtccccccaacccaactctgggtgctgctcctgtccccacatcgcgctccccttaggccggactacacatcctcgccagcgggtttaggggaatggtgtcctcttgccctttacaaatctgccatcaagtaggcgtccaagaaatgtacgccaaatgaatgaatgacaccccgcattaagaaaaaatagtgacattattgggtaaccatactggggggtaggatcattgtattaagacatctagatgtcaaacgcttttagggctgtgccttccccagaccctagaagcctattttgatctaggactcccagcaattaaaaaagaagttattaagctctctgccccaccccacccccgcccccgctttaaagtgaaattccctttcccatcttctctctcccgccgtgttaatagagtttcagatttgtgcggggccggatcgatagatgtcatctattaaaggtaagttttaatcgaacaatattaggatcagacagggaaagggggtttgaagtcggtacctgcaagctgcgggcaggagatatgcaggcgccagtaatagaatatcgatcacgagggtgggggaagggagggcggcccctcggagagaagatccgaacaattaccaggccgcctgcctgggcccaagtgcggccgccagaggcgccccgggccccaggcaatcaccgccaaacttggggaggggagcagggggctgcgcggcatccagcctcccccgatgacctgagcctctgaccctccagggagccgcctttccctgtctgatcccagcaggactcctgctgtcttccgtccttccttccagccacaaactttcctaaccccttcatcaggtgtccgccagcgttgggagtaattcagaaagggtttcgagaagaaagtaccgaaagcttcccaacactccatccgagccccgcccccagcccagtcccagttaacagttgagtctggggagcttgagcgcctggggcagcccagccccgcaggcgtctccgggtggcacctgacctcgctactcacgaagacccccggcgcaagccttagcgtcagctcccccatccataaaatggaggtgatgttaatgatgctgtccatctctcaggttccgaagttttcatcacctttatcccagcccttagcccaggtcctagcacgtggcaagcgcattaaatgcccgataaatgagtaagcctggcaagacaggcgccaggtaagtttccaccgcgagcatcagaactgtggtgcgggtgagcttggcgggtgagcagggatgcggcaaatccctgccctgtaatgcggggagcctcctctctgcctctatccaagtccgaggcgggggctacacttcgcacccggtcccgtgcgccttctctctgaggaagacgctgttaagggccactcaccgggcccggctgttcccccatacactccgcattgttggggctgaggcctcctggggccggggccgccttgcatcttaccaggggtctccagctgtcggacagggtccctggagctggcatctttccccgcttcgacctccgccaaacttttcctggcttcccggggagccgggcgcacggcagggagcgctgcgcgggtgaatttctgtgggtccaggatgtccaggacagagaaagaaatcttgtggtgggagggagccgccttggccccgccgtcctgccatgccagcatgcccgtcgcccacgggccggcggtcggcggcgcggggttggggatggcgccgctcgggcttgccttcggctgtggcttggcggtagctttccagccaggagccgggtccgcgctgccaagtgaagctggggaggggggcggggaggcggggcggggagagcgccgcggggggctgcgcgccgattggcaccggcgcagcccgggccagcctcgggactatcaggcgctgtgccgcggccgcttgcctgggctcggggaagcctccgcgcgcccggtgcgcgcgaccgcggggacagtgttgtcgtctccgcgcgcctccgcccaaccctctgggactctccgagggcgcgagggaggcttccatcccggggatccctcaccccgacacacacacctctgtgacttgagtttgttccctttctccggtgcacccgccttagacttggggatgcaactgaggccaggactgcttactcccaggcaatgctcagcgcatctccttccccgccagtgaattactgtaatagcttcagacccggttacctcggaggtaaaatccctcacgttctcacagtttagcgttcacaaagccctgaggcttgcacgatctcttttgattatttgagcatccctgtgagatgggcgtcacgtggcacagaccactgtccccgttttaaagatgaggaaatcgaggttcaaaggtaagaaaagatttccccagggtcactgtgagttggtgacagagtctgggtttggacctcggtcttctactggaccagtcagtgcttttttagtacatcctgctgtctcagaaacggagggagaaaatcccggactctcagtcttttgcttccactccaaagccaagccagaggccagcaagaggtttggagaggtggtgagcccccaccgggattccagccgctttggaaaccttggtggcttcaggcacagagccaagtgagatggctgagggtgtctgccctggtttgctgtgacccggagcacagccctcaatggacaaacgtcaggccttctccagagtcacaaattcgatcatttgcaacagaaattggatctgagaattaggttgcatctctgacccccattccctctcagccccagaagcagaagattcagaaatgcctgtctggtttgaatttaaggtccgagaagagagacagttgaaatggccctcatctgccccaccaagtcccctgggaaagtgatcaccagtggtcggagaagcttccactggccacaccaatcctgaatttcttcttttgtctcttggaaagcacacagcagtctgtgagcactaagcatttgtttcaggcaaattctgaggcttctcctagtgtttggcccagaaccacctctgactctgccgttcctttcttctccgccccatagggtttccaaacaatgacttggcaattaatattgtctgagcaggtaaggagtaggaagaggaggagaaaccttctcattaaagtgctgggggctgctaatcccatctgttattgaagaggcatccttagaagccagctccttgtagcttttctcattcaaaccttgctgcccctcccagaggtggtcactgtattccctgcggactttaaagcctgcggaaatcaagccagctccagtcctaaagtgaagacggattgtgcttttaaagctcaggaaaggaagtgcccttcccaagtccactggaccacctcccatcgaagggaatgtgaaaatcccaaagaaaagatggccctgaaactaaaaagtggcgcccgacaacctggactgcaaatcacagagccttcctgaaatacagatggggtactttgttttctgttttgataatgctttctcacccagttctcgatttttttttctaatcttcctttttgtttctcccccttcacccttttgatcctagccgccccttctacattttcccaccatgtttactttttttttttttgagacagagtctctctgtcacccaggctggagtgcagtggcgcgatcttggctcactgtgc

SEQ ID NO: 913897 - DNA, 4001 bp, Homo sapiens
gctcctgtcctggagcaccgtgaccctttttggtggctgcgcagagcgtgcggtagtaaatggctggacttttgggaacgtttgtggctcctggcgctgtgggaccctgagacagccccagtacccaaagaacgcccttagcaggcggaggcgcgtttcgtggagaggggtagttagtgcgtgtttatttggatcttgagcatctgcgagagaagagattactctgtattaaatatgcggctcgacgtgctaatgactattttcaggatgaaggcttgcaactacataataactacagtatttgcaaactcgtttgcattctactccaccaaggataactgaaggtgtgaggcgtgttggtatgagtgggccggtgggcatgggttgcgcgaaaatctgttctgagtgtaacgcttgtgcatggctcagggacttgtgtgtgtgtgtggcttataaaagactacaagcgaatgttatgacgacatctgtgtgcactttgaaaatgaagtttgattgactagttatagacagtttcatgccgattttcggctctgggaactatgagagcataggccttggcctctgccacatcaaaccgcctcttggggaaagactgtgattctgtcctcttaaatacacttccttggggactttatttgattatcccatctccctatcaattcacttcccatccgatgtgagcagccaagatctcggactcaagttcggcgcgttttctattaggcccgcagcctgggacacaaagcaaaacgttacggattttcaaaaaaggctggcgccttagggatgtgagagctatggtcgcgcggaatagacattgttcccacgcactttccgatcatctcctctctctctaccgagtgccacgggttcaaggacgctgagctccaagcagagaagggaggaaaccgcccagctggcctccaccaaagttcctgcccctgcgggtgcgagagacacaggctgcttgggctgtcttttcggagaagaaggggtggctgccctgggctaagagaactcatctcaccctagagggaaaacgaaaaaggtccaggctcctgccctttttgggggaagagccttttggggcggggggaagagcaaaaatactgccagttatgaggacccaggcgctgagcccacgtcgcctctcagcatcagggcagcagtaaccaccttcccttccctcatttcccccttttggggggagtagttgtcagggtcacctcgtccttgtctctccaccccggctcccttgcaggtacctgcgctttgtggagctgtcggtgaccagggcggaggcatggccccagccaaagggtaaagggatgggcagctgcgctggcaaggtctgtgggctgtttgtgtgcgctctgccattgctccaggtgtgcgggtgcgttttctttccccctctactcactttggctccggtccctcacgacctcgggctcctcttcatgttccttgggctcgctgcacgagtctcgcaggaccgtgtggacatagccctggggacacagccctgaatccccgtggccgtctgctgcggctagtgagttcaaataggacaatttctcgccctcgtcttcctcgtcctcctcccctccgtcagaaaattgcgtcccctcagcggcggccagcatgcagggcgcagagtggaagtggtgctccaagtccgcctgcaagtgcgcaccatggaagtgctggtgctgctgctccagattcaaaatgtctttgactgagaaaggggtggaggtgaccgggcttggtaacatcatcagggccacttaattgtccagtccaaataataaatcccggcgggggcggggaggcagcgcggcggctccagctctcctcctggactccgccgctgctgccgagtcgggcttttgacagacgcggtcccactccagtctaaatcgcctccattggccgggacctgggggtctgggttttgttacagccactgcagggactggggcccgggctcctaagcctctgtccgggagatttgcgtcacgttgggggggcggggctggcgccccaacctccctccctataggttctggctcatgtgggccacgccccctgctctctgcgagtgggatgttgcggctctaccagaaatagacaaggactagtatagagtcctgaagtccgagacgctgcgggcgaggctgcacagatccggttcctgaaccattgattcccgcgtggctgcaccttcccgacctaggccagttctgggaggcttgctgtccacgaaccaacgccagggaaggatgccccaggagtgtgtttttttcagctgctgcgcggggcaggaaaacttcctggcgggtaaatactgggcgctggatccacgaggagatgcagtgttttatctatctatgggtgggcgacatgtcctttttcaacttgttgcctttgctcaagctttctctccacttggaacatgtttctgacacttagcctccacgagtggaaactgttctccaaggaagagctcctagatcgtctagccggaagtcccctctttcaggctctgaacctgcagcttgtgttagcaaaggacatgcatgtcacttatcacttcccacttaattctatagctgtatgtgcctgcctggtcgccccagttagactgtaagctccatgagggcagtgtcccggggttgcttttgcccttgtatccctggcagcagccgcacagagcagtatgtgaaaggaagatagagttatgactaaactttggtattcgacagctcttgcttggcctagtcagtgtgtgatcttcggcgtttctaagtctgttttctcgtctataaaacgaaggcagtaataccttttttggttgttgctagggttgaatgaggcaaaacatgccagaatcttagtgcacggcctcacgcgtgttaagcgctcagtacgtgtcaacgactgcttttctgtatgggaggtcaagcagtgtttgttgactgcattggtggtgcgtggctggagtgtggcacatactgagagcaggatctgtcctcacaagggaggtgacccagccttggcagccttcttttccacctattgaaatcaggagcctgaatgtaggccttgcctctccgacaggcttttaaaatttctctacctacacgccttctggcaccttcatgaggccctggttgttttctgggggagtctatacagtcccccacagattctggaaactctgagctggaaactctgggaccatcttctcccacaataggcatttgctcgctaccaggcctagcccagtgaggagcagcgggcgctgctttgagggccacagaaagacccgtgtgcagcgctggccttaaaaaaatagggaacggttccagctcaaccgtggctgtcctcatccggccccagccaatccaagcattttttggcggtcaggatggcggagctgaaagagacccgtctcacctggaaggggcaggtgaaaggtgcagggacggtggacattgcctccgagcggcataagacaccggctgggagtgggtacgagggtggagggctgccacgcgggtcccgcaacggcgacaggagtgggtgcccaaggttgaagggagaaagaacagcctgtcgggaggtgggagaggcggggctctgcagaagggagcggaactgttgtggagaggcagcccctgggtccgcccggggagctgggatgccgcgcgggccacgtgcgccccggagtacttagggtagcggcggcccgcaggcagtagggagagaccctctgtgggcagggtcttgtgctggaaccgccattcctcagccacaggggcgcccggtgtctttctgctttaaatcctgaaactattgacgccccaggcggagaccagtgtctacaaaccaggcggtgagtctgcagagggaggaatgtgcctggttttgccgtggatcccgagcgctcgggcacaaaaattccgaggtggggg

SEQ ID NO: 913898 - DNA, 4001 bp, Homo sapiens
gggttttgtcagccgcagtcacagccccgcggagctggcggcatttcagggcaggagacgggtcccccgagcccccggctgggcgctgcgggccttgcccagggggcctccggctccctgaccccgcgtgacccacgggaggccccgccgctccgcgggcggaattatttcggatttctctttgcggtcctagttcggaagaaactgctttccaccgcgggaagatctggcgggatggtgaccgaagggcctccgtgcagcggatcagacccggttccaccggctgagcccagggcgggcctatgggatccgctgatgcgcagagggactttggaaataatcagagcgaagccctcggccaagcgggaacgggtgcccggtggcaacgagtacgtggccccaaagcgggaaaacggaagaagaaaaacctcccgcggggactcgaggcgggtacgcggctcacccgccctttcgggaacccccaagcgcgtccgaatccgccccgaggcgaggcgggccgggccgtacctgctgctccgtccccggctccgtcccgggctcctggcggctgtcgctgcggttccttcccgcgggccgggccccttccctgcgccttcgccgcctcctcgcgcctgcccggggcccgcagcctccgcaccgggaacccggaggacccgaggcgggcgcaggggcgaagccggggccggggaggggccgcctcgctccgggttcgagacggaagaaacacgcggcgcaggctccggagcgacggctccgacggggacccgttaaataatttattgatgatacaaagcgactcgcgcccacccggggccgcccccggattctgcaaaaatagattcgcccccaccccgcgggtcctcacaaggcgtcccccgcgccgccgccgcacgggctgaccagcgccaagttcgagggtttgtgcttcttgagcagccgcgtgatcttctcgtcgtccgagttggggtccaggggccggttgtattcgtcgtcgtcctccgcgtccgagccgcccaccttcagcttctcggcgtccgagtcctgcttcttcttggccgacgccatctccaccgcgtgccgcttgcgccacttggtccggcggttctggaaccagacctgggagtggacggggcggtcaggcggccgcggggcccggggctggcgctggggccgttcgcaggacgcgggcccccggctctgctctcccgagccccgccgcgctcaccttcacctggctctcggtcatgcccagcgagtaggcgagacgcgcgcgctccgggcccgccaggtacttggtctgctcgaaggttttctccagcgcgaagatctgctggcccgagaaggtcgggcgcgagtgcttcttcttcccgtccttgtccaggacgccgccggccggggctgcaagggaggggaagggagggaggtcagcggccggcggggtccccctccgcgcccacccgccccgcaccccccgcgcgggccactcacccgggccagccagacgcgggtccctccagggcgcgccctgcaccacgccgggccagaagatgggcgggcgccccggcagctcggccaggggcttggggtagccgcgcgccacagcggccgcgggcccgaagtaaacgccggcggacgacgcgagcccgttgagccggggcagcccccccaggaggcccccgcccgccgcgcccacgggccggcccaggatgtcgctgatgccgtgcggggtcccgagcgggagctgcgcgcccaggccccccagcgcgggcgccttgaagccggccggaccctgcagcgcgtaggggaacagcgacgtcttcatctcggccatgttgtgcagcgcggccagcggggcactgctcagcacgaacgcgcccgggcggttagtgtccatgggcgccgccgccgccggcccgggctcccatccgggccccgccgccgccgcccctgcccgccggcccgggaagtttgcgcgcggcccgggcgggcgtcggctgcagcgcggggcgcggggcgcggggggcgggcgggcggctccggcgcggggcgggcgggcgggcggcggcggcggcggctccggggccggtcggagcggcgccgcgcgggacggacgcgctgataacgggggctccccggggcgcggcgcgcgcgctgattggctgcggaccccgcggtccggccattggccggcgccccccccccgcccgcgcgcccccgccggccgcgcactccatgaagggcccattagcgcggcaggtgcctcccgggctgtaaattcgccccgatttatctccccggggacgaaataaatccagcttggatgggagtgtagttaggcaaaggttttcatgcgaaatcaggaaaaaatacgagaacgtattttattaacggaaagaatgcagatttgaggacccgcccgcgcgctcggagcgccccactcggggaagagtcccggcccgcgtcccagtcgcgactgctccgccgcccgtggctggggtgggtgtgagcggcagcggacgccggcggggaacgcgctccgggcaggtcggggccacaggagggcggaggacgcgggcctcgagtccacggaatccacgggcctcacggccgggcgaggctcgcacggagctgcctctggtttcgccgacacgcggccggcgcggtggaggagtgaggcaggcgggagcggggcggggaggcgggtcccgggaccacacgcgcggctcggcacttccccgtcatcggcctccaggtctcccgctgggggtcccccaggatgtgacctgggcccacgacttcgcccacgggccgcctctcgcgaatccccggccgggagaacagagaccaggacggcctcagcgcggaagccctgtccagggcccgaacgtgggtgcgggctgggggcgcagcggcagaaacgcggccttagacgcgcgcggggggccggtgtcccccccgcccccacggcaccgggagccgctcgctcatccatcccgcagaccgggcggtgagatgactccgagccccgcgcacggcggccgcgagcaaacgctccgacgtctgtggtgacgtctcgtattgatttagggacacggggcggctgtggctgtggcccacggctcgtggggagcccgagtctgtgcgcagggaacgccgctgcgtggcctctctcgggcctgtgccgcggaggaaggcggcgcccggggttcggggccggggtctcacgtccgccccctcgcccccctccagcgtccgttttcgttttgtgcaggtcgaggcggggacttggcgccgtcggccgctcctggatggcggcttggaaaagccacctgcggccaaactccggggcagtggtgcggccgccgggtgtgtgcgcgctcggggctgccccggcggcttccggctccactgaggtgcagccccgcgttcacggggggttcgcttcccccgtcgactccgcactcgattcgactgggattgggattcgattgggcgcggccgccccaccggtgatcggcccccgcggagcctggcccgggaacccccagcgcccgtccggccccgagacccgccccggcctgtcctgcgccccgctccctcggaggagacacgaggaagggccctcccgggtcgggttcgggcccctcccagcaccccaaggcgacggcgcccgcgcccaaggctcgggctctgagctgagacgcgggaactgcggggccggggggggcgggcagggggagttgggggcgggggctgctgtcgccctgggatcccccactctgcgcggccgggcagaccctgggcgggccgggaggggtgcgggtcgcccgaactgaggcccaggaggcgcgcgcgggcggaacggcgggaggaagccgcgctcgggacaggctctggctcttctcacagcctggaggggcggggcagggggcgtcgctagcgctgttttatggctgaggaaacatggacctggaggcgct

SEQ ID NO: 913899 - DNA, 4001 bp, Homo sapiens
ggcatctctaaattttgattaacctttctaatatataaaatgtgctgatatacaaaactgaaaacttccgaaggcagcacagatgcctctgggtgctactctgggaactttagcttcttgaaaggtgtcgggggacaggctcagatcaatgcgcacacagatgaggaattctttgtaccaggggcattctcaacagtgtaagcaaagaagtcctaatcaagcccccaacctagaatatcaatcaaaggaggaacaataaacagaaattacagcagagaagataaaagtccagggtctctccagaaagaaaacacaggtactgaagctaatccatcagcttgcatctgcacctgggcccatttctggcaatagaactaccgtttcaaaaacatatttgtatttagctatctatcacaaacacgtttctatccctgcataaacagggctcaggttcagattcctatgcaatttcctttcctctctttaaaaaaaaaaatattctagactcgaacattcgatacttgcagccgccactgaagtattcacggcaaagataaaaacaacttgcaaatgggagatgcacatagtcagcttttctttttcttcatttgttaatattttataatgaattagaggtcagtcaaaagtccctttctataataaatcttaaagtagacaagtagaatgcaaatgatttacactttcaatgatcaatcatttcaagaatctctctacgaactgagtaaaccatctgtgactcaggcctccctatcatgttttttaagctgacccacttctccatcactcaccatggttcgaaaaatctcacttctaagggtgtagcaagaaccgctctgtgccagcgcatagtttgaatccaatagggtaaaagggtaatgtaaacagcactttaaaaggacaccagtttttatttaaaatgacccactgcctctaaaaagagagcatcaacaccggccttcacctgaagcaatccttttctccaacagaagagcaaatcaagtctgcagggttcgggggcaaagggaaaggattaagaaatccgatcaagtgtgaaaatgcgtggtgcatcgagttttggagatcaaataccagctttgcaaacaggatacggccaggtcagcgggagcccggttcaggggatcggccctgctctgaagagctctagggacaggcgaggcggtgcaaagcccagtatccccagcaggggccgggcccgggaccccctcggcgccagaactttgcgcagttcgccgcctgcggccccgacaccatcggggcacctccacgccgctccacccacgtctttgcccattcttttcgggtggcggctgcggagagggagtctgaagggacttaacaaggatggcagggagcagaggagggcgacctcctaccccaggctgcggccgccacaaagggaagggcgtagcgcctctcctcggcgcccaccggagccacccgcgggcgagggcaacaggcgcctcctgggccaggccgccggcggggatgggcgaggctggccgggggcgcgcggcaagtgacagtagcgtctccccgcccgggccccagcctccccgcccaccccgggcctcgcctccccgcgcactgcactctcccgcgagccgcgcgccccggacctcaccatgggctccgcgccacggagaagccatcgcggggcggagcggccgaagaacccccagtcctgggagccacccccgaacgggagaccgtggcgcgcgcggtccccgccctgtcgcgcccggtgcgccagcgcgccgcccctaccctttggcgtgctccgtctcctcctcattgtccccgtctatcccgcacgtgtcctggtcgtccagttccaggctctgctggctggccgcagactcgctgtcctccgccatcgcggcggcgctggctggggaggcggtgctcggggccgggccggagcggccgcagctccctctagtgcctcccgccgtactgcttggagtcggagcccgggcgctacgccccgccccgccccgcccgcgccccgtcccgccctccgtcccgccccctccccgccctccgtcccgccccgccctccatccccgcccctcaccgtccgcgcccagcccgccggccccgccctgcccgccggccccgccctgccccacgggcttgaaccccgcccacctcttcgtccctccccaccaagccccgcctctccccgtcccgccggcttcaatccagctctctaaccccgcccgcctctgagacccctcccctccagccccgcctttccccaccctgccggcttcaaacccgccctctaaccccgcccaccgccgcagcccctcccagatggccccgcccctccccgccccgccagctccaaccctgctcaccctggccagccctgcacagggccgagtcctgtacatccaggcctgcgcggtgcctctgcctggggctcggctctcaaagctgcaaacgtgcagacttgacatcctgagtggcggcatttttggaacacaggccatgcgattttacttctggacgaattagggagcgctcccagcccgtgcaggggtttttcccactcaggagtaggcactcagggatggggctttccagaaactcttcccgcccctccacatacatgttaacaattccatttcgcatctatctatccatctaatacattataaaatcaaattcaaagtcaaaaacagtatttccagccctccaccgccctgtcccaaccaggcttgcagcactaaaactcttgacagaaatttttgagctacccctgctttccctggacactactacggacggctcagaccagaacagacatcttgagggacttggggacgtgtccacgatgctgggggattggacagtttcaggtaggctaccctggctttcccaaagtcaaggtcatgacctagatttccaagcaaacgtgcacggccttctgtgctgaaattgtccgctgtctctctcagaagagggaagggaggcattctgtagtactgccaaatagaagaccggtgaagttcagcctctcttatttgctactgcattctgtacagagcagtcctgtcctttgctttgctgagatgatcttgttcaaatgtgctgctaggccaccggaagtctccgcagtggttttgcaaagataatcatcagaacccgctcagtgaggaaaatgagactttaaagagccacctgaattttttggtgtgggtcctttttttgcagaagatactaggagcattttatggcttttttccccaagggagactatgtttttaaaacgcaatgagctagaagtatcaaaagatgaaaactgcagagcgatttcaaagcccgtcagctgtttggcattgagacaactaaaattctgtaagaagggcaaatggggtcaaaacacaaaaggaaatacaatattgcctttaacaacggcaactatttctgaggcaaaatgtcacatgtcacctctgtgaaactttaggatagaagcaaatacagatgagtgaggttcctgcagctcatctctgtgaacatggattgttggagaacccgcagcccgctcgggtaaccaacaggaaactggccaggagcaagcctatcaatcaaatcatccactctaacctgccagaagggttctctaaaagagtttttaaaacttaaggcaaaggaaactcagcagtcatatatttatctgaattttcaagaagttttgactaagaactgctctaaaaaagaataagaaaacaaataatcctggaaaaataaaatgagggcatcaaaaaccagtgaaacactagaaaacaatgacaaacagggaacatctgttccccagaatggaaacaagttggtacagtactggattgaagtacatcggtacagtactggattgaagtattatataatacaaatgttttacagcattaatctttggaaggaaggaaaagtttacagatgaccctggggcttcc

SEQ ID NO: 913900 - DNA, 4001 bp, Homo sapiens
gcctgagcccaggaggtcaaggctgtagtgggctatttttgcacactgcactccagcctgggtgacagaacaagaccctgtctatttaaaataataataataatttttaaaaaatggacctgagaagactgaatagttgtctaataatctgatatagtcaaataagaataccctaaaagtaccagcaaagttgtagaactagcctgactcaaaatagtcatattccttacaagttttgagtacttaataatttttagatagttttacaaaataaccatgacaattacaactcaatttcaccccaagtttccacatgaaaagaaagtcagaagtttagaagtgtaccttggcaatactgtgaagaatgaaccagagacaagcaatgttcttaccttacctaactgctggtgaatggcaaagtggcagcactggcacactgcccaatatttatgtaacggagtactttcagtttgttttcccaagtagtgcatcttcagatctgccttccagacaaactaaaagcagaagcttgaatgaatactgtattgaaatgttttctcatactgactgtgataaagcatatatgctttatagcagtcctataggactactatccttacccactctaggaagatctgagaacaagaaaagcgattactagaaagcaaagttatttccatgaagaacacttcagaataaatcaatggaaaccagagcacatgatgttttcacaattacctggtcgcttttcctttgggttctccaatggaatgggtttcttagacacagcatctttcacagcttgccttagtttcctctgttcttttcggtacttcttgagagtgctttgttgtttaaactgcttattttttagcttgttttcaagtttgactttactagtttttattaacttgcgaaagcttgggatctgttttttatttcttctctagaaaataacagaaagaatactgcatacccagaaacttattttttaaatcaggttaaagagaactgattacaaatttcattagaccaattccacaatttcaatgtcccacagccacagacttgcatataaaagctaaaaccaaacgatggctttaatcctacagaagagcgctacagcatcagttattcaatcccaattcacagcaattcaaagggttctacgatccccaaacaggttaagaaccactgatctagtagtggtaagtggctattcaaggctagtttaacacacctgtagtttaacacattcaaagcaaaatgctggctgtctttaataaaacttacatttatctacgattttattacttacaaagtgctccaacaaatcacctctaacagcctagttgagtactgactgctgttatcctcacattactgatgaagctgccaaaagacccataaactaaggagggcaaaactgaattcggatctttggattccacttctcttgctggtgactcattcagaaatcccaaagttagtcctgaaccccaggactacctcttattttctgggagaaccaggacaaatcacttgcttttctatctctttacccttcatgggtaccgtgactcacattataaactcgctgagggtaggaccctgcttctcatttgtgaaaaacgagttcgaaagacggtcttgaaaaattccttcaaagtatgaaatcccacgcatgcaaaactccgtgcctgtctcttcgtgatactctgaagtggtgcgcgcacacagtgggtaaccaaggatgagctcggtgtaaggaatggaaagcccccagtctaaaccaccgccccctagacacgggtgaaaacctgcctaaaagctaactcaggcagtgactctatcacccgaaggggccctaggccgcggcgaccgggcttttgaggacacttaccgccttcatccttaggccttaaatgaatgccggccagacaagttcaccagaagcagggttactacagaaatcccggggaatgacacacgtgccgaagtccctacactaccagagccggaaacggccttcagtccctcccaatcctccgccgccggaagtgagggcgggacttccgtagacaggttcgggctcgcgccctctcgcggtgactgtctcgcggccctggaccggttgccccccggcgtgcgcgcgcggactggcacgagggaagccccgagggcgtcggtgccaaaggcgggaagccgggcgggaggggcgcattttgcaaggttatctgagtatgattctttgactctcgccctatttatttcttttaaaaccttggggaaatcgggctcctcctctcagaatgagaggacttggttttttcggtcacctcattgcattttgtgcctctcctcacgttgcttatctcatgctgttatagatactgattttcgtagtctttttcctccatacagtcctgagggcagaaagaagcttattttttgtgtgtaatgcctgcccctcgacggacattctggccgtgtttgtagcatggcgaatgatttctcatcagccttggtcacttaaaagtctgtgattcttagtgttttattttgcattttttttttgctttaatttttaaccattagctgataaagaactgtatccatggctgggtgcggtggttcacgcttgtaatcccagcacttagggaggcagaggcgggtggatcacctgagttccaggagttcgagaccagcctggccaacatggtgaaaccctgtctctactaaaaatacaaaaatcagccagacatggtggcgtgcgcctgtaatcctagctactcgggaggctgaggcaggagaatcgcttgaacccaggaggcagaggttgcagtgagtcgagatcacaccactgcactccagcctgggtgacagagcaagactgtctaaaaaataaaaataaaaataaaaaactgtatctgcatttcagtatcttacaactttgggtaaattctgtctgcttagtaatttcaccaaagtcgttttttgtttttgttttttgagacggagtcttgctctggcgcccaggctggagtgcagtggcgcaatctgggctcattgcaagctctgccttctgggttcacgccattctcctgcctcagcctcccgagtaactggaactacaggcgcccgccaccacgcccagctaattttttttgtatttttagtagagacggggtttcaccgtgttagccaggatggtctcgatctcctgacctcgtgattcgcccaccttggcctcccaaagtgctgggataacaggcatgagccaccgcgccccgcctaaagtcgttcatttttacaggaagttttatggattgcaagaataagagtatcaaagtgcttgtctctcaaagacttttttttctcaataaatttaagcattccacttcaagttttttgtgggtttttttgagtctatgatttttgagcatggccctgacacagagtctggcctcgcagtcctgagcaggtgggaaaacccagtagtgcggctcaaagggttctgagccccttgaatagtgttgctcttagagagactgagggaaaaaagtaccaatttcctgatcccaccacaaagaccaagaggtccatctggcactcttctttcaacctcccttccaacttcttccttgctctgtctccttccacacagtgtcagaaacagcagagcctgtcccgctggagtattacttcatcaaacaagtggaaaacatcagcctgtgctcttcccaagtgcctgaattccctcccaagcatatcaacatatctacagtcactcccatccttttagccttccttccagtctctccaaggatgaggcatccccattccagttcaaaaccaactcctcccagcttcatcagattcttgtatcattaattatcccttctttcctgtgttctttccctctctaatagatccttcccctcagcttataaacatattcaaatctcttccatttttaagatttgttctaataaacttat

SEQ ID NO: 913901 - DNA, 4001 bp, Homo sapiens
ggctcttcccactgctcttagaaaatgaggccaattcacaacgtaactgtgccacatgccgctgtacactaaaaaacagtgtttaggccggtcacagtggctcacgcctgtaatcccaacaccttgggaggccgaggcaggcggaccacgagaccaggcgagaccagcctggccaatatggtgaaactctgtgtctactaaaaatattaaaaaatagctgggcgcagtggcgcgcgcctgtagtctcagttactcgggaggctgaggcaggagaattccttgaacctgggaggcggaggttgcagtgagccgaaatcgtgtcactgcactccagcctgggcaacagagggagactctgtttcaaagaaaaaacaaacaaacaaaaaaacagtgtttagctgaaagagagcagtctcctaatttacagaagggaaggcagataaaccaagacgcgccagggacaacagggaatcaggaagcaggatttgaggcctagaacccagtttccagatgcctgtccatcaccgcacacatctcgaactttccagaagggagtgaactggaaaagcgctccctcccttctttgccccctcccatccccggccgcttttcggttgaggggccgagcactccagcaaatttctcattgccccgcccccgagggtgtcccctggtctggctggtccccagatgacccttccggagagggtcaccggctgtctgaccccaggcgcgggagcgaagggcccccggcaccaggtcacaaggggcgggcaggcggcaggtcggatcagattagcgtttgtggattgcgccccggccccagggagggccgtctggcccccgcaggcggagggaggcgtgggcggccgcggctgcccaggcggcagaatgtggattgaggcgcggaaggggctccctctccgcagcacccacctgctcgccgcgctgggtgcccagaacgcgctgccaggtcctcgagggcgataccctcagatccctgccgtccttgacacccactcccctgcaaatcatggccccgaacccggggttaagcgagacacttgacacttccccggcgcggctggaggacccaaggctgccacagttcgcgacttcgggacagcccatccctgatctccgggccgtgagcccgaatccccgatgttaccagctcagctgccgatactcccgacgtcacaccccgggacccattcaccctcactcgcagaaagaaaaaaaaatcgccaagaccaaaccattacagtaataccaacgaccgttgactgtggctgtgccgggtactgcgctgagcgtttcgcgcgcattgtcatctcgcgctttccacagtctgataggcgaggtgttatttattacacctatcctacagatgcgcagacccaggctccgggataagcaacttcacaagactggagattagaagctcccacccttccgcgctgcgctccgcgcaatcccaaaccaaaacccagagacaatggtccccgtcgaggacacaccctgaacgctagaatcccttcccgactcggccgtggatacgcccccagccaccaacgctgcaccccgagcctgctgacgcggagacacccgcagagctaggccctgggctcgggacgcccgggcggctgcaaacccggctcggagccgcagcccccaacccacagcacttcccgagtccgctggctggacgcggcggaggcgccccgggggtgcccagcagggcgcggcacgcggcactgcctaccttctgcctgtaggctgcggatgatgtctgccctcggcagcgggtcgcggtagaggctcagcatgtacgccagaggggatggcgacgagggctgcccccgcgtacgcaggagcgcagtggccaccgtcgcagcacccgcctggagtagggcccaccaggcgtgcagaaggaagggcaggcagtgggcgtgcatggtgggctggccaggcctgaaagcagcacctccagcccttatatcctgggcctcagcagccgccccgcccccacctttcctccctctggggaagctttaagatcatataacccccctccggagggtggggggcagagagacctcctgctggggatgggcgagacctgagcctggtgcggaggaggcccgcaaagctggcggaggacctagttccagggacgggatctagggctcctggtttgcccggtctggacaccctggcaccctgctcctctaggtaccaaacgccttgatgctgagacagagcaggcttgtcccggcagattcccaggtcagaactgcgacttccttactcgacctcacctgggatccctgccccatcctctccactcaggctgcaaatggaccgcaggctcctcaagaagcaggaagagaatgccgagggatcctcgtggctctcaggcagactttgacacaatctggccggcgcagcctccctggccactgtctagatggcctcggggagcacccctggccctaccaaatactgaagtgctttcctggggaagacagaaggcaggagggaccaggacgatgacttctccacctgaaaagggagtgttcagcagaagctggagccagatggagccaacggggtgatcctggttcatcaggctcttccccgacaggcagacatcaccccagtgatttcaggaggaaaggtgttacccttgttgcccacatcccccaatccctgcctggtgtggcagggccacagaagacctgggtgtcggctcagggccactcactttgatctctgggctcagctttccttatttgcacaagagtgatcttgtctggcctcctcccttccaggtgcaaagtcaaatcagggctggaatgacttttaaagaaatgtaaatccctgccccagtgtctggccccatccgttttcctttacacctgagggctctttctcttcttagctccccccacctacctagccttgacaagcacttagctgctggccaacacttactgaacacttactaagcgccaggcatagtgctaagtgctctatacacctgacttctttcacaggatgcctctagctcaaaagaaccataggctgctggccaggcacggtggctcacacctgtaatttcagcacttagggaggatgaggctggcagatacctgagctcaggagttcaagaccagcctggtcaacatggtgaaaccctgtctctacccaaaaatacaaaaatgagccaggcatttttgtggtgtgcgcctgtagtcccagctcctctggaggctgaagtgggaggattgcttgagcctgggaggcaaaggttgcaataagccaagatcgggccactgcactccagtctgggcaaccgagtgagtccctgtctcaaaaaacaaaacaacaacaacaacaacaacaacaaaagaaccataggctgcgacctgagcaggttgttagaaaatggagaaaggcccagcaggctcaactaggagctccaagcctttgtcctctgtcttaggggaggaggctgtcccacatagctggaggcctcatctaagattcaggagacctgggctgtccaccacatgagccctggacagtctgttagtttcctaaagctggaaatgtcttgttcatcctgctgtcacacagtatataccatcatcatcgttggaacccaaaaaatctgtgttaagtaaataattcaggccaggtgtggtggttcatgcctgtaatcccaacacatgggaggccaaggctggaggatagcttgaggccaggagtttgagaccagtctggtcaacatagcaagaccctctttaaaaaaaaaaaataaaaacaagtaaataattcagtgaggccagacgcagtggctcacgcctgtaatcctagcactttgggaggctgaggtgggaagatcacctgaggtcgggggtttgagaccagcttgaccaacatggagaaaccctgtctctaccaaaaatacaaaattagctgggcgtggtggcaca

SEQ ID NO: 913902 - DNA, 4001 bp, Homo sapiens
tcactttagcctgagaggcagaggttgcagtgagctgagatcgtgccactgcactccagcctgggcgacagagccagactccgcctcaaaaaaaaaaaaaaaaaaaattaaatgcatgtgaagggcgtagcatctgacccttagttagctcttcacaaagattagcttttctcacataaaaccatttcagaatcctaatcctgaggccgggcacggtggctcgcgcctgtaatcccagcactttgagaggctgaggcaagtggatttcttgaggtcaggagttcaagaccagcctggccaacatggtgaaacctcatctctactaaaaatacaaaaattagccgggcgtggtggtacgcgcctgtaatcccagctactggggaggctgaggcaggataatcacttgaacttgggaggcggaggttacaatgagccgagatcgcaccattgcactccagcctgggcaacagagactccgtctcaaaaaaaaaaaaaaaaaaaaaagaatcctaattctgaaatgtccaattccatccagtccactgtgaaagcactctccgcagtctccttaacagtcaactctaaacagtttcattaagaaagcagttagatcacatggcagcctgtcccagcttaaggaagttttgaggctgatctgattctttgctttcgcagcctgattctgctaaaagtgcaagccatccttcctagtcatgctatcatccctgctgaagaccccccctctctcctctctcaaagtgtcttcccatgcaggaatgtccgttgatgtagattacaaacctttcacattcctggttctcttactcttacatgtgtttggagcatcctaaattgccataactatggtacagctttcacttttacaagattcctctgtaccagcactgagattgctactcttacacatcatcttactgaaactcacaaaaatcctataaagtggatgatgacatccctgtagaaagactcagaaaggttaaataaactgcccgggtcacgtatctaaaaagtggcagagcctggtcccaaacctaggtttgtttgattcaattagccaaagctccaagcccactactatgcctacttggtagggctgttgatgactctcaattctcagtgtaactcaaaacaaaactctgcttctactttcattcattttcttctttacaaacgaaaatcccagacttcattctaaagaaatttcacttgcttttgaatcccagtaaatgtgactgaggctaaggtcaaatcacggtttgcctcacccaacgaaaagccccccagaagatgccgaagaaccaacgtcctcagtggaacaagactctacctccccgctgcactctgccagccatgtggcttggggccacgaggctcccacgctgccgccgctgcacaggtcacaagaaaaaagcaacaagactcagcgatatctactcagacatggaggaaggtaagcgaccgaggccgcaggctttctctggtcactgccgaggggtcggcgtaaaggccttgcagacactggactggcggacccccagacttccccacctggaaacctaagcacgtcagggcctgaagccttgtggtcatctcagcccggtccccgccccaagcccggaactcacagctcctgtcgctttggcgaacttattggccacctctgagagttggttatcgcgcaggaagccgagcacgaggggatacaggtcgctgggaaccacgcggcgaatgccggcgtccgccatcctccaggcaatacgcgtcactaccgttgtcgacgcagcacgactcaggaacccaacaggggcagtgggcgggcctgtgttacgtcattgcgccgcgcgggcgcataacggaaagggtgggctccacagggcagtcccaccttcacctcagaggtagggtagacgggaaatctataaactctttccggtcccacgcgtatcgccatcttggttaagggcggagcccaccggccgccagcttgtggaggcggagctctgacgtcagggatcacgccctcggcgtggcgggaaaactcgggacttcccgcgcagtctttctgggggaggtaccttttctcagagcagcggtttcccgcgcccctgctgggactcggattccagagtaatgagtggacaagcgggctcgaacagttgttctacaagatctcccaaccgcccccatggcgtactggcacggccaatggattctcgcccttcatcttcactgcctccaatacccagggaggccctttctgataccatcccagcctccagactcctgcctctgctgcagaagatccttcgggttatccgtcgtgagggtgggaggtgttgatttcccaagctgcccctcccatctcccttatattccgccttaggtcagctccatgaagaggaaaggtgtcatgcaccaaacctgaatcacacacagcaacaatctattcaagctgaagagattgttgaaaataacccttcttcctccgggatcagagttcacactctgcctttgtcatgagtaactccagtatcaatgcctttgtcatgagtaactccagtatcaatgctcagacctaccaagttaattccaagttctgccacattccagatattagcagttagcaatcccttcaatcctacccactaccccttggctacctcccactaatgccgctcaggaaagataaggatcctcatgggaacacacccccctctcctatataaaattggccaggcatagtggctcacaactgttatctcaacactttggaaggcctaggtgggaggatcccttgagcccaggagttaagaggccagcctggacaacacagtgaaacccccctatctctacaaaaaatttttaaaattagccaggtgtagtggcatgcacctgtggtcccagctacttgggaggctggggcaggaggatcaactgagccagggaggtcaaagctgcaatgagctatgatcctgccactgcaatccagcctgggccacagagtgagatcctatctcaaaaatcaaaaacaaagctgggcacggtggttcatgcctgtaatctcagcactttgggaggctaaggtgggtggatcacctgaggtcaggagttcaagaacagccctggccaacatggtgaaaccctgtctctactaaaaatacaaaaaaaattagccaggcatggtggcgggtgcctgtaatcccagctactcaggaagctgaggcaggagaatcacttgaacccgggaggcagaggttgcagtaagccaaaatcgtgccactgcactccagcctgggagacagaacaagactccatctccaaaacaaaacaaaaaaattcaaaaacagaaacaaaaaactccacagttccctcttccccacgcttcctgttctacccacatgcatgcattatttaaaacatttgagcacctgctgtgccatgcagtgtgctcaagctattataaaatgatgaacataactgacatgatgaatgtatacacctgtcgcagtttagaaaacctttctttggaacaagtgtgagcttctctaggtccttgttatcaaaatcccttcctggaccagtatcatcatcccattgtcagaatctacattctaaaaagatcgctagatgattcaaattccctttaaagttgagaagcactgtcctaaatgactcattttagacaatacatctgaggaaccaaggttcaaatccagtgggatttttgcacctgaccagggagaggcatgtccctggaccatgttcagataggaaaagtgaatacatttggcattagcaccatataaagacgcacaacagcagttgggagttctctctagttgatgtttattagtctgcatagtgacttatgttccaaacactggggatcccctcagcccctcctatcttacataggaatgcaagttaacttgtttcaatacctgttataaaaaaacaaataccccttttaaaaaatctga

SEQ ID NO: 913903 - DNA, 4001 bp, Homo sapiens
atatttccatgtcaataaagaaaatcctaagcacagtttttaatgtctgcatagtatgccattgcagaagtgtctcattttttatttaatttacataatttatggctatctggatggtttccaattttgcactgtgatgaacatgctcaggcacacatctttgcaagtgtgcagctcagaatttgaaaaaattctgagctgagggagtgcgttgttgtctcctaagtgtacactgtgtttggtcatttcttctggaattttaatagaggtcaaaactaatcttagcagtgtagaggctttttagataaaaaatttatatttcccttttttgaaaatcaggacatttgcccatcttcagttttctggcacttccttcattctctgtagtttcctcaaaagcaatgattatatctgtaaatacctctgggtcgctgggatgtcatatgtctgggcttcaatgagtgagctcattgtaggtaacttgatgtcttcttcctatcgcttgactatcttgggtctctatttcctccttatcctctttattccacaatttgaagtaaaattgcctgtatcttgctctgcctgccctcgagcctaagccagagcagattccttcttgttattcttagactttgaaagctttttgctcttgtctttgccaatttcccccgacttctgttcactggagcttcagggctttgctaacgccattcttacagatctgccaatcttccagattcctcttgggttattgattccttcttgcctcttttgtgtgtgtgcttttcataccctggctcattggaaaactacaagtgcagcctcacaagattttctataaaacttgattttattttttaacagcagtgtttgcaattactaattggaattttggggttttattacctcttgccacagctgcctcatactggcgtgttgtacaacatatcttattttatcctcacagacactctctgaagccagctgaatgttaagttcccccattcgatagatgggtgaccagtggcacagaaaggtttaggcactatctcaaagacacccagcaagacagtggacgagcccttggttttccagtttcttagcctaaatatggttccccttgtccacaatggctgagagagggttctggtaaagtgggagcaagcagccttatgccttggtccgctatcccttaaaatcctgaaggtaaggtccatagttcactctcctttccttagggagagaaattctctctacatggaggatatcacctctagaatcccatctccccaacaaccccaccccttcaagcagacaaagtcggtgacaattcttctgaagctaatagccaagctgtcctcacctggtctcaaatgattctctgctcagacagcagggattgtgtgcgtgcacacacacaacagggactctctctttttgtgtgtgtgtgtgtgtgtgtcttgtacatgcacacacatatgtacaacacaaatacagaggcaccccaggtctttctctctctctctcactctctctctctctctcacacacacacacaagcacaacatgaatacagaggcacccccaagtgtttctctgcctgtctctgtctccctctctcagtgtctgtctctatgtctctgtctctgtctctctctctctctctctttcacacacacaggcacaacatgaatacagagcacccccaggtctttctctccatctgtctctttctgtctgtctgtttttctgtctcacatacacacgcacacacacacacaccatgaacacatgggcaccccaggtctctctccctcactcagtgtctctgtctctgtcacacacagagtgtcacaacgtctggctctggacagccatgggtgatcagctgcccggccctctcctctcccttcgccccatgccccggagtcggtaccctgccccacggctggcccccagccccaggaccactcaccctccatgatgcccccagttgcgggctccggcggtctccgatggcgggaggcagcgggccccttcgggccagcgggcagagggacggtctccgggcacttggttgcgggctgcgcccctgcctccgcgctccgcaggtccggtcggtccgggcagaggtgagcagggggcgtgcgctcccaggccccgggccctggccggtttccctcccctcgggctgactggctcccgcgcagcgctgctgcccgcagggctcagccgcccgccgcccctcgcctcccgaccaggggaaggagggggctcgtgaggcgcagtcgtcatggcacccgcgcacctgtgcccgccgagcgagggcgccccgggcccgcctcccgcatggcgctctctccacagagcccgagcgcccctccgaagtaggggacacacccctcctcccactgcagccctggcagcggcgtcccgtaattccccacctctctcccgtgcctcatatgccagcctctgtccccactcctcatccttgcccaccctagcctggggtccagcactctgggccttcctgagaaggggatgagaggtagctgtgaaaacaggagggcttcgggagggaggcaggggggagccccaccagctcccggctctcccaggagaatggggacaagttctgctaggtgaccacggctttgaaattaaccagttcaggcattcaccgggtggtacccttggaaaagtttcttataataatacctgtgcctgagtgtgtttctgcatttgtaaaatgattttgaggggagtaaatgtgataccaaagtttcagcccagcccatagtagatgctcaacaaatggttccttgagctgaattggagaatactcatctccagcccctgtcaggcacccagcaggcaccaccataaattttcgccacatgaataaagatcccaggttctatctgcactcctgtgtttttcttgcagcactgtttacaatagctaagatttggaagcaacctaagtgtccatcaacagatgaacggataaagaaaatatggtacatatatgtaaatggagtactattcagccataaaaaagaatgagatccagtcatttgcaacaacatggatggaactggaaatcattatattaaatgaaataagccaggcacaggaagcaaacgtcacatgttcttacttatttgtgagatctaaaaatcaaaacagttgaactcatggacatagtagaagcatgtggttaccagaagcagggaagggtagtgggaggatagggatggttaatgggtacaaaaaaatagctagaaagaatgaataagacctattgtttgacagcacaatagggtgactatagtccataataacttaattgtatatttttaaatagcttaaaaagtataattggattgtttgtaactcaaaggattagtgcctgaagggatggataccccattctccatgatgtgcttatttcacattacatgcctgtatcaaaacacctcatgtaccccataaatatatacacctactatgtacccaactatttttttaaaaaaagatcccatgttctaggcagatgaaagaaagtgaatggtctattccttcctcttttaggagtcaggagtttgctcactggacactggggaaacagttggcatcaagattcttcctagtctcacttctttccctagttcctcctctgtccagagcagtgggcagagtctcacagctagaaggtccttaggggtcactgagtctaaccctgacccagagcgggcatcctgaccctaatccccagcaagaagtatccccagcaatgggtacctctgccatcatgtccctctctcttcccctagggcagcccttcagaggtcaagtgggagggaagttgctccttcaacgctgctgttctactggagaaacacaagaatttcactgggcttttttctttctgtgacttgcctcagtctcttcatctgtaaaatgggcataataatggcacctatctcctatagttgt

SEQ ID NO: 913904 - DNA, 4001 bp, Homo sapiens
ctccaattctcacaggcaggtgggaagggaggccccgggcatggtgaaaatcagaaaaccacggctgtgtggagcacaggccctctcctagcaccaaagacccaagtccctcccacccaacccccacccaagctctcctcttcaaggaagaaatatttacaattgttgaaacttgtcagggaacagggtgcatggcggtgcatggcacatggagctgacctgaaaagaggaaacaaggaatcagcatttaggccctcacctgcttctcctgccccttcccagagcctgctaggcacttctccccgcaactcacctaggagggctagggcctgcccccctgctttttggcaggaaggatggggcacagctcaacttcttcctcatcactgtcctcttcctcttcctcgctctcctcctcagaaacatcattgctcatcgtaactggtggacacacaagcagtagaaggatggggtgttaagaccagaccgtttcacaccgcatgccatttcttcacgccgtggtgttaggcttacagggaccatgacctcccagtgcttatgggctaggtgggaagaacctcagaccctaaactgggtcacaaagagccaaaggagtcttcattattggagctggagaagttgggccatgttccatggaggaggtaggcttgagtagacggaaaggagagggcatgtcatgcacagggcacagcgtggagggcacacagacctgtacagggctgcactgggagatgagggtgggatggggcaggagtgcggagtgggggaagcctgatgggagagtccactggaagcaaaggagagggccctcccctcttctcaccaatctggtgccgcccagtgatccgcacagggccagagcccgacttcaggcggaaggttacaggtggttggagctggaagtcatccagactgagctgggaggaagacaaggatgaaggcctggcccactcctagcccaccccacactgtaatgagtgctaacgtcctcaatcccctcaccaccaccaccaccaccaccaaggcagagctggggaactcaccatgggttggcaggacagcttgaggttggccacagggactgcgatctcctgatggtcatggttccgggccacaacttctaccacattacactcgtctttggctccctcggtgaggcagagctgggaacggtacacagggcctcagggtctcctcaagtgagggttgacaccacaactaaaggcatctaccctagcacctgcccagcctcagaggtcccggttcacctggccaggggagccgcccatgccggggggttaggctgaggatgtgtctccaagtaaaggggatccggaggttgggtagagacctatattgcctgcctgggcttattcattaaaaccccactcccctgcccctcaccatggttagtgccagcacgtgctccgcatcatcctcttcctctaccttaaaggtgaaggagcgggtgtggccggagagctcacagcctggtagaaataacagtgagtatgcctgagcgtgtgtacggggctgggcagcgggggatgtcaccaacccgccgtcacgtgtaaccttgggcggacgggtcatttacacgtccacctccgtctcttctctcagaacacctgggacgctctgccgtgggccccgcccaacacatctggggcagggatctcgccaccccctttggctgtgcgtgcgaggccccctctcctgcgggaacagcgaagcagccctccgcccacacccacgccttgaaaccctccgcattcccgcctcacatccctacctcttaccgccccagtaccaccctcagcctctcccttcactaataccgaagaaaaaactgtccatagtgaccggggccgggacccgtaggcccccgacacccccggcccgcgttcggctctcctgactcaaaaacgctaaggcagctgcagtaccggcggccatgctgtaagagccttcttcaaactccgcccccgacacgcacaaagccggggaccctcggccagttccggccccgcccattaaaggagacgcacagtcctggaaaagaaaaggcgccgagaccccgcagccctacccggagcccgcagcttctgctcatattttatcaagaccgaagagaaaggaagtaacatcacagaagaatggatttggggtttatgttaacatccttgctcatttccacgaccatgagggtgtccacttccccaagctcctcgctctgtgtcggaagagtgtctcccactcttccaacccagggtaagctttcgttaaaggagttatagatataaaaatgtaaacccttcttactcctcccagcaaaggtggggttcagggcagtgcttttctgctacaagcaaaggaaatgcactcagattgtctttgcctcaagagagccgaggagccttaggaatttccatcccaacacgtctgtcctgtctgtcctctcggctaagcctctcttaattcttcctgctctaaagaccccgcaacttgctatgccttcactgagacttagctgctggcacttgctagcagaggactagttagctcatgtgtgttggctgttcctggcccacccacgctttttgagcttttaattccaaatcatccaggagtatctttgcgccgtggattattttgtcagtttatgctactcgcgccatctttcgccttttaagaatcaggcaaactgtgtgctttctatcctaatagatggcaaaactcaaactagaggccctatttcacatccaggttataactgtggcaagagggtggggtggcttggctaaaaactagtctacttttcttagctcttgtcttaatgaaaatctggaagtcttactggtgatggaggtaggggagggctgccttcaagatccaatctctaacttggaacagctgtggagaggagagaatacctgcttgtaggtgaggcatgaaagaggagaaaagggagggggcagacaggaaatagattcacacaatacaacacgacaagcattcacttcaagttttattttgcctcttgcatggtcttttacagttcgttttctacaggaactgagctctgatccaaacaatcaataaaaatgtaattccaaccttaatattcataaccaggaaatagcatagcacttcatgatcctagagtgatgaaagcaagaccagggcatctgtttcacagtcacctgtgaccagaccagccaacatgattactaaaagccaagataaaaccaaaagcaaacttgctaaaaaatcctgaattccatgaggttaactctgaaatcctccaaacaaaatgctagaattgtccactagtgttaagacgagaaaactgaggaaaactcagctgtcttactatctggtaagagtcttcccttcatctcaagccctcaaaaatgcaaacttggttccagctttacaacataccatatccttctatcggttaaaggtttctaacctaaaaaccttctctcctttcttctcacctatttagtgcatactcaaaggctttggttggaagtcactaggtaccactaggtacaatgctttagggctctctcaaagcccacaatggtggagttctgtgaaagaaaacttaagtttctttctctttacccctctcccctcactcagctcaaagttaaacagctgatgcaaaactacagagaagcaagataacaaaatactgttatcaatctatggagaaatcagccagccatgatgaaaaaatgagtcctgccgactatctgccagcttcatgctcagaacccttaaaaacacagaatctaaattaaaatacatgaagctttcacaatccggttaaaggaaaaaggtaactgtaaataactggttaaagtgtgctcattcattcagaaattagatacaaacatgcaagaattaaagactctgatttaataaaatcagtagtaacaggtcttgagattaaacaactgacctgaggg

SEQ ID NO: 913905 - DNA, 4001 bp, Homo sapiens
ttcttcacccacgcgtgggtggtttactgaagattcagtgcaacccagacaaatcattcccactggcctctggggaaaaaaaatgggctttttcccccctttttcatctcagagagtttggtcagagagtttcagaaatattggtcatgagaaaaccaatcaaacactcttagtcggacatccactatgtatttttccgtgtgctaacagaggaaatctaaacatgatagagagaacgccttctatttaaaatccccagcagggaagggcctctgagtcattgcaggaagggaagcaagccagttctttccagaaatactcatgatgccacctttatactgcaaaaggaatgtatcagttctggttatgagattcctgaaacatccctaaaaagacactgatgcactttgctgatcgtcgaaggcagcccttgccagggcagactcattaacataataagattgtatatttgcctggttaatggactcagtgaagttcgcaacaaatattataaaagcctatgtgtcgtctgcctgcataatcattcaccctaagcaatcaaattggcatgaatagcatccacactcttactacggaactaggtaataacaagaacaaaactgtcacgtgcaaaaatagaaataaggaaaatgcagtgaaaggagaaacatttcatttatggacaaggaagtctcataagtattttagaacaaagtacattcttaatttcttttaaaaaagctacagagaagagcctgttattcaacagaaatgtcatgagtaaacctttggggaaagaacagaaagtaattaggaagacacttgagaaaatataccagtatatggattgtgactcatcagcttgatcaatgtggtgtcttatagaattgatgactaaattagtgttgaatgctcataggaggaaaccaaaaaaaagaagctatattaaataaacaagaaatagaaaaatgacagatgcaaagattagtgaaaaggccaataatataaataactagatcattatgttcagacatatatttatcacttaggatttatgcgacatccctttatcctaaaagtagtttcataaatcacattgatttcagtcattataatgtgacaggttacgttttagtgaaaaaaagttcaagttcaaaatgccgtcaatgacaaaagatattttaaaattataaacaaaatattgacataaaggcaactgaaatattatgtagaaataatattaaatattccaaagaaagatatttattttctgaatgtcttgaacagttcaatgaacgtaggagttcaatcaatattctctaataaatatatgaattaatattttatgtgatattttatttagagctaacgttttatctatattctgcatctgaaaaaattaaactgtttttgaaaaatgaccactttatttttaatatagtttccatggttaagtgttcactttgattatgaatgaatgcatgtggaataaataaattgccattggcaaaaaaattactttagattgagatgaatatttccctttgcaggagccaaccctaaataattcaaaacaaatttgaatatagtccagtgttacttgtcacactaatattttcttttactaatgtcatcaatctgctgactttttcccattgagaactctaataataaaggaaattacttttctgtcacatattccttgaaagtatttggaatttacataatttaccattctagtcatctatttaaatatccacaacggaggcaaatccttaccttagaagatggaactggataacaccaaaacacatgcattgtggacagcgacagaactaggatgagattgagttttactgagctgcaaagtagaaaaaaagtacaatcaagatttagtctcaagtaggcaagaataagtaaaacagcatatgaaaatgcaacatttttctttgcagaaaaacgtagccttttacctaatcattttggacttcccaaaatctgtaaagataggtggttttattgccaaatttctcacacttactctcagaccctcattgggtggcccttttataccagaaaagttcgggagtaaaaatgtcatctcatccctcctatatgactaattgttctgtctgtggccttttgttcttgttaagaagaaaaggacataacatatgggcattgtcattgagctgccaatgatcgacttcatttaaagtttgccattaagaatgtccttcaaaaccattgtcttcgagactgaatcattgtggcatgggtggccagaggtctcaaaaggaaacaaaaggtttttttagcttagaatttaaacctttaagaaggatgacattctttccttgaatgtcccagacattatgtttcagaaactaacacaaaagaaatacttacaggaataaagaacatctacccagctgggcacggtggctcacacctgtaatcctagcactttgggaggccgaggcaggtggatcacctgaggtcaggagtttgagaccagcctggccaacatggtgaaaccctatctccactaaacatacaaaaattagccaggcgtggtagtgcacacctgtaatccagctacttgggaggctgaggcaggaggcaggagaatcgctggaacccgggaggcagaggtggcagtgagccgagattgccccactgcactccagcctgggtgacagagccagactctgactcaaaacaaaacaaaacaaaacaaaaacaaacaaaaaaacacatttacccaaacaactcatgcagattatttacattttctaccttagatttctttcctttaggacttcagcagttaaagcaggaaaataaatgtcacaccttttccgctagtcatcgaaataaaggaaggacactgtgtatcccctgtccatgccatgtactcccaaaagtcccacgggctcccaaagtcccaggcccacagttctgggagagcctgcttttcatggcttcctttttctccccagggtatggaatttcttcaggcagcctttgctgtccttgcacttcaatgggcatctgcattaataaatggattcaggagctctaagtatgaacagatgttgctgaggcttacaatggagaaaaacaccaagggaggtgctttctgcttggataactagtgtttctgagatgatgccaacagtttttgaatacaaagcaaccaaggataatccgtgcctcctcgagatcagcaccttttggaggacaaagctgccctgtgtctgggacagttgctgccaatttgttggcactgcatttctttctttggggaactgccatttgcatgatttttatgtagctgtcaatcatacagtcacagtttgccatcacaaggaaaagcagatgacctggactctcaagagaaccaagctcacaagattagagccaagttgaggggctgaggaagtgatccaaactactttgatcagtgttcttatgggacatagtgtggatattaggagacaaagggcctaagagcacaaagggactgaacacacatatttacttttggttgttttagctaaaacacacacacacacacacacacacacacacgcaggaacccaaaaagaatgcagaaggattttattaagtgataaacaattgatcaagtggatctgagaaaggtgcttactgaaatacccccaaaagactcaagttatttttgcatgtagtgaagatggtaccaaaatggagggttaagtggaaatttgtttaagaatcaactcaatcaatagcacatcctctcccaacttcccattgccagacactgtctactctctagaattggcaggagatgacaggtttattatttttattttttatttttgagacaggatctccctctgttgcccaggctgaagtgcagtggcatgatgatggcccactgcagccttaacctcctaggttcaagtgattttcccgcctcagcctccaagtagctaggaccatgcgccatcata

SEQ ID NO: 913906 - DNA, 4001 bp, Homo sapiens
gaatctgtatttaacaagtagactatgtgattctgatgcacatggcccttggaccccatcttgtaaaacactatagcagaaaaccctatttgagatattctttaagtctcatatcatggccatatgtattttttacatgatcaattgctatgttaaggcagtttttgcagagcacaaggccaaaatcaaccagagctcagtaaaatctatttgtcggctgtcatgaatgtcacttgctgtgcatctgatctacttataaagatgagtttctaaggtcaggacttcaacacctgcctggccaacatggtgaaaccccgtctccgctgaaaatacaaaaattagccaagtgtggtggtgcatgcctgtagtcccagctacatgggagggtgaagcaggagaatcacttgaacctgggaggcggaggttgcagtcagcagagagtgcaccactgcactccagcctgggcaacagagcgagactctgtctcaaaaaaaaaaaaaagagtctcatttggtcatttaaaagatcaagctgtgaattcacctgatagtttacagtctggttatttaggaaccagatctcgaaggcaggaagatttctccagcactatggtcttcgggcaaaaagggccatttggggctgaacatggcaaaataaactattccagagccaaacacagggcccaatataagataaagaacagtcgcagctgcatgaacctgtggcagaggcactgcactcagaagcagcaaatgggccagaacccaaggctctgggtgaccatcagcaaggcttggccagtggtgtggagaaacaccattcatcccaaaccaaccacctaaagcaggatcagagtggaaggactgggctgggagggctccagaaaatgctcactgcttcattcacccactcaataagtgtgtgtcaagccctgggctagaaacaagggctgcaaagatgacttatacagtcatggccctcccagagcagaggggctgaccagcacgaatgcagatggaactcattgccattgccaacaccaatatgaaagagaggcctgtgagttgagagatcagagaaggagcagggagcagggaggtgagagaagaggtggcaatggtacagggctcaaaggctgaagaggagtcaaccagccaaagggacagggagaggagggaactcgaagtgcaaggaacagcatgtgcaaaggcacagaggcaggaaggagcagagcctgctgggaaaagtaagcagaataagaggttccagggtggcagatgatgaagctggagtggtgggccagaccagcaaggtcaggtccattccagtaagatcacttggatatagaaaatggattggcagagagggccaagacaggaggaggaggagcactgaaaaggtggtgttgggcatctgcctggggctgctgggcttggggtacactgaccagtgaggaccaggggacctcaagtccctcaggcacacccaagggggtggcgagtgtatgagggggagggtagattattacgcaaggtcaataaaatggtgtctctgcattttgtccccaggcagctctccagatacaaaaactagaaccagctgcaagccccaacagggaccccctgcagcctgccttcccagtcaatcagaggaaaattaatgaatcatacacacaatgctaatctcccagtggggttagaatagggaaggccctttgctttgtctcctgaaatctcagcaaaagctactatatcctaatgcccatagcgcccagacacctcagatgcaccccttacctccttggcttgcggcttacagggtgcggatggggccgcccatgtctcaggtgaggagactgaggtccacagtgggggtaggatgctccccagatccagtgtgacgctctgcgccccgggccaagggcaggcagcgcgcccggcttcccggagggttcgtaccggggcccactcggccccgcccccggccgcactcctgtgcccagggggcaccaggcgcggggcagagccgcgcctgcttcacctgctcctgctgccccgatgctgcctgcgtgcggagtggagcggctgctacgctcccgcctgcgcccgcccagcctgccccttgcgcccgcccacgagagggctccagccgcccgcctgccccgggaccccagcactcgccctggggagccgcatcttgagcccccaaggcctgcccggaactgcagccctgcctgcgtgtgtctctcacgcccacctcaaccctggatacaggcaggctggagctgcgctgtctttctctctttctttctttctttctttctttctttctttctttctttctttctttctttctttctttctttctttctttctttctttcctttctttctttctttctttctctctctctctctctctccctccctccccctccctctctccctccctttctctttctccaggagtgtttctctctgtctaggggtgtgtgcgtctgcctgtctctctctctctctgcctcagtttcctcatccatgaaatgggtataaaaagacctgcctttcataagttcgtccagaaacattacttgcagacctcctatgagcctggctctcctgctgggcaccagagctggacaagacaggctccctgtccttggttccttctggagctctcagccctgggggagaagacagacagggtacaaggaaagagggaaataaattattacagggggtgagatgctgtgagcaaatgggttcgataggccagatggatggcacagccacggcaaaagccctgaggctgggagcattcagcccctggagaccaggggagggcagtgtggctgagaatgtcagccagggtgagggaaggagatgggcatccagggtgtgagtgaaaactcagggtgggccctggaagtggagtgtcttatctcaggcagtcccaaggttgtggcgatgagaattcaatgagaatggtcactttctcctttggagctgagatgcacatgacttggctataatggaacagctttgcttacaagggctgctcctgttttgaatacactagcttataattccctgccccccatccccacatggcaaagtcacatatgcgcttagagaacctcctgagagtaacagatctgcttcaagagcacctcctaaacactggacatacacacctgtccagtgaacctcctgtggctccccatggaaatgtccccatgaagtcatggcagtggtccctctagaatggcagctgccgtttgtagtgcagagactctgcagacactaccttagttaatcatcacaacagctctgagaggtgggcatttttattcccatcgtgctgatgaagcaaagtgacactcagtggttgagcaacttgcccaaagtcactcagctaagaaacagccagatccaggatgcgaacccacctgccaagcccccaggcctctgctcaccatcgctgtagactggcacctgtcatctcttctttctggaccatgctccttcctgtcttgactacctggaaagcggctgctcctccgttgcaccccagctccgatgtccctgctgccatgacaaattcctaccaccctcccatgctctgctgcagaagcagatgtagcagcctagttggttgtctgcctgagcagctttgtctccccactcccctatgtctaggtcacagctcttgtctccgcctccagatcccagcacaagtccacacacagcatctgacaaagaaagaaaggaagaaaggaagacggagggagggaggacatttaagaagacctgattgtaacggtagcttccagacatgtaaaatcagagaacattgcttgaccagaaactgctcaactccagctgggagctctatggacacccgtcctctgtgcaggcaagaacgcagccactgtcacctccttcttgcagggcagctgtgtggggtctggatttgctggtaagcccttggaggcaagcttcc

SEQ ID NO: 913907 - DNA, 4001 bp, Homo sapiens
atctgtatttaacaagtagactatgtgattctgatgcacatggcccttggaccccatcttgtaaaacactgtagcagaaaaccctattcgagatattctttaagtctcatatcatggccatatgtattttttacatgatcaattgctatgttaaggcagtttttgcagagcacaaggccaaaatcaaccagagctcagtaaaatctatttgtcggctgtcatgaatgtcacttgctgtgcatctgatctacttataaagatgagtttctaaggtcaggacttcaacacctgcctggccaacatggtgaaaccccgtctctgctgaaaatacaaaaattagccaagtgtggtggtgcatgcctgtagtcccagctacatgggagggtgaagcaggagaatcacttgaacctgggaggcggaggttgcagtcagcagagagtgcaccactgcactccagcctgggcaacagagcgagactctgtctcaaaaaaaaaaaaaaaaagagtctcatttggtcatttaaaagatcaagctgtgaattcacctgatagtttacagtctggttatttaggaaccagatctcgaaggcaggaagatttctccagcactatggtcttcgggcaaaaagggccatttggggctgaacatggcaaaataaactattccagagccaaacacagggcccaatataagataaagaacagtcgcagctgcatgaacctgtggcagaggcactgcactcagaagcagcaaatgggccagaacccaaggctctgggtgaccatcagcaaggcttggccagtggtgtggagaaacaccattcatcccaaaccaaccacctaaagcaggatcagagtggaaggactgggctgggagggctccagaaaatgctcactgcttcattcacccactcaataagtgtgtgtcaagccctgggctagaaacaagggctgcaaagatgacttatacagtcatggccctcccagagcagaggggctgaccagcacgaatgcagatggaactcattgccattgccaacaccaatatgaaagagaggcctgtgagttgagagatcagagaaggagcagggagcagggaggtgagagaagaggtggcaatggtacagggctcaaaggctgaagaggagtcaaccagccaaagggacagggagaggagggaactcgaagtgcaaggaacagcatgtgcaaaggcacagaggcaggaaggagcagagcctgctgggaaaagtaagcagaataagaggttccagggtggcagatgatgaagctggagtggtgggccagaccagcaaggtcaggtccattccagtaagatcacttggatatagaaaatggattggcagagagggccaagacaggaggaggaggagcactgaaaaggtggtgttgggcatctgcctggggctgctgggcttggggtacactgaccagtgaggaccaggggacctcaagtccctcaggcacacccaagggggtggcgagtgtatgagggggagggtagattattacgcaaggtcaataaaatggtgtctctgcattttgtccccaggcagctctccagatacaaaaactagaaccagctgcaagccccaacagggaccccctgcagcctgccttcccagtcaatcagaggaaaattaatgaatcatacacacaatgctaatctcccagtggggttagaatagggaaggccctttgctttgtctcctgaaatctcagcaaaagctactatatcctaatgcccatagcgcccagacacctcagatgcaccccttacctccttggcttgcggcttacagggtgcggatggggccgcccatgtctcaggtgaggagactgaggtccacagtgggggtaggatgctccccagatccagtgtgacgctctgcgccccgggccaagggcaggcagcgcgcccggcttcccggagggttcgtaccggggcccactcggccccgcccccggccgcactcctgtgcccagggggcaccaggcgcggggcagagccgcgcctgcttcacctgctcctgctgccccgatgctgcctgcgtgcagagtggagcggctgctacgctcccgcctgcgcccgcccagcctgccccttgcgcccgcccacgagagggctccagccgcccgcctgccccgggaccccagcactcgccctggggagccgcatcttgagcccccaaggcctgcccggaactgcagccctgcctgcgtgtgtctctcacgcccacctcaaccctggatacaggcaggctggagctgcgctgtctttctctctctctttctttctttctttctttctttctttctttctttctttctttctttctctctctctctctctctctctctctctccctccctccccctccctctctccctccctttctctttctccaggagtgtttctctctgtctaggggtgtgtgcgtctgcctgtctctctctctctctgcctcagtttcctcatccatgaaatgggtataaaaagacctgcctttcataagttcgtccagaaacattacttgcagacctcctatgagcctggctctcctgctgggcaccagagctggacaagacaggctccctgtccttggttccttctggagctctcagccctgggggagaagacagacagggtacaaggaaagagggaaataaattattacagggggtgagatgctgtgagcaaatgggttcgataggccagatggatggcacagccacggcaaaagccctgaggctgggagcattcagcccctggagaccaggggagggcagtgtggctgagaatgtcagccagggtgagggaaggagatgggcatccagggtgtgagtgaaaactcagggtgggccctggaagtggagtgtcttatctcaggcagtcccaaggttgtggcgatgagaattcaatgagaatggtcactttctcctttggagctgagatgcacatgacttggctataatggaacagctttgcttacaagggctgctcctgttttgaatacactagcttataattccctgccccccatccccacatggcaaagtcacatatgcgcttagagaacctcctgagagtaacagatctgcttcaagagcacctcctaaacactggacatacacacctgtccagtgaacctcctgtggctccccatggaaatgtccccatgaagtcatggcagtggtccctctagaatggcagctgccgtttgtagtgcagagactctgcagacactaccttagttaatcatcacaacagctctgagaggtgggcatttttattcccatcgtgctgatgaagcaaagtgacactcagtggttgagcaacttgcccaaagtcactcagctaagaaacagccagatccaggatgcgaacccacctgccaagcccccaggcctctgctcaccatcgctgtagactggcacctgtcatctcttctttctggaccatgctccttcctgtcttgactacctggaaagcggctgctcctccgttgcaccccagctccgatgtccctgctgccatgacaaattcctaccaccctcccatgctctgctgcagaggcagatgtagcagcctagttggttgtctgcctgagcagctttgtctccccactcccctatgtctaggtcacagctcttgtctccgcctccagatcccagcacaagtccacacacagcatctgacaaagaaagaaaggaagaaaggaagacggagggagggaggacatttaagaagacctgattgtaacggtagcttccagacatgtaaaatcagagaacattgcttgaccagaaactgctcaactccagctgggagctctatggacacccgtcctctgtgcaggcaagaacgcagccactgtcacctccttcttgcagggcagctgtgtggggtctggatttgctggtaagcccttggaggcaagcttccacatagacacatttgagaactactgcgcaaggcacgca

SEQ ID NO: 913908 - DNA, 4001 bp, Homo sapiens
tattcaatctagattatcctgtatattggctcctaatattgtgggagaacaaacagtcatatttgttactcaaatgcactttacatgtgtatgtggaggaaatgggcaggttcacatgcagacagagacacttaaaaacttaacatgtgcctagcattgttaatcggtatataatatttgcacatatttatggagtacatataatattttgttacatattagaatgtgtaatgatcaagtcagggcatttagggtgtttatcggctcgagtatttatcatttctattctagctattttgaaatatatgatacattgttgttaattgtggtcatcctactctgtctgctataggacattacaacatgttccttcttttatttatttaactttttaagaaataaagacagggtctcactatgttgcccaggctagtctctaactcccaagctcaaaccatctgcccgctttggcctcccaaagtgttggaattgtaggtgtgagccactgtgcctggctagaatatattccttttatctatttgcatgtttctacccagtaaccaatcattctccataccctccatcccactgaaaattaaataacttaccccactgatggcctctggaaatgtcctcacatttagatttaatggagtgtgatagacactggtgaaagtgttgttcttagggttatggctacaacaaataggtataaatcaaaattagaaatgtactttatccaaatgattgagggactattcttaaaattatttttaaataataacagttatttttaaaaaatcaataaatgtaaaacttaaaaattaagttcgtgattttccaggcaatgcatcttacagaaaaaaaagcaaatcaaataaaatcgacatatataactgaaagcctaaatttaactggaaatgatcacttgaaaactttctgaagaaagtaaaaaaggattctgaaattatttaaaagaaaatacttcaaagctctatatgcatatttatggccattacattgttctgcacagtatttaataatttgacatgaggttatagtggatatatttgatcttttacttggaagaaatttgaagttttgtgtccattgcataaaatcccaccttaggtctctttaatgacaggatacaagggaacactttgggagaagatatttcttggatttaaccctgggttatatgatttgaacgtttagttggctccttgttgaaaaacaaataaaactcaagaggtagtggtgggggcatcaaacacttacgcgtgacagtacggctttttctggtgactcacaaagttattaacagacagcatcatcttgcaaacttcacagtgaaaacaggctttatgccatatctagaaatcatatagagaagatttagcaattacccttttccccccagactcaaggttcttatatattttagggtaaaaaaatgaacttcgaggataaaatgctgattttaaaaaaattaaaatccacacacacagctataacaacactcacggttaaataaatggataactttttttttttgagacaacacagaagaaatagaaatgtgtagaactaaataaaggtgagaaaatataactttttcttgtggttcaaaacaatttaactgaaaattaaatttccatatttacctatgtccatatgtgagaaggtcaatttcctgtgtttgttattattcacaaaagccaagaaatgtctactgacctgatctatacagctgatcttctcggcaggataaaccccatacccacacctagaacagggctgcacattcatctcgaagccggaagagagaggacaaagataggcaacaggcaagaaatgcaaggagaacccccagtctagttcaagtcttcaaaatccgacgaccataaaattcctgtgggcacctcgatctttcagaatccaacttccactttcctttgctgaccttctagtttgaagtcagcagttggatggtttttaaagctgccacttactcaaggggctattttggccactcactcagcacgcatgtgtctgggaaataaggtggaagtatttctagctgacatgcttctctaaatagaaaaatgaactcacaacagcatcatgtttatgtggataaccaaaccctggtgtatgatcaggcagcatggagtggtttagcactagctgtgatcatgacccaagaaaagaacctaaaggaagatgccacaccgtcatccaacaatcaaattagaaaagcttgctctatgcgtcctatgactaaagcagaaaggccagctcccaaaaatatagaaaataaaataggattgattcactcctttaaatggataaatatcacacttgaattttaactttacctacccaaagcgtttacaacagttaaactaaaaacttaataaggtgttagtttgtgtttagcttctactggaacgcaaaactaaaaactaatgagaactcttggtgttttggcctctgtattttattctagaatgttccaagaaggcctttgtgcttgttcccttgcctcacaggccttaaaagaggtgatatgaagacagaatctctcttcctggctttgggaagcctctcattgccttcagtctctgctgaaatgtcaccttatcaccttatagaaatacctgatacaaaatggcacctcacctgtccccactcctatctcattatcttccattactcttagcctgcttgatggtcttcatagtggtaatcacagctggacatattacatgttaatgtttctatttttaaaaattgtgtctctcccatcaaaatatgagttctgtctaaacaggatctttggtcctttttgccacttctatatcccccatgcctagaacaaggtctgccaataaaaggtgcttaataaagatttattggattaatgaaataaatttaatactcacaccaaaatgcctatagaggccaggtatgaagtctagataatggtaggaacttttccaaatagatgagcactcatcccatctgaagcaggcaactgctcctcagtcccagccaactgtcatcatgaaacaatcaacattccaggttgccaaatatcctgatttttccggaatattttccaaatattctgagcacaccagaagtctgcatttacaaatgaaattcccctttttgtatataaaacaatataacagagtcgtgggcagtatttggccagcaggttaccaatttgtgaccttggccctaaatgttctgaggttaggttggtgtccccaggtagggtggagtaagatgagtagtattttggggttgtgctgagatagccagggggtaggaagaagctctaaagccaatgaagaagagtagcattcaagtccacatgagtataaggggaaggcggagtctcaggttttcccacatggggctagggctctctcagcatggggaggggactcaaagcagggactccaggctcagcaaagactcccacactgaaacgtgattgggcaggagggctgccaccagcctgcaaatgagaacagcaatgggcacagcacaaagacctgcagggttccccggttgttttgctctgcaccaggcttctcaagccttacttagtgggtggggtggaagctccaataatcactgaaatgaactgtaccccagtccggagggctgaggaatcaggaggatttcacttaaaaaagaagcttgcaacgttccttctctgcctaagcttgtgattgcaatctgtagccgttaaaacgggttggtcacatttgtgaacacaagaattacaaaatgcaagatgctaaactggatttgtaccatcacttctgatttattagacatcagaaattgctaggagaaacaaccccatagaactagaaatgggatagtttaaggaactagaagtaaacactcatttctggggcaagacaaacacagacttcactgtgtagtcgagtcttggttggttcacaccacccttctca

SEQ ID NO: 913909 - DNA, 4001 bp, Homo sapiens
cattgccaactatatgtcgccttaaaaacaagaaaagtgcaagacagttccctggttatttgagtcagagtctcgctctgtcgcccaggttggagtgcagtggcacaatctcggcccactgcaacctccacctcctgggctcaagcgatcctgccacctcagcctcccgagtagctgggaccacaggcgggcgccaccacgccaggctatttttgtattttttgtagagaccgggtttcgccatgttgcccaggctggtctcgaacttctaagctcaagtgattcgcccgcctcggcctcccaaagtgctgggattacaggcgtgagccccggcgcctggccagttccctggttaaaaaaaactcgcaaatgtagtccaattcgtcttaagtgtaaatacctaccacctggggcaagacccaacttaaaagggaggggcgcctcacaacagttaacctggcaccagtgatttggtccgagaatcttaggcttttaaagctcaagtccaaacctttattctacaaatagattttaaattaagggcttatggtctggttataatcgctaactcttacactgtactatgtacttagtacagttctaagtgctttacacctatttactcctttaatcctcccaaaaaacctgaagccgagtgaagccaagtagtttgcccaaggtaacacagatatcaagtgacgaggttagaattcaaatccaagcagcatagcttcaaaacctagagtcttaaaccacctgactctactgctcttctaggactcagagttctaatgtgagaaaagaatcctctatagagctttctttcaattccaccatcgcaaatgaattgcaaacctgtgactcaaaagttcttcctgtgtgcaaccttaagtaatctgacttttacatccaaaatgggtaacctctctggaaaactaaaagatgcaatggccagtctgaaaagaactcatgcttcccgttgttagtggggttctgttgtgttgttttttaattgcaacacctgaaacgccttaaaacacaagtaaacaggctatcagccattttcctgagaacagcaaacacctattacactttcatgatgcctaaattgatgaatctgagctaaatacaggaacggctgtctttttcccagctgtctctaatatatttggaagacggtagactcagtttatgcatgtgaatgtatgtgagaaatgagggggaagtggagggtgaggagggggaagtggagggtgaggagggggaagtgaagggtgaggagggggaagtggagggtgaggaggctattcactcctccacctctccaaagcggggcgactcagactcagaccctgctgctagaacttaaaaccagtatcacaccatttctgccttggccggcttcagtgcctctccaggctgtagggaggtggctacgtggcgctaagaggacttcccccagccagagaggaggtggcagccccaggtggtggcatcccctcgcccggggccccgcgacagggggcgccaggacttcccggggatcccccaggagggcaaagtctgaagtggctagcctggagccgcagttgggccagggcctgcctagcagcccctcacagcctctgcgaccactcctgccaaaccaacctcccagcctaaagggttagccgacgcgccggggacggggccgggctcctgaggcaaaggcacccaagacgaacgctatattctgtgggacactcaccaggttgaggggtccttccattacttccatagaccccggggtaagcggcggccttaggaaggggagtagtggcgccggggaacatggaggggactgcaagggagctcgacgcagccgcggagactgcggcccctctctgcgccccaagagccagcgataggcgctgaaggagcaacaacctcaccacttcctcctccggcgccgcgccgcgggcccgccccctgcgccaccgccgaggccacgcacggcgccatgacgtcacacgcgcaaaaggctggttcaaggtgggaatgaggacaggcagtgggtggggcccagggaaggcggggcaccagctgatgtacgcttgcgagcggtcaatctttcctctcgcgagaagcgttagtttaggttcttaaagtctacactgaagtcacgtgaggaggtacagccttgctgttgaagacttgaaatggctgtcttctgcaattagcttctcacgtttccttttagactgacttttccttaaatctgctaatcgttacaccgttacttgtggtcctgtccacacctttatcattgtacatgattcattttttcaaaaggccgatttgagcaattctagaccatgcactggactaacccccctagaggtcagcacactcgaatgatttagggctctgccctcaagttgctcacaaactgatagggaaacaattttggtctagccaaatataatactgcattcatttaacaattatgtgccaaacaaaagctaggttcgttctgtcatggaattcactgacaaatagttgtgatttatgctggaaagggaacacatagggagctgtgatagagtaaccaaggtggagttgggtggtaaaggaaagcctttcatggggggcgtgattttttttgagaaagtgtcttgctgacgcaatctccactcactgcaacctccctctgcccgccccctgccccaggcgatcctcacacctcagtctcttaagtagctaggaactacaagtgctcaggccaggttaatttttgtattttttgtagagatggggtttcgccatgttgcctatgctgatcttgaactgctgagctcaagtgagctcaatgatccgccctcctggacctcacaaactgatgggattataggcatgagctaccgcacctggctaagggcgtaatctttaagattaaaccttaaaatgccagttaaacaaagacccttctcgacaaaggaaatgtcttatgcctcaactctaaaggcggggaggtcgggtggcgggagctgcagcatttcagagagatgcaaaagaagataccagagagataggaaacttccaaaacataggtgtccttgcagtgcacaatgaaacatttgaattttactcaaagtgcattgggaaataagtaaaggatattaagctagagaataatctgctttaatttacagttttgaaaagattaatttccctgtaatgtgaagaatagattgtggaaggcctaaggaaaaagaaccaagacaagctagttgattgactaattatgggcgctcagactggaatggaagtagggaagattgggtcatgcatccactcattacatagttatcatgtttctaccatgtgccggaaaccttggaagagaagtagatatattcaagatatatttttgggcatcaggttgagaggagttagtgatggaatggcagtaaagcatacagaaaatggaagaatcaaatctcgtatttaaacaaccaagtggcctagcacactggctcacccctgtaatcccagctctttgggaggtcaaggagagcagatcacttgaggccaggagtttgagactggtctggccaacgtggtgaaacttcatctctactaaaagcactaaaacgtagccaagtgtggtggcgcgtgcctgtaatcccagctactggggagactgaggcaggagaattgcttgaacctggaaggcagaggttgcagtgagctgagaccaatcacaccactgcattccagcctgggtgacacagagagactctgtctctaaaaataaaaaaataaaaaagtaaacaaccaagtggacaagatagtgagagacaggactagctggatttcctaggccaactaagaattcctaaacctagctggggaaggtgaccacacccacatttaaacacagggcttgtaactcagttcacacccgactaatcaggtagtaaagagggctcactaaaatacaaattaggctagaagcagaa

SEQ ID NO: 913910 - DNA, 4001 bp, Homo sapiens
ggttgcacaaactgttcccatatcctgatcagatcagcttaaaagacacctgagatttcctttgaataagaacaaggtgggggttggggtgggaggtcaattagtcacctacaacatttataaaaatgttgagaaaatacgcactttctatacaaataaacagaaagctatcatgctttgggtatactggctcatactgagcccaggttgaagatgctacattctaacggtgacatgtttccaaacggttggatgttctcacccttgagtgcagaaaactctcaactcgtctatatttttcaggcacagagggagaggagataaggttcacaccccacctttgggaacggaacaaaagcaaaggcttggcagggctgaaaaaaactcctccttcgtcaggaccctagaggtggcagctctgcagggctcccttcatatttcctcctagttaactcactctcggcggtcacagaatctatgtctacaccttggaatggccacaggcaggctaggaggtcagtttagccctttgccttggatcgcctcctttccccaagtctcccagtggcttctaattaaccctttctggttcctgcccaggtcagggctgctggaagcgtcctcagcaacattctaccattatctccatcaactcgtcaccccacacaaggacataacttccttttgtggtttatcgtcggtcaatttgcatgtgctttgctttctttccttcctaccggcgggcggagaaggggctcagtgccttcgggaaggccctctctccctccctggccctctactggagcgggatccggcagctcgccagcaggtctgcagtgaggagggatcgcactcgcgttaaccctttgaagggagttgggagatctgttctcacttgggacccgctaaagtggggccagtggagcctgacaatctccctcccgttcctacacgcccccacccccccagaaccagagcaggctggcaccttcttccccgctggtggccagttttaatcagctctcactctgccccaaacctgggatgggggagggggcttgctagaaaacaggcggcgagggaaaaagacagcaggagggcagaagggaaactcagtagtaaatcatagttgagacacagtgtttacttacgaaatttggggctggtgctagtttctggtgtggtggtggtagcggaggaggaagaagaggaagaagaggaggcagcatcctgaaagggagacagggtccaggagggagtagaatcgtgaaggtaggaggaggtagcgtatgccgcagtaggccaggagggcattgcctgggtacttggagttcctggcaccgggggtcgggagcccagcgtgctgctactgaagaacggggccgtggtggacgggaccgtcgcaggggccgcagtgttccgtgctgtggtggagcgcgggctggcccggatgggcacccggtgcccggggaagcgagtgggcgcccgcgtgatggtggtcaggcgagtgctaatccggttgggcgtcctggaggaggcggcacccccggcggagggggtggcgggggacgtggtggaagtggtagtggtggtggtctccatggccttggggaaagagctgggcttggagaggaagaaggggtcctggcccatccccttggagtccactaggtcggtgggcacgtactccttgacggagcccaccacgatccatttgagaagcatgaggctgagccccaggccgatgaagccgatgaacagaggtaccacgcacagccacgtctgctgccggttccacacgatgcagtcgctacagcgtaactcccgggggggctcggccgccccttcgccgccgccgtccgggcccccgcccgccgctgccgccgccgcagccgccgcggtgccctcctcggccgaggcggcggctgccgaagcggcaccaggtggcgaggcagcggccgccccttcactcatcctaggagccggtcttcaccttcgcccccccgagggccgcggcagaggcatggggccgcgcgggccgggcgcgggcgcgggcgcgggctccggcggcggcggcgggctcgggcgcaggcagcggccgcggcggccgcatgcaaatccgctccctgcccccacgcccctccccccgagaggcgggcggcgggcggggaggagaggagcgggggaggggacggggccggggagggggcggtaaggagctcggaagaggggcgagacgggcccccggcgcctccggtcggtcagagagcggcggggcgcgtctgcagccctccaagccgcctcctgcgcgccgggtccccgcgcccgctgctgctgctgctgcccgccgcctgcgtgcgctccaggagcgccgacatcctcggggcaccgcgcccagcccgctccctggggcgcccgctcgcgccgcgcctgggcctcgcgccgccttcagtggccccggcggccggtcgcggggtgccgggtgcccgccacccgcattccgacacagagggcctgcctggccgccgcgatcttcggcggctgctccgcgagcccgggcggtgaggtgcacctgttcttcagccggcccgcagccaaccctcggccagcactcttctggagagaccaatcccagcgcagcgcggagggctagcggcccggctcgccttgctccagccgttcgctgctgcgcgccgctgccgccgccgccggagagtcaaactccagcgaacagcgccgctgtcgccgccgcgagccaggggctgggggcgcaccgggcgcccgcggcgggtgcggtctgacccgcctccgagggacccaacaagcaggcagaggatcggaaatcacgccccggcgccctgcccggttgagcgtgggggacggaagcgggagactgcgtcgggggtcccggggaacgcagaccccgggctgagggcgtctccagacgggctctggctgccaggctggtgcgtgtgtgtgtgcagaatcgccgcggcgggctgggattcgggcagagtagcgcctcccactagcagctaatgctggtttcttaatgcacacaagatagataaatgatccaagcaaacccccgtttgcggtggggtgggggggcaaaagcagcttccgaccgattgtgagtcgtctcctgtacggatccagtggggtcagagactgacgctgctgggcgagggggcgggggcggatgcgggtgggagggtgcctgtgccctcccctgccggatggcggtgcggctggatggaaggccacctttgcctgagttcctgagagatgcaggtggagcagaagacctttgtataatcagacctgtcagatatctccaagccatttatgtgaacttgccttaaaatattgtctttacctgtaaatgtacgcacaggtacacacgttacaaggcaagtgtttgtgagaggtaaatatgaaaggatttggggttggactcccaaattccgttactgctttcttcccttggctggggaggcacctgtgtacctatttctccagcgctgtgtggtacctgccgaggcaaggggcaaagagccagtgttagcatgacatatgccgacagtgcaaaaccttgcttgccaactctccccagatttcctggtctaaagtgaaaaccgaagaggaggggtttttatttacaagcgttaagaatatgaggttgagaaaggcaactttctaatacattcccccagcactgtctgattggcgtggatgatggagcccgcattctcttgtcctgtgatagtctccacaaagatgaagttttcaaggtatccattttattcacagggggagagccaaacgttacactgaagagactgcagagagcagaggatgcattgaaacaggaagcccctggggtttggtgcctaccagagtactttgcacagacaaggttaataaattatttttgatggcagtaatgcggctgtcacctctttcagctataacattgagactttccccataggaaagct

SEQ ID NO: 913911 - DNA, 4001 bp, Homo sapiens
cataccttgcttaaacatcaaatgtacattctacatttatttcttcttaaatacactattagatatttgtgatgttcattataattaaccatataccttccaaatctaacccaaagaaacacctataaaaagaggctctttgtctttagtatttgaatttagccaatgactccgggctaccacctgttaaacagtattttcagcttagtaaaagaattctatgtctctaaaacaatccacatttgcattggcagcattgtacaactatatttcaaatctgaaaacgaaattgaaggcgctgtaaaagggaaaggctgattgtacattggtcaaaatcactgttttctactgtctgtagtgacctcctccctttggcttgaaaaacttgtaaattaacctctactttcaaatacaaaatgcttcaaagatgtttctggtgaaataatctcccctggcgatatgtttaagacattcgtttttagagtctgaagtgcaagcaagtactaggcaagtggaaacccaagaatcccaggaacgctgaagaaagttttggtccagctcacggcctaaacggtggaggacgggaagagaagaatcaacttgcaaaccctcctttctcctcctgcctttaaagttcaatccttctttgtctttattcctacagaaaattagaaacagttctctaactgggcctttcccatagcaaaaacagcttttgcttgaaaaaatcctattatccattagcaagcatgttcattgtcagtgaaccagcctcttccactccaaagagacaggatccttacagacaggatccttctgattgatctaagatgaacacaaagacattcattccataagccttcaggtatccaatgcaagagcaaagatcctggccattaaagaatttgtgggttagtcaaaaaacgaaagcatcatccttaaccttttttcaagtactacaacagaatccattactttcatttaaaaaaaagaaaggacggaaagacccactaaagtatggaggtaggagctggggaaaagaaaatttctctcctgggaactttacgggcataatcaagacaagtaaaaaaaatatgaacaccagtgattcaggcttttttcatcctacagtagcactgctgataatctctcaaatgaaatcttaatttccttttgttaatcatcctgcaatcttggatgaaaaaaataactaaactatcctctttcttcaagtcaccatacaacttgcctatttaaacacgttttatgaaaactacataatccacttttccttaaaatttcccttgtttatagatgcaaaccaggtcaatttcagctggattttgcatacttgtattacataccttaattcaacttcttgtaaaggtttaaaaaagagaaagagctgaaactaagatacaaatacaacaaatactgcttatatgtctatgtgaacattgacaccatttacagatttttcccctcttttccttggggctgagggccctgtcaataatcattacttattaaacaggctgccattcccgtccacggaatgtaggaagagagcatagaggggtagaaataattaccttgggcttttctttaaagacctccggaatggtacacaaggaaatcaattgagaaagaacatgaaatacccctaccgtgtgtagtccccctcctctcccaacgcatacaagggttggaggtataccacactccattattctatcaactgcatcaaaagagcagatcaaaaatctggggtcttcagggtagactcattttcaatccattgaatatgttcacacatacactcatgaatcctttatccttctacaaaacacaagctagatttgttgagtggaggctctaaacacctcctgggaaaatgtgctctcaaaaatgactgcttcagccaaaggagagagaagcagcaagttactggctctactgccattctggtttgtggcagattccttccttccctccttcctgtctcccaatttatcttctagacggttttttccaaagcaaagtaggtttgcttttttttccccctttccctctcctggaccttacttacaaatacactacattctttaaaaagaaaaaagtttcaagggttaagtaacacccagggtaagatcatagggcagggaaatgaaaaattagcagatgactgaaagcaaacccagtattcccatcatcactgaagagttaatgatgaacactcttcctttatctcagatgctatggctcaaaacacaaatacaatataaagacagcataaccagacagttttttgcaaaatagccttgcacagaacttgaactagcagcctggggtttgtcctaaataaccttcacaggttgcacaaactgttcccatatcctgatcagatcagcttaaaagacacctgagatttcctttgaataagaacaaggtgggggttggggtgggaggtcaattagtcacctacaacatttataaaaatgttgagaaaatacgcactttctatacaaataaacagaaagctatcatgctttgggtatactggctcatactgagcccaggttgaagatgctacattctaacggtgacatgtttccaaacggttggatgttctcacccttgagtgcagaaaactctcaactcgtctatatttttcaggcacagagggagaggagataaggttcacaccccacctttgggaacggaacaaaagcaaaggcttggcagggctgaaaaaaactcctccttcgtcaggaccctagaggtggcagctctgcagggctcccttcatatttcctcctagttaactcactctcggcggtcacagaatctatgtctacaccttggaatggccacaggcaggctaggaggtcagtttagccctttgccttggatcgcctcctttccccaagtctcccagtggcttctaattaaccctttctggttcctgcccaggtcagggctgctggaagcgtcctcagcaacattctaccattatctccatcaactcgtcaccccacacaaggacataacttccttttgtggtttatcgtcggtcaatttgcatgtgctttgctttctttccttcctaccggcgggcggagaaggggctcagtgccttcgggaaggccctctctccctccctggccctctactggagcgggatccggcagctcgccagcaggtctgcagtgaggagggatcgcactcgcgttaaccctttgaagggagttgggagatctgttctcacttgggacccgctaaagtggggccagtggagcctgacaatctccctcccgttcctacacgcccccacccccccagaaccagagcaggctggcaccttcttccccgctggtggccagttttaatcagctctcactctgccccaaacctgggatgggggagggggcttgctagaaaacaggcggcgagggaaaaagacagcaggagggcagaagggaaactcagtagtaaatcatagttgagacacagtgtttacttacgaaatttggggctggtgctagtttctggtgtggtggtggtagcggaggaggaagaagaggaagaagaggaggcagcatcctgaaagggagacagggtccaggagggagtagaatcgtgaaggtaggaggaggtagcgtatgccgcagtaggccaggagggcattgcctgggtacttggagttcctggcaccgggggtcgggagcccagcgtgctgctactgaagaacggggccgtggtggacgggaccgtcgcaggggccgcagtgttccgtgctgtggtggagcgcgggctggcccggatgggcacccggtgcccggggaagcgagtgggcgcccgcgtgatggtggtcaggcgagtgctaatccggttgggcgtcctggaggaggcggcacccccggcggagggggtggcgggggacgtggtggaagtggtagtggtggtggtctccatggccttggggaaagagctgggcttgg

SEQ ID NO: 913912 - DNA, 4001 bp, Homo sapiens
atatatttgtgtagttcacaacctaaagtctgatagctctttgcattgagcttcaaatctatcttgtgaacacccccactatggatttagtctcaagagttgtggaggacagggttactataatttctagtccaaccatttgagctctttcagttggacgagaatgctatttcattccctgccagagtatagaaagatgctaccagctcaggttcattaataaattgaattctacattcataattttttgtgtcttgctttcctgccagattatagaaaaatgccatcaacttgggctcattaataagctgaattccatgttcataatttttttttttgcatgtgttttgctttaagcatctcttaaaatactgcttggtagctgctgagggaaatccattgctaaaatcacaaaaccttgaaaaagcatattagagagattaacttccatcataaagatgtgatttaaattcctgttggtatgaggccctccacttgcggtctcttattaaaacaatataccacagtaagtagtggatgttcttttcttctaattactgtgattgaaatctaagccagacaaaagtaaatatttgatcattagttaataacaattgctgacgacttactgtaaagataattgcatacccttgcctgcacttactttacagtgtgaagtcaaacatgcctacaaccagatcccattttaaaacacattatttaggttacatggtactgtttagaccccagtatagtttttcatttacttaacagtgagtgattttaaaagctaagtggaagctgcaactagcttagggattttcagatatcctggtgccttacactgtatatgtcagattcctgtattgatactatgtaactttcagtcatactccagacagattacggaaggtgtacaaaggcgggggagggagtttcatcaacccacaaaccgatatctctggccgtcacccaccagaggaaacggcttaggggagcagcaaaggaaccaggaagtaagatctcctggtaaagtgttcattaactttcaacagccatcagatttttgaaagggagtctcttctaattgcctttgggaggaaacattattaagataattggcatgctgatctgggaaggtagacagctctgtcttgtaacagaggtaaggaaaagccccacagcccaaggatcaacgtcaggagggagcccaaagacctgaaatcctcctgctctaaaccgcctgatctcatttcttcttctctcctcccagataaaagtttccttcgcccgggagtcggttgttcccggctgatcccgggaagccccgcctgagccccggtccggggcgggcagctgggagccggggcgccgctgtcacccgcgcctctgcctgtcacttaccgttgcgaaaagcgccggccggggcgaggacgagggcgagcacggcgcagaggagcggcagccccctctccattctcccttctccgggtccgcaggcagacgcgggagaacgaggacgtggggggaaatgcagcaaagaggagaatctaagcgatccgaagagccccaactccgcctagagctgtacaatcctcagcccgtcttggagaaaagaaagcagcgaggcaatgcctggatccgagaggaacgcttctctttttgtgtctcaagtcgcctgcatcctgtcatttagctccggcttcctctcccttttcccacacttgttcctcttccaggagccactgcccgggccatgtctcaaaaaaaaaaaaaaaaaaaaaaaaggccgggggggggctgtgggtgggagggggaggagggaggtagggcaacacacaccaaagccaatttccaggaagaaaaaaaaaaaatccggcttgtttctggacccgttggagccgcggagctggcgcccaggggaggtccgggtgtctgcgggaaggaggggaacgagcaatgaaaagatgagcgggagacagaggagtttcaccaactgcacccccgcctcccctcctgcggcctccccccactccggagcccttccctcgcttcctcccgcccctctccccgcttgggctcgcctgtaattgcctgacaggagactgggaggaacaactttccctccgagtgctctccccgtccgtctgtctgtctttcccagagaccctgcagggatctccgcgggaaggaaggcgctgggagtctgcgccccggtcgcgtgggtgcgggcgtcggaggaaggggcgcggaggtcagtgccagccgcagggtctggccagcccacctcgcgtgctcgctctgcacccctagagggagagctgggcagctcctgcaggcgcagatcccgccgccgcgcagtgcggagcgcccgggaggtggcggctgcttctcgcaacttcaaatcccggggcccgcgccctcggcggcgaggaacgcagggtcaccccctgccactcctcatcgcgccatcctgagacctgtggcggggagcagcggggcacccctggacgcccctgcccagagctggagggcgaggaggggaaagccgggctggagtgggagccgcaccgcgaagccgggcgaggggcagcagtgtcgctgtggtgtgaagcgaagacagaccgcctgggcgggcgaggccgggctgcagccccacgcggcctccctggcccgcatcagggcgcgcggctgggtgccctctgcgcgccgcggaggcttcattgtttcccgagatttggtgcccgttcctctggggcagagggaacaccggagggtgggaggtgctgcgccttccaagcaggggggcaatcgccgcccgaccccgcccaaccttgtctgggagcccaggtgctagggaggggtgtggaaatcaggggtcgggcggcccccgtttctctgtgcatcccgagggagggaaagagtggcgggggaggggtgctcttcgctgcgccctctcagtgtccgctcccggccacagacaacgtgcacgccggccctggagctcctgccacccccacttcccacagcggctcgtgcccccagcccgctggatgccccccaggcccgtccccgagggttttccgagaagtgctgcaggaagcgtttgtagatgcgaaaagcaaggacatttctgggaagaaacaggttgcggtcaccgatcaggccccggagaagggtcagtgcccacggggcacctcccagggagtttgtgggtaaggtgaaaaggtcacacgcctcctggggattggcgtctacacacacagccaaagtacagcctgattcctacctggcacaaatagctggccaaagggaggtaggaatgctggcaaggagactctggtcaaaggttttggcggaagaaaaaggggcgggcagggagaaagcccaaggcgcgcgggccccaggccaggactgcgcgctcgcgactcgggctgggagcagtgacgtgcgcccctcggggtgcaggccgttcccgggccagtgggaggtgcacccacggagcccgcactcgccactctcttgccccgggtcaagcctgtcttctcctccccacgcgcctcgggattcccagtcgccaagttggaaactcggcccccccgagcgcctctttcctctgccagtttcctccttcttctcagctgtcggacccctgggaggcgcggggtgggaagtgggcaccgaagggctgggagttaaatgcctaagttgagcggaaggagcactgtcgaagccatgggcagccctgcgcccgggcaggcgggcaggcgggaggcgaggcgggggcgccgaccgcgcccagcgcagaccccgggggagtgagcgccgcagaggcagcctgggctctcggctactacccgcgcgcggtcgccgcctccccaggtgcagccccgccagtcccagcccccggctgcgccgggcgagcggcatcatcagatttagggtgacccggagcgacctcggtccaggctcggagggagaggcgcctctcaggacctggc

SEQ ID NO: 913913 - DNA, 4001 bp, Homo sapiens
ctcaaacctcaaaaaaaaaaaaaaaaaggatatatttggctgcattctcccctatgttcccacagacccgtcagagagggctggaggggacagtggtctgggtagtagtcctgtggctctatgaccaagtacccacatcagggagtacccctctgtcaccaagcagacagacagctgctaccaataccactgcctctgctttcaattcaaactaaggttattttttaaagcacccatggcctagagttcagtgctctgggatctctctcactcactcactcacacacaacacaccccagactggagaccagcaggtacacttgcaggctttgccacctccattgtgttacacgtggaccaatagcagggagctgaggaaggcaaaacagaatgggacaggaaaagaaacaggatttcagaggctagctcagttctgtaattcatccactcaaccaatgtatactagggatacggcagtaaacacaagaaaaagaaacaagataacacatgtaacgttctcaaacttgaagaggcaacagaatcaactgggggcttaacacagactgcggaacctacccccaaattttcatgtaaagcccttattatatggtaagtgcataataaaaatggcattattgctataatgaaacggttcccgaactgggaaagcactattacaaatgtgggaattgttttatgtcaataatttggcgcttatgtaacactaattaaaagtatcataaaacacgaaataacatataaaataacaaattaccttcattaaacagagtgttagcctcttcaaggacctctgttaatttgtcaccggcattcagtatgtcctcacggttttctatttttaaaaatacaaactttgggaaatttgttcagcattcactaataagcagttgacaaggttatcacctgcaacagtaaagccaagccccggcccctgcgctctgagtaattacttcgaacatctttatctttttaaccaaaatgacccggaaaaggagaaaggccaccctaccctttatgcagcatgaattttaaaaggaaaccctagctccctctaaccttaacccaaagggctggactccggctgcagcctctgagtgctccataactgagtggttctcaaactttgcaagcaatacacaccatcacctggagggccactccacagttgcgcggacccacccagagattcgaattccgcgggtccgggtggggtccgagaacgtgcatttgacagctctcgcgtgccgctgcagctgcagctgccgctgcgaggccgggagcccacgccgaggactgccgggcgcaatcaaagcacgcggagtccgcgtcctgcctctccccactggctggctgggctcgggcgagtccgcgaacggctctggcctccagcttttccagcccgccactcggggacccgcgccaaggtcgtacggctccagccacaaagtgggagcactttgtcaacaatttaaggtgcggcgaggggctggcacccggcgcgtctctactaacgccgcgccgggcctccgcccggcacctgcctccggtgccctccccccgcgcccggcgcagggcggggacagcggcccgtccgggcccgcgccgcccggaggcgccgccttacgttggacggagttgatgagcgcccggtactgatggcggatctggcggcacaggccttggtcggcctccgcctccaagctggccgggtccatcatctcgtccccggaatccgacggctctgtgtcctccaggctcgggcgctctggggcctctctgcgctcccgcgcagagccgcggcgggacctgggcgacaaaggggaccgcgagcgggagcgggagcgggtgcgatcccgatgcgggtcgcggccccggccccggccctctggcccgcggccgctgctgtccccagacatagcgccaattcaccgtgcaacttcggaacggcggaagttcgcgccagaaactgaaacccctgctctgcgccagcgcctgctcccggcggaacgcggctcccgggcccgcgcgagcgcacagcgacgcctgtggctggaggccggcgacgggcccggccgggtctccaaggcgcctggggggaccgctgggtgcacaagaggggcctggcggggatcctttgttcccttgacaagaggtgtaatgagctcttactccacactgcagggctgtgagaatcttggttttctgcccctactttcccaccctcctggacctgcatcttccctaggtccctttgcctgcccaggacacagccgcagcctggcacccacatgggcacgcagtccatgtgtgttgaacgagcttcctgctgtggagcaggatgagcgcgggatgtggagtccagacgcggtctgctgctcacctgcgacctcagtttccctgtgccatcatggctggggtcgggggggtggggaacaggggtgggtggatgaatcaaatatttatgtgcagctggcaataccattttttgtgaggatagcagaacaaattaacaggtaaacatccttctaaatatctacaacagaatgtcaccagagcaccagggttttgttctaggacccgctgccccctcacagaaatcactgagaaaaccattattaccaaggaagaaggctttagtagggtgctgcactcagggagttggaagctcagtctcaaatccattgccctgaccaactaaaattaagggtttatacagttgcagggaagcaatgtaacaatgtatgggaaaagaggaactcgggagggggaaggaagctatggggatgcatgaggggcttggcatctcattgtctggaatgcggtgatatggcgagtttcagttttttgatactttttgagaggctctggaggtcctttcctgaggaaggaactcagataaaacaaaggtaagtttcaaccttaagactagaaatgataatttctaagtttattaaaaaaatagtaaacagtctatgggattgttgggttgattttaatgacagtctatgttcacatttgattttttttttttttttaagaccttgctctgccgaggctggagtacagtggcactatcttggctcactgcaaccccatctcctgacctcaagtgatccgcccacctcggcctccctaagtactgggattacaagcatgggccaccaggcacagcctgattctgattctcaaactagaagattctaagaatacctcctgaagggcccaagaaagatggaattatgttaagtatactttgaaagataaatgtatgaatttcactccgtgcattttggattgtattcgagtattgtttcccaaaagttgtctttggtgctaagaacacattttctcaaaagaccaatattataagttgggttattacacaacctacaaatattccattttgtgcatcatgtctactaaacttaagttaggcactgttcattgctgtccaacagctactacctcacccatccctgcttatctgtatttcctgaaggggacgtgtgtgcctacttccttagatgaaacgtgatcactctaaccaggtcacggtaatgtcattccccttccccagtgactggtcaagggtcatgtgatgcaacctgggtccgtgagatgtgaaagggtttcccaactggatggaatacaaaccttcctgaaaagaaaacccttgaccccctaccccctttgagatggctggcataagaaatggggaacctgccaattagcgggcataatggtgcgtgtctgtaatcccagctaatcgggaggctgaggcaagagaactgcttgaagctgggaggtggaggttgcagtgagcagagatcgcgccattgcactccagcctgggtgacaagaatgaaacaacgtctgaaagaaaaaatgtggagcctgccatattggcagcatctggtactcacgaggtgacaagcatgaggaaagactagagtgctggagacactggagagcaaagatgg

SEQ ID NO: 913914 - DNA, 4001 bp, Homo sapiens
aaaaaaggcataaaacttaatattcctttcccttcagtacttttcacaaaggcatagcttttcattttgtaaaaccataccactgatgagactcgaggcagaggcagtgtcaaagaaagacgtttggatcttctttataaaacgacgttctccattttaaaatctgctgaaaaaattgtggtatgcccctacttctcctaatatgtgccttatattttaagtcccttgaaatcaacagaatatattttctctttccatacagtctagtacctcaagctaatctttggaaatgaaacgtagaaatcaaatctaaaaggcatggcttcaataacatattcaaaaatgagtaacatttaagtggtgttactctaactaagaaaactaaagatttcaaaaaaaacaaagttgcttagaggcaacatggtaaagtggtagagaggacaggctttgcaataaaagacaatcaacatttactgaggacttctgtggcaggcactgccaattgcaaacaaaattaacattttttgaagacttacatgccaaaacaatgcaagttgttttcatttacgtttaatatcctaaaacaacctggtaaaatatttttaacttgactaaaaaattaaagatttgaaaaaaaacaaagttgcttagaggcagcatggtaaaatggaatagacaacaggctttgcaatcaaagataatcaacatttactgaggactttagcaaataaaattaacattttttgaggacttacatgccaaaacaatgctagttgtattcacttacgtttaatatcctaaaacaacctggcaagatatttttaaccattctcaatttttcacagaagagaaaaatctaggttaagccacgtaatttacaaagcactagaatgcaaatcatgtgcctgagattcaaaagctgtacctttgttcattacacctgaactctttccctccagatttcaatagttacttgatagctgtgtcaacttggatcagttacacaattccttgagcagttttctgctcaagtctattaaaagaggaaaaacctctaagaaaaaaaagattgtgaagattaaagatgcaaatctcctagcacaactgctggcatttaagaggcactcaacaaattacagaaaccttttcacctgagtgccagagccagcgctcttttaaaattcgattcgagttcttgaagacagggaccttttcttgttcatccttgtaaccctttgtgccatgcctgacaggcacatgccttttttcccttcttttccactcctaaatgttaaaacatataccttattcacttcgtatctcagtaagctttaatacctgtagaaacatattggtatttttacacttgatagacaagtagtaaggaacgacggctgtcaagatttccctttatacttatttctatttctctcgagtgtgcgaatatttgagtttttgcaaaatatcaactaacatctttacttgacctacctccttattcataaagccttccttaagatagttttcaacctcaggtctcaaagatatcttagggaaaatagacatttttcctgttgtttagttctccaccaagagaaatgctggaaaacggtgttttgtttttttttttctttccgaattaatagtgacgagtgtcttgacaccagatgctgaggaaaatcttgccgatcacgctgagttaatttcggaaatgcagaggtacacgctttctcaagcctagccgattagaaggggctgccgggcttccaccacacctcatcgaggcaatgttttctggtagagatgctcatggaaatcactgagccaatgccactcacgttgcaaagaaccaaaaaaagaaaaaaatgcttagtaactgaatccgtggtgaaacggacgcagatcagtaagccaggctgacagcagctcggtccctttatcttttctatcaatttccaaacacgcgccccctatttctcggcggaaagtcgcttccggcttacgtcacgtccggcgcctgcggcccacccctccctttccggtcccccaatccacagccgcaagtttccccaacactgcgttacgctacgccacgcccccggaggttcctaaccctgcgtgaggctctttcacctgcctcaggttaagtaggcagaccccgcgggcgggatggtcaaagatatttagttcccggtaccggagggctaggtgccaggggcaatggggaaacagccaaatggcgtgggttgagtggaagatgttgctggactgaaaaaaggcacagcccagttgctgtcctgccagatgtcctccagttagaggatgaggccagaatttgggcgcatcagccaccgtttgatttcatgacatgattttacctctctcaggcatacagatctgacttcagttgtgaagttcatagggttcatatttttgaaagttgggctaatggtctgttaatatccaatgctcaggtaaaacttaaaacccacagacagtgtttacagttagttataaggctaactgctacttgtatcatagttgacatattctttagagtttggaagaccctcgccattatttttttttcttttttttcatcataagcagacaaggatatagattcaaagaacgaggatatctaaccaaactcactgagtcattttataactgtacaggaaagtcaaaataattctatcaccttgacatatgttttttgcagcacaccatggtaatttacacataagtataggaaagggttttttattgtttttttctctttaattttcacaccgaattatacacacagacacacacacatagaacaggtactttccatgacacaccaactctttaccagaaagagtagaaaataatgaatgaccattataccacacaacaacctgcaagttgtttatcattttctctgctctttttttttttttttttttgagtctctgtcgcccagactggagtggaatggtgggatctcgactcactgcaacctccacctcctggttcaagagattctcctgccttggcctcccgagtagctaaaattacaggcatgtgccaccaggcccagctaatctttgtaattttaatagagacggggtttcaccatgctggccaggctggtctcaaactcctgacttcaactgatctgactctctagcctcccaaagtgctgggattacaggcgtgagccaccacgcccagcccattttctctgttttaaagagtaaatcaaggttcctagggttgaaacaactctccatgttctcacaaataaaaagccaggataaagactagtaatttggcttctagagccaataccttgtccttgaccatagcatatttcttcaataaatccatgagattctttcatggctaaaacatctgaaagtgataaatgtctaaatcagacatttccaaaggaatttctgtagcctgaatttcatggtgaccatagcaccactgatggctagaatctgtattttagcgataaaggaggagaaacaagttgaactacattttaaactccacaaggatagagactttatcacaccactatgtacccaagcctaatccataatgggcactcaaatacttactgaatgactaaatgaaaagatggatgaacatctctataaactatggaaagaaaatgctgataaagcatttgccagaaattacttcactagtgccacacacggacagaattgaggacatttagacttttttgtttgtttgagatggagtctcattctgtcgctcaggctggagtgcagtggtgctatctcagctcactgcaacctctgcctcccaggttcaagtgattctcctgcctcagcctccccagtagctgggatcataggtgcccaccaccacgcccggctaatttttgtatttttagtagagatggggtttcaccatgttgctcaggctggtctcgaactcctcagctcaaagtgatccacccacttcagcctcccaaagtg

SEQ ID NO: 913915 - DNA, 4001 bp, Homo sapiens
gggaggtggaggttgcaatgagccaagatcatgccattgcactccagcctggccaacaagagcaaagctccgtctcaaaaaaaaaaaaaaaagagagagagaggaaatacttaaaaaaaaaaacctgtgttttatgtactcctctttccccataaaacaggagaaatagcctagagaaagattaatgagcacctctgtgcctaacattctattgtaatctggctttctttaggaagatgtgatgtcttctggttaagggtggcaggtactataagggaatactatctatataaatcttcttacaattacaaacttctgaaaacttgtagctgatggtaaattttcatacaatggcatcaaacctttgaactgaaaggaatcttgcataacatctccttcagaaccccccccactccaccccgcgcccctccaccttattttacagatttgttggttactaaatcctaaaaccttaattctgggtcaatgagagtaatgcagctacctatactgttgaaatgtagtggtttacactgcaatggaaatgcacttcagaaataagtctgtgtatgctagtatcaaccctgcatgtggagtttttattttaattactaaccagctatgttttcttgaacttaaccttttttgttcttttttttttttccactctcagctcacacctattttttttctcttttcgaacttcaccctttcaggcctggatgtcttcatctggataaattctaaccgttgttgaaaagccatgtggtaaatatttttgaaacctaaagccttctctacgcaataacactaagttttcatggtaaatgacacagtttcaatattctccctttcacattatggtcagtagtttgcattcgttgcttgaagaggcgaaatgaatagtctacagacactgggaaccaagtacagctcaatcctgaagaactcatcggcccctggacgggcgcgcacacacccccctgtaatggtgactagtcatttcggggcgctgtacttcagagcacgacccccctcaaacatcaaggccctaaaggtgaaagcccaggaaaacgtcgattcggacagcagcctctacctgctgcttttagaagctgtggcctgccggagtcaaacccccaaaacgtttttcttaaactaagggttcaggcctcagatcggcatctcgccctctccgatttcaggagccccgaaaaaaggagaagaataggccgccactgaacggctcagccccctgaccaggagctgtccggatgttttttgtggcggcttgcaattcgctgtgacctttccaggaagtgttgcacacgggcgtgtggcaaacgagctggccgtttctcgcggtcctgctaaaacgctgtcaacctggcgctccaccagaggccccttggcttctcgggaggcgaccgaggagctctgggggcggggaggcttttacaagaagcgaaaagacggcctcaggggtggccgggaacagcctggaatcagctggaggacgtcagcaggactgaggaaagggctaccaccagcgtgaggaaaggggggaagagggcggaacgcggcgaacggccgcgctgggaggctgaggcggggtcccagcgagccggcggctgggaaacaatggcgcgagcgtgacgtgggccggaggcgtcgcggcggcgcggaggaaggggctgccgtggggcgggggccgcaccgagggagttgggaggcgtgcggcgtccgcgagcgcgctggcggggactcggcctaaggagaggggccttggggccatggtccctgggggccgggggcgggggcaggcggcggccgctaccctggggtcgcgtgttcggccgcgcacctccccacctagctccccgttcgcccgctccttccccgcccgcccacggggcccgccgcactcaccggctccagcgcaccgcaacaatcccagcgcgcaactgccgcagccgcctcaacgcgcgccctccccgcccccgccgcccggcaccgccccgcgccgcccctctgctcgcgcccggccagggaccggcgcgctgttccgtcccccagctccgccgcagagttcggcgaagccgacgctccctgaccgcgctgcgtctgtctgtcccgcgggtctggagatcttcaaacgatggaacaccggctttgcccttctgagggtctccatcccttggcattctgcctgcgcccctcagcctggccctgggctaacctctccactgtgtctcattcagaagaagcttttccttgggaggagagggcatcctttttcccagtcacagaatgttttggtctaatggacctcaaggcccctcatgcgtccacacccccatggcaccctcgaatccccttgatggctaaaaacaccagctttgaagtttgtcagaacgagttccagtcccagtaccaccacttacaaactgtaacctcgggcgaggtacctgacctcctatacctggtgcccacatttgtagcaccaggatagggaacaacagtccccacatcaaagggtgttgacgggatgaaatcacacaatataggtgaggccctcagcaggatcctggcacacagtaagcactcaataaatgttcaccccaccaccagcaactcagcaggaagactccgcaaaagcagctagctatttccagaggactgaattccttggtccgagcagctctcaccagtgagaaaatgtgtctaaacttccactctcagggccgaaattcgatgccttggagccacagagaacaaacgtctaatctctcctggacctttgacttttcagatactttacttctatcacctctgcccaaggtcttctcattccacatcagtgtctcccgttccttccattgttcctcctctgccctggttttgagggtctttatccctctcacgcaaatggtagatttgactgtgatttctttagaatacatcacccaagactgaaccaaatgtttgtggtatcatcagagcaaagcaggactatagcttcctccttttgggacctatcgctttgcactcctgcgataaagttcttggcacccatactgttgactcatattgggcttgcagtcaaccaaaacctccgcgtctttttaataagtgctccgccagagcacttctaccccttcttgtgcttctcagccaacttcgcttcaggtcagctaaggatagaccttgggcccctcaccttctaaatttctcaggatatatggaaaagaggaataggggttggaagctggcataacacaatctttaaaccaagtgcatttgaaaaaaggccagggtggcggggcgtggtagctcacacctgtaatcccatcactttgggaagccaaggcaggtggatcatttgaggtcaggagttcaagaccagcctgaccaacatggcgaaaccccatctctactaaaaatacaaaaattagctgggcatggtggcacgcacctgtagtcccagctactcgggaggctgaggcaggagaatcgcttgaacccggaaggcggaggttgcagtgagccaagatcacgccactgaactccagcctgggcgacagagggagactccatctccaaaaaaaaaaaaaaagaagaaacgaaaaaaggccagggtttgtgtctaaacactatggtactgagagaaaaacaaatatagagacacacacaaatgaatgtgatcacaactgtgaaaaaaaactgcacacgcaaaagactacagggaaatatgtaattgattatgttgttttctctcagtgataagatggggtggtttcttctttgtacttttgtattaatttcttacggtgtttgtattacttttataatcaagaactttgttttaaaaaataaatcagaaaaaagaatttaaaaaatcagagagatggaataacttgaaaaaaactgaaaacaaagttaaaagataacagaataaggggaaaactattcgcaatacacaaaagacaaaggatttgtct

SEQ ID NO: 913916 - DNA, 4001 bp, Homo sapiens
atttttctttctatttttttttgagacggagtttcgctcttgttgcccgggctggagtgcaatggcgcaatctcggctcaccgcaacctccacctcccgggttcaagcgattctcctgcctcagcctctcgagtagttgggattacaggcatacgccaccacgcctagctaattttgtattttttttagtagagatggggtttctccatgttggtcaggctggtctcgaactcctgttctcaggtgatctgcctgcctgggtctcccaaagtgctgggattacaggcaagagccactgcccccggccttatttatatttttcaaatgactagaagtatacataccaaactattaaagagtgactaatttgggggagtgggatgaagacaaatattgaaaaaggtgcctgtaatttttattttgttcatttttctgtactgaaaaaaaaattagccatgtgtacttattccttttaagacaaaagaaaagcctaataaaatagtagttcctgagactaactggttaatgaggctacctccatgccactgttccccaaaacacctcaccatattccatgagccaaagggaattcatttggtgagtttcttggaccttgggaactgctgcctgatgttttgcctagtttctgctactaaattaaccttagccagttgtagattatcatggctgctgactcatgagctgatggtcacagagctatttatgtttttaaaagtacaatgtttgatagagatgaaaggtaatagcagtcttacccaactactaaatgatgaggcaaggtgctttaacattaagagtttctttgaactccccaacacaaatgattcacacgtttcttatcctgttcatctttccagaagaaagattataaagtactacagcgtgacaaaaaagcccatcttgtagtgagccgagatcgcgccactgcactccagcctgggcgacagagcgagactccgtctcaaaacaaaaaaacaaaacaaaacaagacaaaacaaaaaaagcccatcttgaatctagtggttacttccaccgtgaagaggccaggttccctagtatttaagagacctttttttaggccgggcgcggtggctcacgtctgtaatcccagcactttgggaggccgaggtgggcggatcacgaggtcaggagatcgagaccatcctggctaacacggtgaaaccccgtctctgttaaaaatacaaaaaaaagtggctgggcgtggtggcgggcgcctgtagtcccagctactagggagtatgaggcaggagaatggcatgaacccaggaggcggagcttgcagtgagtggagatcgtgtcactgcactccagcctgggcgaccaagtgatacttcgcctgtgtttagagtccgtttctccacgactgtggacctccatgggacagggaaatatggaaaactgaggaaccacgggaatacagctttgaaggtctcactgacctgctttatagtttgctttctaaaaaataattttccctcctttaaaaaaaaataaaaattaaggcacaatgtgagaggttggcaagttccatttttaaatgactctccaaaaaagtatcagaaaatgatgagctgtggttactgatgtagctccacagttatgaggcaaaactatggttatatccctggtttctgcaaaaaggaagagattaagctaaaatgttaaaatgctgtgaccacgaccttttttcaagttctgatcatgcctccctgtgaagtccttcctgcacttagaagctgagcaggtttctgtttcactgtactcactctgaattcttttcggggcaccttcctagtcctcaggaatcagcacaaaagaggaaactccaaatgttcacgttcaacggcttccgttccctggagggaccattgctgcttctgccacacttcccagaatcctcctagagatgcactctgggaattgtagttcagttcccaggcatgctgctgtgttctccagctgcaagttaaccatgattgtcaaaagcatgaacatctaagatcttattaccaagagaactactgtatccttggagaaagtaggttagtattagatccattttttaattaaaaaaagataaagtcattaagtccaccctcatacacagaaggcatatattatgaggctggggagaggatgaagcaggggtgggaatcaaataccttttaaccttagtatatctctagttctctctctgcacactttagaactagctctaaaatttcatgaagttcttccaatttaaaaggatgggactctgtataggtatgtatagatatgtttgaacttatggtaggattcatttcttgatcagaggaagcgcattccatttgactggaagtagtctcctagaagtgtgtccggagttggttccttccagtgggttcttggtcttgctgacttcaagaatgaagccgtggagctttcggtgagtgttatagctcttaaaggtggcacgaacccaaagagtgagcagcagcaagatttattgtgaagagcgagagaacaaagcttccacagcgtggaaggggacccgagtaggttgccgctgctgttgggggtgccagcttttattcccttatttgtccctgcccacatcctgctgaatggtccattttacagagcactgattggtccattttatggagtgctgattggtccatttgacagagtgctgatttgtgcatttacaatcctttagctagacacagagtgctgattggtgcgtttttacagagtgctgattggtgcgtttacaatcctttagctagacacagtgctgattggtgcatttacaatcctttagctagacacagagtgctgattggtgtgtttacaatcctttagctagacacagagcactgattggtgcatttttacagagtgctgattggtgtgtttacaatcctttagctggaaacagagtgctgattggtgcgtttacaatcctttacctagacacagagcgctgattggtgcatttttacagagtgctgattggtgtgtttacaatcctttagctggacacagagtgctgattggtgcatttttacagtgtgctgattggtgcatttacaattctctaactagacagaaaagttcaccaagtccccactccacccaggaagtccagctggcttcacctctcagcagagctactttggtgctgctctcttctcgttttactactgaagttacttgcctatgagagaagacactttttttttttttgagatggagttgctctgtcgctcaggttggagagcagtggtacgtacaatcttggcttactgaaacctcctcctccggagtcaagtgattctcctgcttcagcctcccgagcagctgggataacaggtgcacaccaccatgcctggctaatttttgtatttttagtaaagccagggtttcgccatgttgaccaggctgtcttaaacttctgacctcaagtgatccactcgcctcagccttccaaagtgctgggattacaggcgtgagccaccgcacccagccaagagaagaagtccactcattcaacatgtatttaatgagtacccaatgtgcctaggactgttatagggataggatacagcagggaacaaaacatgaaaatctctgtcctcatgtaacttacattctagaaggggaaacaaacgagtaaatatacaatgtgtcgtggttataaagcttaagaagaaaaataaagcaagataagtagagggattattttgctattttatataggatggtcagcctcattgttaagataatatttaaacaaagaccctgaagaaggtgatgaagaaaccaaatttatatctatggaaagagatttgtagacagagcaaaataagcatatgcaaaggccctggggtgggagtgtgccgtttgaggaaaggctaggaaagagcatggtgatcagagatgagatcagagtaggccgggcatggtggctcatg

SEQ ID NO: 913917 - DNA, 4001 bp, Homo sapiens
gatcacaggcatgaggcaccgcgcccggcctatgctcaaatgtttcttgggctgttaaagtactgctcctcgcagaagggctatgttcccgggatctattctcttccgtacattcattcctatcttcattagaaaacatctgacctaaataaatcccccatcgatgctaacatctccttccgcgcaattttttactttctaagtcaaatcaaaacaattatttgagcgactgctcctgtctgccattaagtctttctggcaccaccctccagacatatatacaatattgcttctttccctcaaatcagaaaggactgcatagttccggatcaaggcataaatgatgaatcatgactgtccatccccaccaacatactctgcaacattataatctatttacctctgctttgaaaatgtattctttaaagcactgcttccaactagccacttagccagtaacatttttgagaaaaacaaaacacaacccaaaacaatgtatatattcctggggggaagagtttctaactcaaaatacgcagataattgtttattattctaaggaacacccttctgaagaggcctgcagtcggtggggctgtttctaatttaaaactacttaggtgaaccaggaagaatgtacatttaaggagatacttttagacgcagatgcctcgcgcaagcctaaagctcgtgtggtaagcgacacgactaggggttaaaagcggctggttggtaggcccggggccgtggctcacgccttgtaaacccagcactttgggaggctgaggcgggcagatcacctaaggttaggagttcgagaccagcctggcaaatatggtgaaacgccgtctctactaaaaacacaaaaattagccggcgtagtggcgcgcgcgcgctctcagctactcgagaagctaaggcaggagaatcacttaaacccaggaggcggaggttgcagtgagccaagattgcgccactgcactccaatctgggcacagagtgagactccgtctcaaataaataaataaaagcagctagttacttctcattcttttaacgaaacaaacaaaactgaactttgctgggtgacaggagtgaagcaaaggaaaaaacgatagtacaagttcgattcgaattcttccagtcttatgattcgatcatcgcaggaatactgataaaaatctgcgttttttccaggttgacaacttttgcgaggccagactaaacgaattcagcgctccaaggagactcctctttcctctgctttctcacatttacctctcgccttttacctcccaaagtcgaaccctccaggatcgtacaggcggtattccctctaccaagcattctactcctctgcagatgctgcaatctttacactggaactaacacttagctgtggtgttccccgctttctttactcggagtagcccaggctcttcctctccaatccacaatttccctccaatccccagtttccctcttgggcgcctggacgcgtgcccagccgcagcctgggagacaccgcgcggctgcacgcaccatgcagatgtggtccctttccccttcttcttctcctccccaaagaggttttgtgctgtgactggcttgccccggttacttactccaaggtgtaggggtgaagaacggaagaggacgaaataactagctggaggcagcagtgtcagccgatgccggtgccacggctcgaaacaccggcgcctctcgcggtgctaaaaggatgggcgcgcaccctccttccggcatccgtagaacccccgcctttgacctagcttcaggagattactttccgggtcagcgtgcgtttagggcgaagacggagttgtaaacttcttaaaattcctctctcgacacttcggtaattcctctttcgagactaaagctctttttgtatgcgtgtgtgtcaagcgtatgccccgggattctcctccgcttccttttctcggtcttccttcttgctttagggaccggaagagtccttgaaccaaaatagctcggcgggcacttccggggccggcgcccagagttccgggagggtgcaggcaggagagggaaaggcagcagcggcggcagctggaggatgaagaaggagcatgtgcttcactgccagttctccgcgtggtacccgttcttccgaggcgttaccatcaagaggtgagatgggagggggttcgcccggtcgaccggcaaaagggaactgcgacttctgagcgaatcttactgctatccaaaaaaatgcaggccttctagcgactgcatgggagggagtgtgtcgagagggaagtacatcagcaattgtctgcgtcctgttgcgagccagcgagtgtgctggctaggagggtcagttgtggttttcagtgagggtcggaggcgggaggaatagtggattaacctagtttaggcttgggagttcaccaccactacttttagaatggccccaggcgcaaggtgatcactgcctaagtgcactcggagaattaattgcttttcgccatcaccccagaggatggagattgggaaggtgaaaggatacgtaattacagttagatacgagaacaagttcacagatatgtcgtacagcatggaggctatagttaatgacgatatacgtattcttgaaaaacggagagtggatgttagtgttctcaccacaaaaataactatgttaggcaatgcatttgttagctaaatttattccacagtgtatatatacttaaaaacatcaggtaggcggcaagtattaatatatacaatttcatctctcagtttttttaaaggcgttgatagaaaatctgggctttgcacttaactgattttctgagccaacatttcagtaattgctgattcattatatgatggtttcattcaataaagatcggatatgtacttgaaaatgtgtaactggcttagaatggttaaaatgtataagaaaagtttcaagttcttaaatagtattggaatgtgtggtagaaccttagattcattgtacttaacaatttcgcttgttagctttgtaagagtaaaatacttaggaaggcttatttgtaatcagcaaatagacatattaagaaagaaaattgagtggtttatgaatagaatttaaaattttaaagagacttttaagttgcaaagtttcgcttgaaattgtttaaaatttagtagattttcaaacgtaataagatttgttagaagaaattaaaagcctgaagaactagattttttttttttgagacagagttttgttctgtcgcccaagctggagtgcagtggcagcgatcttggctcactgcaagcttcccttcccgagttcacgccattctcctgcctcagcttcctgagtagctgggactacaggcgcccgccaccacccccggctaattttttgtatttttagtagaggcggggttttcaccgtgttagccaggatggtctcgattgcctgacctcgtgatccgcccgcctcggcctcccaaagtgctgggattacaggtgtgagccaccgcgcccggccagaactagatttttgaatgtgaaattgtacctttgataaatcaaatatttatttttaaaaccgaagtttttgctctgtcgcccaagctggagtgcagtggcagtgatcttttatttatttaaaaataaataaaaatacttatttttaaaaccgaagtagcccatgaatactcttttttgtgcaaaaaaaccatttgtaatgtgccaaaaaaaacttcttccataaataaatgagacatgttataagtcattgatgttctgttaacttcgggaaagcaggctgtaatcttttccactttttgaagatgtatatgcctcaaaatcaaaataataccagcactcttagggatctgtggtagggctttttgataatttattatttcaaggtaaaaaacaaattatcccataagtttttaagagacttcaggtatggctttgccatccttaattatgattacctgaaacaaatt

SEQ ID NO: 913918 - DNA, 4001 bp, Homo sapiens
agcagagctaacaggggaggtgtctagggattttcacagctgctggtcatgttacaataggtagtgggacaaggagcccatccctggcccttctcctttgagctcccaatgactgaacatagtgaccaaccaaaaaccaggggttcttgggccatgggccgggtgaggcaaagttgtctggaactcatccctgttcaataggacctcatgcagtctctagtcaaggggaataagggatacagcacatgcacctcatcattcaggacacgtatcctaacttgaataataataataagagaaccatcttcctattcgtgcgctactctccttcctctactgaaaaggaaaccagcctttccagacccttccactgagaaccagcaagaatccacacctgccccccgttcatgaggtagtataaatggaataggagcaaattcttcatctccacagtaacacaaagtgcagaggacaggccatgagctagcagacaagaggaagtgggtctgaagacctgagcttccacaaaagggcaaacaattcagaacaactcaggaaacccaggccctgtgttgcctgaacttcctcatctgcccccacccctgttaaatcaaagccaacagctacctgaactgatggagaagccatctctagggagagagctgaggggctctgggctgtggcagttacagcagcccccagcctcgcccacccaggggctgtcactacatgctctgtcacagccaacccacccaacagttttctggctgagaccacttctccccactcctccctaagatctagaaaactccagtccaaatctctctgaacactatggaagggcaccttccaggtgcctgaagatatggcacagggttcaggcttgcctatcatcctcccggggccaccagcacaacatgatcccaccactccctacaaacacacaatgacgtgacctgtctccttctagaaaggatcaatccatccactctgtcctttctcctacacggtgtattcccccaggcatcttgttccacctctaaggggccgtcctccctaaacacagactcagggtgccatggccatccccaggtgtgatgtccttggggacatccagtcttccctccctcctcaacatcagccctatcaactgtccccggggcagtgtcaaatttgaattcctaaggagttgaggcatggcagactcagataatgcccccatccctacaggcttacctccatttgaagccatcccctcaggctgggcactgaccaccgctgtctggcagtttccgcaatgagaaaagccaagggtaagacccagagagtgacctggctcaccagatgctcctgagtccaactgaaacagggaaaatttgaaagtaaacaggttcctggaacataggaccccagacattctgcagagggggaggggcagtgggcagctgttaggggtgggggacattctgtgaagggctttggccattaggcaagaacctgagtttcccttccaactggaaggcagcagcagagatggcgtgtgcctctttaggcaacttttaaattgtccttctgactcacagcaaaagcttctacctgatggcccctttacttccattctttatcagcagacctacttttgtgccaatcaacccatgctccttcccactttggctctttcccagtcttgacgaatttcaacagcggcctcacttcgtgaacaaagttcaaaacacattttcagtctgagaaacacaggggttcttaggaaggcaaggggactgggtgtttgaaatcaggatggtctcagccgatccagactattaggtggctgtgtgcttatcattgtttaggaagcaatccttgtacccccaggtcatgcatgttgctggaatctctgtccacaccagcaggccagccttacgtcccagcccctttgctggaaagcctcaatccaggaaagagtggctatgtgacctacagcaccgagaccagaaatcctttcattttgtttcccagcatattgtgctggtgttaaatgtttatgttttatcttttgaatgattttaatttaaccaagcaatacttttcatggctccaaattcaaactgtgcacagtggaataggcaatgaccagccttcctcccatctcttttccctggccacattttctttcctggaggaaacaggtgttatctgattgtttctcatcttcactgaaacacaccctggctggcctctctcagctcactgttggcctcatcttcaccatacgttcttgctgtttggaatccagtgtcatcgcatgtggttctctgcatgggaattattgtagcctgtctttaaaaaaaacttcattctcatttccacactgagaatcactgtccgtttattagtgtcaaaatgataggaaagagcactcatgttctgtgttgtgaacaaggggagtattagaagaaactggtcaaaggagatgaggagtgagaactcagagcacagcaacaaaatcttctgagacacacaagtcactccctgctgggcagggtaattttgcacgatgggagggtgttggggaagggaagaggccttcagccagaccggtgcacactgcaaacattcactgaaacacaccctgtcggcacttacgaagcatttgcccctttcgaagacatttggactcaagaaggcagagttgcaggaaaaggtaacagcggccacactgcaggggcaggggcaggggcaagtggtggattgcaagtctcaagcccagggttctcccccactgccccagttgtgtgagaaggtcatttcctaactcctgtccaatatccccatgagttctcggttttgtcccaactctgaacctgaatggtccagcaagcatttctgtgaaatgtctccacagtggccactgggaggggagtgacctccatgcagtgactgtctgtctgggtgctcccaggccttttgtcctctgagacagaactgccttcttacatgcagccctcttctactgtgcaactctacctccatcttagctgagaagatcaacggagagcaattcaagcaaaatcatggtaaacttaccaaaacaaaacaaaccgtaaacactttggagatctttctgaggacttgatcttttaccatggggcaaacttaaatgattttcaatcaataacttcatctaagagggatgttgaagcaaaatatcatactcagatactgaagaagcgcagaatttttggttgcttcctcccttgtcaagtcagtcagctgatgctttctcaagattctcacacgtggctttgatacaggatttgaatgagtctttttctgagccagtgatacaaaaaatatattgtggaagtgtcttgtcttaattctgcaatcgcttctgtacatgtttgaagtcctagaccccaggaggagagacagtcaaattagccaaaggtaatttgtgaagactgaccattttaggtgttggctaaaagtcctccggcccctgctgtctgagcatccccacagaaagtcctgggccgcactgacagctgagaaagaatatctcagtgcttggatcccctgttcagaggacacatgctcttccacccatagaggaatggcggctccatgctgtgtcctgcagagctctcagtctctgcacttgaggccctgggcctgcatcaacgtgaaggctcttcagtgttatcacgtggagacagatgataggaatcctgcaaatgagcagaaaggatgtgacgattaaagtttcttctgacggtattacaaactgaagtcagtgagttccttctctactagttttttattgccaactggaattctgcactgtgttgcagagtcaggggtggggagcgtggaattgttcccttactatctgctgctttatcgactgaaattgatcaaggctacaacaaaaacatttctagaaatcatttgaatgcggtaggaaaaactctgggaatggagtcagaagaaagtatatt

SEQ ID NO: 913919 - DNA, 4001 bp, Homo sapiens
agcagagctaacaggggaggtgtctagggattttcacagctgctggtcatgatacaataggtagtgggacaaggagcccatccctggcccttctcctttgagctcctaataactgaacatagtgaccaaccaaaaaccaggggttcttgggccatgggccgggtgaggcaaagttgtctggaactcatccctgttcaataggacctcatgcagtctctagtcaaggggaataagggatacagcacatgcacctcatcattcaggacacatatcctaacttgaataataataataagagaaccatcttcctattcgtgcgctactctccttcctctactgaaaaggaaaccagcctttccagacccttccactgagaaccagcaagaatccacacctgccccccgttcatgaggtagtataaatggaataggagcaaattcttcatctccacagtaacacaaagtgcagaggacaggccatgagctagcagacaagaggaagtgggtctgaagacctgagcttccacaaaagggcaaacaattcagaacaactcaggaaacccaggccctgtgttgcctgaacttcctcatctgcccccacccctgttaaatcaaagccaacagctacctgaactgacagagaagccatctctagggagagagctgaggggctctgggctgtggcagttacagcagcccccagcctcgcccacccaggggctgtcactacatgctctgtcacagccaacccacccaacagttttctggctgagaccacttctccccactcctccctaagatctagaaaactccagtccaaatctctctgaacactatggaagggcaccttccaggtgcctgaagatatggcacagggttcaggcttgcctatcatcctcccggggccaccagcacaacatgatcccaccactccctacaaacacacaatgacgtgacctgtctccttctagaaaggatcaatccatccactctgtcctttctcctacacggtgtattcccccagccatcttgttccacctctaagaggccgtcctccctaaacacagactcagggtgccatggccatccccaggtgtgatgtccttggggacatccagtcttccctccctcctcaacatcagccctatcaactgtccccggggcagtgtcaaatttgaattcctaaggagttgaggcatggcagactcagataatgccctcatccctacaggcttacctccattcgaagccatcccctcaggctgggcactgaccaccgccgtctggcagtttccgcaataagaaaagccaagggtaagacccagagagtgacctggctcaccagatgctcctgagtccaactgaaacagggaaaatttgaaagtaaacaggttcctggaacataggaccccagacattctgcagagggggaggggcagtgggcagctgttaggggtgggggacgttctgtgaagggcttcggccattaggcaagaacctgagtttcccttccaactggaaggcagcagcagagatggcgtgtgcctctttaggcaacttttaaattgtccttctgactcacagcaaaagcttctacctgatggcccctttacttccattctttatcagcagacctacttttgtgccaatcaacccatgctccttcccactttggctctttcccagtcttgacgaatttcaacagcggcctcacttcgtgaacaaagttcaaaacacattttcagtctgagaaacacaggggttcttaggaaggcaaggggactgggtgtttgaaatcaggatggtctcagccgatccagactattaggtggctgtgtgcttatcattgtttaggaagcaatccttgtacccccaggtcatgcatgttgctggaatctctgtccacaccagcaggccagccttacgtcccagcccctttgctggaaagcctcaatccaggaaagagtggctatgtgacctacagcaccgagaccagaaatcctttcattttgtttcccagcatattgtgctggtgttaaatgtttatgttttatcttttgaatgattttaatttaaccaagcaatacttttcatggctccaaattcaaactgtgcacagtggaataggcaatgaccagccttcctcccatctcttttccctggccacattttctttcctggaggaaacaggtgttatctgattgtttctcatcttcactgaaacacaccctggctggcctctctcagctcactgttggcctcatcttcaccatacgttcttgctgtttggaatccagtgtcatcgcatgtggttctctgcatgggaattattgtagcctgtctttaaaaaaagcttcattctcatttccacactgagaatcactgtccgtttattagtgtcaaaatgataggaaagagcactcatgttctgtgttgtgaacaaggggagtattagaagaaactggtcaaaggagatgaggagtgagaactcagagcacagcaacaaaatcttctgagacacacaagtcactccctgctgggcagggtaattttgcacgatgggagggtgttggggaagggaagaggccttcagccagaccggtgcacactgcaaacattcactgaaacacaccctgtcggcacttacgaagcatttgccccttttgaagacatttggactcaagaaggcagagttgcaggaaaatgtaacagcggccacactgcaggggcaggggcaggggcaagtggtggattgcaagtctcaagcccagggttctcccccactgccccagttgtgtgagaaggtcatttcctaactcctgtccaatatccccatgagttctcggttttgtcccaactctgaacctgaatggtccagcaagcatttctgtgaaatgtctccacagtggccactgggaggggagtgacctccatgcagtgactgtctgggtgctcccaggccttttgtcctctgagacagaactgccttcttacatgcagccctcttccactgtgcaactctacctccatcttagctgagaagatcaacggagagcaattcaagcaaaatcatggtaaacttaccaaaacaaaacaaaccgtaaacactttggagatctttctgaggacttgatcttttaccatggggcaaacttaaatgattttcaatcaataacttcatctaagagggatgttgaagcaaaatatcatactcagatactgaagaagcgcagaatttttggttgcttcctcccttgtcaagtcagtcagctgatgctttctcaagattctcacacgtggctttgatacaggatttgaatgagtctttttctgagccagtgatacaaaaaatatattgtggaagtgtcttgtcttaattctgcaatcgcttctgtacatgtttgaagtcctagaccccaggaggagagacagtcaaattagccaaaggtaatttgtgaagactggccatgggaggtggtggctaaaagtcctccggcccctgctgtctgagcatccccacagaaagtcctgggccgcactgacagctgagaaagaacatctcagggcttggatcccctgttcagaggacacatgctcctccacccagtagaggaatggcggctccatgctgtgtcctgcagagctctcagactctgcacttgaggccctgggactgcatcaacgtgaaggctcttcagtgttatcacgtggagacagatgataggaatcctgcaaatgagcagaaaggatgtgacgattaaagtttcttctgaaggtattacaaactgaagtcagtgagttgcttctctactagttttttattgccaactggaattctgcactgtgttgcagagtcagggatggggagtgtggaattgttcccttactatctgctgctttatcgactgaaattgatcaaggctacaacaaaaacatttctagaaatcatttgaatgcggtaggaaaaactctgggaatggagtcagaagaaagtatattttg

SEQ ID NO: 913920 - DNA, 4001 bp, Homo sapiens
tgagaaaggaccggggtcaactacagcacatcctccacacacatccaaattcgtgcattcatcactatttgtaaatgtttgagatttgaaaggtcctcaagaactcactaaagggcataaaatatgcacacaaataactgtaataaaggcacgctatggggataatacatattaagacagctgctttgagggaaaaatgtcttttaaaaatgtttactatttaaagttatactggatttttctttgggggggggatgcaaaactaatcttaaacaccatgaaaaactgtaaacccaaaactataagcttttttttttttttttttttttttcgagacggagtctgtcgcccaggctggagtgcagtggcacgatctcaactcactgcaagctctgcctcccgggttcaagcaattctcctgcctcagcctcccgagtagctgggattacaggcgcgcaccacgatgtctggctaatttttgtatttttagtagagaaagggtttcaccatgttggccaggctagtctcaaactcctggcctcaggtgatccgcctgcctgggcctcccataatactgggattacacaggtgtgagccaccgtgccgggctaaaaataagctttttaatttaacgctcgtttttatgaaaagattcatctaaagacagaaccaggatattctaatgaaaggagtctattgttatttcacatggctaagagcgattgattacaatctaaagaacagttccggggttaactgaaagaactagcttatccacagaaaccctttcaatcccagaaggagaaatttagaatttggaaactgaacattagtcatttcttaaggtaaagccacttcattccaaagtcactgtctgttcgcccttaatttatcaccgtaatttatctaagaggtaaaactgaacaccgaaaaggtaagatgtagagtgacaaaaggagacggtgggtcacagggcgagtgcccaggtgacttcgggcctcagtcctctcgccagcaaagggcggacaatgacccctcccgtcccgcccgggaaggcgatcgaggaaacgcactggccaggcccatttactgatgctcagcagggtttgcaaaaagcccccaacgggaggttttcatgctgaaagtcctgttgcccccccatcccccaccatctaattaacctgcacgttactgtaaggaaggttctgcttccgtaattttctttatttcgacagaggctggagaaaaaaaatcataggctggaagaggggagcgatgggcaggccgatctgcagggcgcaggagcaggccgggaggacccagccctccaaggctgcatcagcgcccccgccgcgtgaccagggccaccggtttactgcacagctcccccgtccccagaacgcagcctccccgccaaccccaggaaccaagggtgcccaaaggcctcctacccggaaccccggggcgcctcggggtctctgggccgggtgggccgagtcctggcctccacaggccgcgagcgcagggggcggcggctccgcccggtctggcaggcggggctgccacatcctcagcctctccctgccgcccgcccgtcggccgctctgggctggaaccaggactccggcctgcaagccgtgggtcgccacgcccctgccccctgaagctgcgcgccggccggagactccagggcgcccgggtccgagccgcccgcagagtaaacgggccgctgaagcggggctcgttccccggccgaggcccagcgcgccccctcagccagcatcccccgaacccgggccgcggccaccccgcgcccgcccgcctcccccgccgctgtcagggaaccccggccagggcccgaaccagagccccaggacagcggcgcccagacggtacctgacagcgcctgaggacaaccgggtacacgcggcgtctatgaagcgcaacagtgacgccggagagtcactgcaacttaaaggctgattctgccccgcccccaagacaccctcgccgctcattggctggggcggagggcaggataccaatcgcgtgggtcccgtcctccgccccgccctccggccgcgcatcaaggatctttgctcctcccgcggattcgatccgcgctcgcgcctcctgagcccgccggcctgtacctgagctcaggcccctcggtcgcctcctctggcgggacgagaagagtccttgtccgcccttgctgacgagaagactgaggcccgaaaaggaaaagtctgttgggccccccactgcgcgggccgggtgtggctggaggccgagagacgtgaggctggaccgcccgccctgtgctcctggagggagggaccagccccagctctgccccagccacagctgcgggagccccatgcccttgaaccctgatgcgccgcgcggcttagttgtgcctctgaatccacctccaaaagtcgtcgctgcctatggaaaacacactgcccacctgttcgcagctgctgtcagataattgagtggcagcaacccactcacagtacagatttgcctgtggtgccctccacagccggttattaaattcagaacacaaaatagatattccgggacaacctcatgttagaatcggaagggacttggacttcacttagcccacaacaagatgttaaatattggaaaacagagacccagagaaggaaagcgacttacccagtcatccaacagtaggggcagtctggtcctgtgtgcccctcgccacccctctcagagggcaggcgctggcagctgccggcaccacactccattagaccacaatgaccagtcgggggcccagctggaaacagagggcacactccaatgtgaacatttcctaaaacgtggtggtgggggcccgtggttcatgcctgtaatcccagcactttggcagaccgaggcaggaggattgcttgatcccaggagttccagaccagcctgggcgacacagtgagaccccgtctccacaaaaaaaaataaaaattaatctggtgtggtggcacacctatgttcccagctactccaaaggctgaggtgggaggatcacttgagcccaggaggttgaggctgcagtgacctatgactgcaccactgcactccagcctgggcaacaaagcaagaccatctatcttaatcaaccaatcaatcaatcaatgtaggcaagtaaaccacaagggatggagaaataacctgggtctcatgcaccagcgagggccattatccatcctaggcccaacggcctccaagtggggtttccagaattccagaacccaaagagaggagtgtgggaaaggctatctggtcaccaaagtcatcagcaactgcatgggaaggagctggacaatgagcatctcctgtcaggcttccacatgggctgaagccattaggaggccagaggccaggggagccctttaagacagctcagcctcctgggacaaacagcagggtggaaaagggtggagacggggtaggggagcaattggaagacatccaacatacataactggctaagataagtcttagctaagcagaaagtaaagtccatgctaaatggtagggataagaaagtgatatgggtgcagagctgtgaacagcagagccagtatctgcagatgtgcagagcaagacaccaaaagggattcagtccccctgggctccatctgccctataccaaggtcactctctcagactgttgtggccatgggctctccagaactcactgagagcagaacattgccttttatttctttcatgttcctccacagcacccaatacaatgtgattaacttcctggaagttaggttattctgcccaaggggtcagaaaggaatggtttctccatggtcctgctctataaacctgggcaggtatgtggggccatgcccagctcttggaactcttatagagcccaagactcccgagttatgccttgtcaaggaggagcaggtgagttcaggagaggcacatgacacccaggatccaggggt

SEQ ID NO: 913921 - DNA, 4001 bp, Homo sapiens
tgcagaagatcattaagcaaggctagaatttggtgtgaattaatttcttcctgaagagatgagctatgaagaaaaccagactggaaaatggaaaactgtggaggaggttggctgccttccaagggaaaacacagaccatttccaacaataattaggaaataaaggtgtggcgaaaaatctgtacaaaaggcattagcataaggtcatccaaatatatttgtacatttaactggaaacaaacaaaaccttatctcattaaaactgtggatgcttgagattcttgactacttctaactcatagtttgttattcagaaggaccttgactggaaagcttcactcaaaatagcaaagaaagtttaaccaaacttctcaaatagcacagtaaacatgtggctatttgtgaattattacacagctacgtgaattatttaaatccaccccaaactatacttgttatatttttaggtaagataagcctatctctagtagccactattctaatacaaaaaaaaaaaaagaaaatttaaactttacatgtataatgccttgttgcttcaactgctatttctatttgagggcccactatatgccaggcactgttctaagccctgggattacaaaggtgaacaagacagatgatgttcttcctctcagggagtttataatattttgattctgcttaattcaaaagaaaacaaaccccctttacatatcaggaatcaaaagattccattacacagggttaagctccatttttacaaagaaacccagactttgcagaaggtgagtcacatgcccggaccaggtaagtggcacatttaggaaaggagccaggcctaggaatatctggcccagcgatctctccaacaggagcagggccaaagaaaaacaaatgagcatttttaagcatgaaagaccctaaatggaggtaaaaaccccagtacaaaagttactcccccaaacacctactaaaaaaaaaaaaaaaaaaaaaaagatttagactgttttttttaccttgcaaataaatgaactcatgcgaaggtccaggctaggtccctttcaaagcctgcagcagggaaggctctcctaaaagcctctaatcccagctttctgagactttgggaaagggtggcagatgcagcccagggcatcccagggtggctagccacatacctggcacctggcgggactccttcatgtccaggatatccctgatgtagagttttgcaaaggctagaaacacaggatccaaaccccacaagagggaaggggtctcctcttcacaccggctggatccaggctgcatcaagaggcagggctgtggcttccagctaactctgaaaggttctgcatcactgagtcaagcatctagatgggacacagaaatgaggatgcaatgcgtttaacgtgggtcaaagtggcacggccctgacgctgctcccaggtgggcgtccaggactccaggaggggtgaacgcagggatccagggccctgtcaaactccatgccacggggcgtgttaagaggcgttcctcacgtcaggacgcctgcgttccttacggctctcccgctgttctccttcccacaaagcaccaacttcggaacggctaaacatcaactttcactctgggaagatacgtctgtacaggcgtagcagaaaccgcttggggtcccgggaggaacgggcgccctcgcagccctgcacgtgttggggcatagtggatgggtctgactgtcgctctgccctaaactttccgcttttggggatgagccaagaaaaggaggaaaaaagatactaaaaaatggacccacttgtagcccctcccgccgcctgcagctccaggagccctgagacctggcccttccggcgctcggagccgctggcggcgacgaccccgcccggcgcaggagcagttggctgaggtcgtctctggagttccggcctgagcccgccccctgccccgccagggaccaaccccggtctccccgccagcgcatttcctttctgctgcagcgcctcgccacggctccgccccatctctcccgaagtcccgcctcatcccacccagaccccacccatcccgccgcggccacgccccatcctgcccgaagccccgccccatcccgcccgaagccccgccccatcccgccgcggcccaaccatccgctaggccccatccagccgaagtccagcccgttccgtgccccgcctcagcgcagcgtacttttggttcaggcagcgctgcagccccgccttcgtgctagcctccaccgctgaggcctaggaggcgaccttgaaattcctgcagttctaacgccgctcttctagtcacctttcacccctcctcctgctggtggcgggaccctgaacctgggcctcctagaggttgggtcaggatcagactatttttctttttgattcctgatatgtaaaacagataaaaagtaagcagtgccacgagtgcattgtggcatattttaaatgttcatttacagttggtaagtgacctgactcacacacttaggactctagtttcacttggagatgtcaatatctaaatttgagccctcgagtgaatgtgaggtcttgactctgccagagactagccgtgcaaaatcatgacaatacattttgtctcctttacccttgttcggtctacagtctggaaggttgtacacttaagaactttgaaaagctggcattttggtaaatcatggccaccttgatggtgcttagtctccagaatttctattttaaagtgaggaaagatagccacgttccactcccataaagagctacgttacccgagacgtcaggaattcttcctaatttacagagactctggaaaatggcaggggagtacagatcaccctggcagaccattcccgggggaggcaggtggtggccaaagagataattgctaaactatttatcagagaaggaacttggagccgctggaatggaaagtgtgtgtgtcattagacccatggcatttaattacctccccggccatttaagaagctcaaaaacaagagtccttggtaaaatacattgcccagattctactgcaatgaacactaggaaatgtagggtttaagatttaattaagagaagacactggctgggcgcggtggctcacacctgtaatcccaacattttgtgaggccgaggcgggcagatcacgaggtcaggagttcaagaccaggcaggccaatatacggaaaccaaccccctctctactaaaaatacaaaaatagccaaatgtggtggcgtgcgcctgtaatcccagctactcgggaggctgaggcaggagaatcgcatgaacctgggagacagcggttgcagtgagctgagatcgggccattgcactccagcctgggtgacagtgtgagactctgcctcaattaaaaaaaaaaaaaaaaaaagagagagagagaagataccttctcttataggaggaaggcccttgcaaagaaaacacacccagtaggacaggtgcttcctgctgacctgtcagatggggagagacaggttgagtgacattttcctgactgtacacatctgctccagggtgaaacccaaaggaggaaatcactactaagtgtcagagcctgagatgatttcaggaataatgctcatggcgctcaagggtagagtgttggataaaagagccctcctggactccatgcttactgccagccttgggaaggaccacacccaggtggtataagcagagcagaatgtcccaatgtcatcttttacaatgaagggaggactccttggagtctaagggtgttccttttgatctgagccccaaacctgaaggagtaggttgtaactgaaacctaaggtgaaatgtagaaaagaatttccagactgcagaagcatttagaggaatttgggaggatcctcttccctttagtctccatcaacacagatttcaggttccccaagccaccgcctggacgtgtatgaagggactcctaaaatcctcaacact

SEQ ID NO: 913922 - DNA, 4001 bp, Homo sapiens
ggggtcaggcagccagggtcccaactcctgttccacctctgactatcctagaggcctgggcaaagagaaggtcgtgccagcccagctggccactaggcccaggagctcctgaagcatcagggagaatcttctagagcatcaaaaagaatccacaacccaggacgctttatcatccccagtctatggcaaaggaaactagatatcaagaccatcgtcatgggaataaacataataggcaccgtcaggagcactgattctaggacagatactgtgctcatttaatcctcccaacatcccatggggtgggcactcatatcagttccactttataaacagagaaactgaggtgcaagaggctaagctggctaatctggtgagtgacagggctgtgtggggttccagcgactgtgccctgatcactgcagtcaatatgtaagccagatttctcttagcgatgcagttcccatcagctgagccagagctgctccctctgccagcgccactcccacccccacaggggaatggggcagtttgggccagatagggacaaagtctggctgtgtccagaatggcccggtgcaggaacactgttttataaacactaaacagtctgggttggccactgggcactgttgtgaccttgacccagcctggcaggagggcagcctgccacccacccccacctgcatcccagcagggcatgagggctcagtatctagagccagagcccaagccagccctactagttcctgcccatacagtcaaggacagcaacaaggagtgagagtcaggtgccctgtgcaaccccctgcccagtccagactccagcagagttgccctgggtatctcttgggggtctcttctctgaggacaaggtcacatagcatccccaacccaacctcagaacctcaacccaaccccagaaaactgccgacaccatggccactaagactcccacacacacaaccctgtctggggtgccctagtgaggactactccctaatgcacccattgcagagatcagtaaacagaggccgggaagggttctccccagagggccctccaagctgggcagcagcagagcctggattctctcagcagcaggtctactctgaccccactttctgagaagcagatgagcttttgctcagcaacaaaccgcaattctatttagttggggcctgttccaagacactggggaggggctgctagggcctgcttgagccaggtggccgaggggcgtcaaagggtctctccggttcggcgaatgcgtactgcagcctgctgtggcctcgggattaccccgtccccctcccacatctcccggggggcggaagaagcgcatcccatgcaagcagcgacctcaggccatgccgccctctctcaggcctcagttttctcatctgtaatcggagaccgcggttaaaaccgtctattaggctccttggtagtccgaagctgcctatgggtcccgccaggtgcacagcgctgaccctccccatcccccgcacagccctcgcagctccgggccctcccctggccacggaaggcgcggggcagtctgaagtcctcgggctggagaaacccaccgcgagcacccgctcctctgcgcaggaccctggactagccgggtggtacgcgcgcgatgggctgggggtcccgggggaggccacggccagccaaggtcagagccaaggtcacagtctgttcctcctccccctccccccggcggggccagactcagggctgcgggcagcggcgccccaggacccaggagagaggagctgtggggccggtccccaggacggcaggagaagcagcggcgcagggaccgggagggggcgggccgccgcgctcaccgggcgggcgggccgggtccgcgctgcagcgaggtccggaggctgcaggtcagggggctgcgcggaaggggtgcgcgcgcgccgtgccaattacctgggtcacgtgacgcagccgcccacgggcgcgcgcccctgagactccgcgcgtcgtgacgtctccatggatgccccgccccgctcctggcgctgtccacggtgctggcggcccaggcccgaggtcgcccacggccgaaggggggactcctctctgagaccgcagaacggggctgaggccctgaaccccgtgtgctcgtcctaaaactaggacgaatgtaccagacgacaagcagcctttgtgtgtaggagaggataggttttgttttgtcgtctgtaaaatgggaatgctatgaaaagttccactatcttagggatgttttgaaaaaaagatgagataatgcgtgaaaagtgcttaccccaaatctgatacacattttacccattcatcctcccactgatggtgacccaggctgtcctcaccaccccgtggccacaaacaaggctgcaatgaacttcttcatacacattcccttaggatcctgcgtggaactttctctgggatagagatcaactttctaattattatcagaatagcagatgcaatgtcctgttattgttttaatctgcatttctctggttatcaaccatttgcatctcccgttgtttgttagtttggggttttctgttgtatttttttcagctttctgttgggttttgttctcatttaaatgcagggatttcttgtataggaacataacatacctgtggttcaagttgccatcaaatctctcctggattatcgcagcagcctcctaactggcttctctgcttctacacttacactcttgaattttaatctcaaaactacagtatgcacttcacaagaatatattcaagtacatatcaaaccaattaatatggttgcttgtcgagggaggaggatggggaatgtggatatgaggtaattaatcaattacccagatcactgctgacagagtgccacgaagaaaggaatacaactaacttctgcacctgaagtctcccaaaagttctttatttggagacagttagggatacatgtggtcaagaatcttcagcacttaacacagcactatcatggtatttttcagtaaatatttgttgaatgaatgactgagtgagtaaatggacacttgacttggatcctgaaggatgagtaagattttatctggtgcagaagggcagggttcattgggaattctttggacacaagcaccaaaaatgacctggctagcttcagccgaaaacgagttgatatgaaggttgtatataaggcaactcacagaatcagaggaaagctgaaaatttacttcaggaagcagggctgagccatagaggaactgtctcttcaaggctcttctgtttttcaaaattcaaattccgggtgagaggcagtaatgtacttgcagtagagacggagtaaggtggccagatttgagagacttacggggatcagctccacggggtttagtggttgaccagatatgagggtggagacatagataactcacaggtgtctggctttagtgacttgggcacagtggaacttctcagtgagctagggaaaaggagaagctgcagtttggggtaatagtggaaaagtttacaagtcagagtcaccgattaagaaagatggaaagcctgacacagagcagcaggcaggaacaaggctcttgcaaatcaaaaggcttcagagcctttcagccttccagcctaattggtgttctgctaattgcattgattaaagcaaacatttggggcaatcaacgctcccatgagggtggctgccattctcagaagcctgagaggattagtggcagtggctgtaggctttgcagagatcttcagaaacagacacctttctttttttcccatgcctgtggcgtgtgtgtgtgtgtgtgtgtgtgtgtgtgtgtgtgtgtgtcagaacatggaagtttttatttattctagttgtacagaacttaaatgatacagaaggatacagaacaaaatgtgaaaagcccccttccacctgccccaacctcacctcttttttttccttccagagataactactggccagtt

SEQ ID NO: 913923 - DNA, 4001 bp, Homo sapiens
tcctgctccatcctcttccatcctcctccctcatcaccccactttgcttccccctttctcatcccttcttttcctcttctctcacttcccctgtcctctcagggcaaacaccagctctagttcccaaagttccccctttatcatgcttctggcattgagccaaatatcatccttgaggagctgggggttggaggaaaagatctgggaagggcgatggtatatggaaagaatggggaatataggaggtactagagggagaataggtaaggagaagggtgggaagaaaggggagtggagattttcgggaggacaactttctgagcgacccttgggttagttattggcagcagatagggggtgattaatgacaggtagctcaagcatattttttggaatagttttggatttacagcataattgagatgataggacaaagagatcccacataccccacacccagtttcccttgttatgacacgttacctttagccatacatttaccacacattggcatggtacctttgtcacattaatgacccactattgatacctgattattaactcaagtccacacttattcagattcccttagtttccacccatatctttctgttccaggatcccacattacctttaggtgtcaggtctccttagggtctcaaatcaccatttttatttttatttttatttttttgagatggagtctccctctgttgcccaggctggagtgcagtggttcgatctcggctcactgcaacctccacatcccgagttcaagtgattctcccgcctcagcctcccaagtagctggaattacaggcatgcaacaccatgaccatctaatttttttgtgtgtatgtatttttagtagagacggagtttcaccatgttggccaggctggtcttgaactcctgacctcaggtgatccacccgccttggcctctcaaatgctggcattacaagtgtgagccaccgtgcctggccacaagcctatttttaatgtgtatcctttcaggtactagagcaaccatgaagaaataagccagggtcaattagatactgagctactcaaaagtgtcaagaaggatggttctctccatctcacccccaccctctgttccagttagtactcacattctactagaaaaagatgcaagagagaaatctgttagtaactggaattgaaacttttctttgcctgactggccagttttgcaccaagcctgaggagggagacaatttaagattcactcgatctgtgcaaaaagtcttattttctgacataaagactaatgagtttggtttatccagatctgtgccccccatggcaacagagctttcagtcccttgccttcattaaagaaaaattctatgctcaactttaatttttttttttttggctcttcaagttggaactataaagtgcctagaacacaaagaagatagaattatttttacacatactccaggaactctttagctagtgaaagctgtgggatatggcagatccatggaaattttggagtccaggcaagaggctaaatggaacatgtaacagaaattctcgggaaatctattttcaaggattattagggacttttcttacaagattctagagctagcatttaaggtactggaatctagttcttaatcatctgtacattatagcaaattgccacaacaaaaagtgcattgtgccaagttcttgacatgagactcacccacgggtgacacggaggtgcctgtgatgaagaggcaggtgagaagcaggaatggaggcatccttctggaccaactgccagaaacactggaaaatcctcttaatactggtgttcctttgtccccttctctttcaagcacttttttttttaaggcctctaggctctcacgagaaagactttatcagcactggtaggggctttatcagaggaagaggatgaggatgagtgggataaggtgtccacagctctggccttggccccagagagaagcactgctttacactgtcaacagggttcctttattaatagttttctttaggaaaaaaaaaaaaaaacacaactcacaatccctcatcctcctattgttttctctcaagaattccctgcaatgaaaccccagtatcttatccagaagggaattctaaatgagggacatcccttcacgtcaaattcttgctttgtgacttctaggaattgatttcacaatgttgcagccatagcactgcacactaaacgagaatggatgaagccaaatcactgcaactgtcttggtcagatggttgaggagcttataatagcacacaaaacaaagtagtaaggacaggtatgagacaaggacagtattctcttgaaataagctcctgagtttgttttattacggtctttggcctcaaaacttctgaaagaaacaaggtttaaattgtgtttttactaattcaagcagcaatacctcatatttttattgtctttactcccaaaattaaaaaatggtttaatgttatttatttcactaattctcacattaagatggggtaggagcttaaaattagaaactactcattaaattaacactctggaaaattaaatgtcaaaatttcctgaagtttcacttttagacaaaggagagaaaatgtgcttcttagcacaattttttttttcagacggagtcttactctgtcgctcaggctggagtgcagtggtgtgatctcggctcattgcaagcttcgcctcccgggttcacgccattctcctgcctcagcctcccaagtaactgggactataggcgcccaccaccacgcccagctaatttttttgtatttttagtagagacagggtttcactgtgttagccaggatggtctcgatctcctgacctcgtgatccgcctgccttggcctcccaaagtgctgggattacaggtgtgagccaccgagctcgggcaatcactggtttttgacaatgacaaaagtacacatggtctccagaagcacagggtttatggtcaagcaaggggtttccattgatctaaaattgtagttagctacttcattactaacatcagtgggacacaggcaatttgaccattaacttattaagttgtggtttgatggcagcaatggatgactctgctgtctcattgcaggatagtgttgctaagtatcagtgctttaaacagaaaaaacaatcccccacaacttcctgcgcctaggaagccatctgagggcttcatatgtgttgcagagaaacagaggacgtgtgcatgagataaacccagacttgttgccaggattgattgctggagtcaaggactttcaccagatagcctttggttctgtaaacaagaattcccaggatggtaagatgttttttcccccttatttctattttttcctttttagttgacctgctctttcattttttactttttatgatgaaaaatttcaaatatatatacaaaagtataaagaacaataatgaacactcagctataataattactaacattctatcaatttcatttacataccagtatgcatttctaacacattgtatttttttacataatcatgatgcttttattacaactatgaaaattagtaataattccttaactcatatccaatccatatttaaattgctccaatagttccaaatattccttttattgctgggttgagtcaggatccaaacaagatttatatattgcattttgattgtcacttaaatttatttttatcagctgggtgcagtggctcacacctgtaatcccagcactttgggaggccaaggtgggtggatcacctgaggtcaggagttcgagaccagcccggccaacatggtgaaaccccatctctattaaaaatgcaaaactagccaagtgtgatggtgcacgtctgtaatcccagcttcttgggaggctgagacaggaaaatcacttgaacctgggaggcagaggttacagtgagccgagattgtgccactggactccagcctaggcaa

SEQ ID NO: 913924 - DNA, 4001 bp, Homo sapiens
accaggcttggctaatttttgtatttttagtagagacgggggtttcaccatgttggccaggctggtcttgaactcctgacctcaagtacagatctgtcatttataaaggtctttatcttctgacttcctaggagctccttggatcccaagtattcattttaaggccacggttaacttgtcaagctcagttgtgactttcaacacagttccagggagctcaggtgaatccctcagcttaaagcttttgtcatgcagtggagggcatttttaggaacagaaagatgtgcctaaatagaggaagaaagtttacagagggtggggagcccatctgtttgtttcttagagccttttcttagtaattctgggccagagccaccatcaactctcagaaaaaaatcacctgaatgactcatgaggatttctctgactttacctggaaatagttccttcttaggtaatgatatgaaaggcagaaaaagagagcaagttcttccaagaaaaataggcagtcagagctgggatacaaatttttttggtgttgacaattaaaagttgttatggagcattacaaagttttcataaaattaggttgaattactccaactccttctaattgaagtacataaaaaccttgttttgtattattttttgacttagcacggtctgtgatcaatcatacctgggaagattaaacatttaaccactgtccaagtttactcaagaaatattttccaagttgagtaaaatgtcctgggttttgttttcaacactggaggcatcctccggtaagaataacagtgactctctcctcaagatgctttcatttgattgaaacctctagatgctttcatttgattgaagtaccagacgagagaagagggagagtgggacagagacaatactccagagataatggcttagatttttgtggaactgatgcatagtactagtccaaagataaaacatgcccagcaaatgtccagcagaatagattacaaaaaaagcaatctttatagagatgcattacaatgaaactgcaaaaccaagaaacacagaagaaaactattaaaaggagccaggaggtgaggagaggtggggatggactcacagcaatgcaaaaacatggaagagaatagaatgatatcttcaagtactaagagacaagaactgccaaattagaattctatacccagtaaaaacagcttttaggaaacagggcaacataaagacattttcagacaagtaaaaactaagtttgtcaccaggagacaatttttaaagaaacgttaaaggatatactttgagcagaaagtaaatgatcccagatggaagataggagatgcaaggaggaatgaaaaagacagtagtgagccgagattgcaccattgtactccagcctgggtgacagggaaaaactctatctcaaaatttaaaaaaaaagaaagaaaaaaatatatatatataaaattaaaatacaaggcaaaaataatgtcaaagccaggcacaggcaaacaaagttccttacattatctgtgaggttttactaaatttagactgtataaatatgcatgccttaatttctcaggctagcccttagaagaatagaaacagactgtaaatcatccaaactggaagagaaaaatgtttatttaatcaaaaagagaactgagaaaaggcaagggaaagaaacatagaacaggtaaaacaaataaaaattgaatacaagatgacagattaagccccagataccagtgattatattatatataaacagactaaattctctagttacaaagcaatattcgcagattagattaaaagataatccaactataggctgtgcatatgagacatatctgagaaggtattactctatgatttttagataatttaaaatataagatactcacttgccaggctttgagatgaactctgagcagacaatctgaaagatgactttctttggattgccaaagaaagagaggacacaggaaatgaggtaatctcagaacattatgaaagaacaatgaaaacaacaaagcaggaagaatgacatgggctgtggcccagaggagacacaatgtaccatctattaggaaaataaaagaagttaactaaactggaaggcaaggctggtgcagtggctcacaccagtaatcccagcactttgggaggctaaagtgggcggatcacctgaggtctagagtttgagatgggcctggccaacatggtgaaactccacctctactaaaaaatacaaaaaattagctgggcatggtggtaggcacctgctactgaggaggctgaggcaggagaatcacttgaacccaggaggcagaggttgcagtgagcctgagatcacgccactgcactccagggcaacaaaagcaaaactctgtctgaaaaaaaaaaaaaaaaagaagaagagaatccactggaaggtggaaaaaggtgaattgactttcagaattactgactagacagtaaaatcaagttaagaggctgttttagacatctagatgataaagagtgatacctggccttataatattagcaaacacataacactaaggaccaagcacccttctaagctttcaatacctattaagacttttcgtgttttcaatcatgtaggcattattcacaagaataattaaggtattatgtcccctattttgaagattaaaaaaagctaaggcacagagaggttaagtaactgactaaaagacacgtggatggctggacgcggtggctcacacctgtaatcccagcactttgggaggccaaggcgggtggatcacaaggtcaggagactgagaccaccctggctaacatggtgaaaccccatctctactaaaaatacaaaaaattagctgggtgtggtggcgggcgcctgtagtcccagctactcgggaggctgagccaggagaatggtgtgaacccgggaggcggagcttgcagtgagcggagatcacgccactgcactccagcctgggcgacagagcgagactcctccatctcaaaaaaaaaaaaaaaaaaaaaaaaaagacacgtgggtaggaaacagaccagagggcaaatccaagtagtctggttccagaaactatgcttttcacccctaatgcattctgcctttgtgctaatgtggaggagctaaggatgaaaagaaggcttgggttcttcagccactttgaccatgaaaccagtaggaattgataatttcttagatatggagactgtgggagagggaggaagcaagtatgatgtccaactattttatagcacaacagagtgactgtagtcaataataacttaattgtacattctaaaatgactagaagagtataattggattgtctgtaacacaaaggataaatgtttgagagggtggataccccattctccgtgacattacattgcatgcctgtattaaaacatctcatgggctgggcacgctggctcacacctataatcctagcacttcaggaggccaagacaggtggattgcctgaggtcaggagttccagaccagcctggctaacatagtgaaaccctgtctctactaaaaatacaaaaaattagctgggcgtgatggcgggtgcctgtaatcccagctacttgggaggctgaggcaggagaatcgcttgaaccggggaggtgaaggttgcagtgagccgagatcacgtcattgcactccagcctgggcaaaaagagcaaaactctgtctcaaaagaaaaaagaaaaataccatgtgtatttgttgtatttgtgcctggtaccattcaggggttgggagttgtgcatactctcctcaaactcaattaccgatgcactgaaagtcagtggtttgcaggtgaagagtgtaggatagagtcctgagaatcactagcatttaaacaccaagcagaaaaagagaagctgacagaaaagttagatggagatgccagggaaataggaggacaaagacgtaactgggcctctcaggaagagcccagaggatg

SEQ ID NO: 913925 - DNA, 4001 bp, Homo sapiens
gtgctctcatggagagaaaaacatcgcacaaattagggtggagaagaatctgatgcagtgcccttcagagacacagctgagtgggatgatgcaaccctgagcttggagccacctgatctaaattcgagcccacacttagccacttaggagctgtgtagtcttggataagtcactcaaaccctctggtctccattttctcacaacaaatctattctccaaggctcagttttcccattctcaaaatgggatactattaacttgccttgcccacttcacaagggaataccgtaatgtcatctgtggcagctcctttctcccaaactgtaaaacaccctctgtgttttagggatcacgtggtagcatattctttatggcctggccagcacagagctaaggataggaaagttcttgtggaatggaattgcaagcatgagttagtgatagtcaaagtactagaattggatacaatgcaattattgcttactgctagtctgagcactatgcagtatctacacaatgattctgaaggcattttgggatctcagtggctgaacgtccttcattataagtttgcagtttgtgagaggaaggaggaagagacaggataaaaacttactgctgttgaaggtgtgctgggtataagaccccatactcacaacctccccatgaagggagcactattattcctatattatacctgtggaaactgagaccaagataggtttttgctcaccagcttttaagtggtagagatcaggttagatcacagatctccctaactccacagactgagctctactccttttaacaatgctttttgtaaaaaaaaaaaaaaaaaaaaaaaaaaaaaattccacaagaaagtgagattacacaatattcttctttttgtgtctggcttatttcacttagcataatgttctccaggtccaaataggacaaacatggcaaatggcagggtctcctcctattctaaagctaatattcagttgtatatatacatataaaccacagtccctttatccattcatccactgatggacacctaggctgtttccataattctttagtaaatcacagaaccctcttgttttctcttctaacttagcaaacttcatttgattgagtcacaacaaaatatttatcacaagtaaacaagaaagatggaaaatttctgatcaatgatgaccatccatgttgctgatgatggaacaaaaagccagattaaacaagtaagacagataaaatcgttgattagatccattgcttcaactagaaagggaacataggtgaaacatctactctgtactcttgtatgtggggttttaaaaacaaaccttaataccaaaatgaaagacaagatcagcaaatattaggtgagaagtttaaaaaattattggtattttgcatataggaaaataatttaaaataaagtccctttacttcattgtacatttaattgaatttggaggttttttatagtaagaaatgaaagttcgattgagaagagatgccagctttcactcaccatttctgacagtctcccaggaaccttcttcgtacactgcctttggtaagctcctttctcactggctttattggcttgtgtctttcatttgtaggaacagttaactgacaaagctgcagaggcaggctgagaggtggctccaagagaaccctggccaagccatttatggtcaggggagtagccaagccctcagtccatccctcgggaaagatgggctgctgctgcatggccgacgtgtatggcctggttcacccaccctctttgccttgattttctgtccttacttttcaggctgctttcttggctatacctccatctcagcaaagaagccacagctggcctgagagcttgggggcttctgcagcctgcagccctttggaaacaatgggttacatgaggctgaggctggccactccatccccagctgacgggagtccacattaaccatgttactgataatgatggagtcattgtgttacatggacaacagcatggacattcgggatgtctggaggaggggtgggggcccattctgttgcaggagtcacactgctgggggctccagctgctgcaaggtgctgcactcagtggccaatgagctgcctggtgtgagttcagcctcaccccctctctgtttttgtattttgggtgggaagctctctagacctggaggaagccatggacttgggctgctttataacttacaatttccctgttagggatttgcctctttaaaatggtgaatgagttgctaataaaacaacagaattaaaccaataatttggccattgaaatgaaaaccactgtgagaggagcagataggagtgtaaggagagagcgactcaagtgacagaggaggccgttgtttagatgactctgggagatggcactgaagctgtgcgtgaaagatgagaagagggcagacatgtgaagggttgagggaggagagtcccaggcagaagccacagcaaatgctaagccctgtaagcttggtgcactcccagagcaggcaggaggccggttggctggaacaacataaaccagggagtcacccgggaaggggctaaggacggagtgagtttgagcccttttgatgtgacatgggagggcatggtaagattttcatccttagatgaaaccttttccaagggtttttcagtgggagagatgcatgatgtaattgctggtgacgaggattgctagggcttctctgtggagccaagattacaggggaagagagtggaagcaggtggctggctagtggagtccaggtgagcgatgaaggtggctgctgtaggaagacagcagtgaatgattgtgctctctactgtggaggtggagccactgggattaaatgatgaaaaaaatatggggcggggaagggcgaggtgagggaaagagaagaataaagccaactcctgggtttgaggcttgactaacaaaaatggagatgctattagcttaggcaggtaatactggagaaacagattgcccttacacctgagtagcctaggggctgtccaagtgtgggtgccaagtaggcgactggataaaggggatctggggctgaagacatccgtttgggagtggccggcctgtggatggttttaaagcccccggtgtgcatgagcaggtagacagggcagagggccaggacagctgccaggggttcacagacatttagcagcctggaagagggggtgtcactagcaaggagagttgagtgaggcaggaaaatcagataagttcgggggtcacaggaaagaaatttgattcaagaaggggagtagatgttggttaattgtatcaactgctgctgagaggtagcctccgaagaggtcagaagagccttctgattcccagtatcggggttgctggtggccttgacaagagcagtttagtggcacagtggagaccagattgcctttaatcaggtggtttttccatcctggttgcatacctgaattacctagggagtggtagggggctggttataaaaactcttgatgcctagaacctgcccccagagactctgacttgattgatcagagtgaggcaggggcatccccaggggacgctaacgagcagtcaggggtgacagctgctgttctaatcagttcttagactgtggtaatcagccacctgcaacatggccgacactgatgctatcctaaacaagaccaatgaggcctctgccttgtgggcttccagtttccaagactccacagtgacagcctaaactgaacctactggtgacaacatggtctagagagacctctgtttagagccacagctgccctactggaagctgcatggtcttaggcaagtgaaataacttcttccagtctgagtcttttaatctacaaagcagggatgatacaatttatgcaattagactacttgaatcagcacagctcgtacaaatgatgcttttaattttccttgactggcgtagaatcaacctggaccatag

SEQ ID NO: 913926 - DNA, 4001 bp, Homo sapiens
gtgtgtgaggggtttatgtgagttctggagacctactgtaaattctgcactggtcttctctgcgttgcctggtgaatgggggctgctgtacttactgtgttcgccggcagggtgaagttcagtgaaaaactctgcaagatagaagtaaacattaaagctcccagggatggtcagcaagctccttcctcacttcctcaaactcactgaccctggtggattccgagaggtcattgatcctatagactcagccagcccccatcgtcctgcacagtcttggccccaaaagaaggaaggggaggcaaggagcctgtcatgagttcctccctcagcatcaagtcagtcttgccaccgcccccaaccaggtcctcgaccaggatcagatgaagaggcagcctgcaaggctattgtctgaggggtcccattcacaagggcagcaaacacatgactagaaattcagcaaaaggctaaaattatgtttattccctctagaactcctttgagacagaaaactgttgaatttagaagtattttgtgttttctccttggagtagaaggtaagacccccaaagggcatggtctaacaagaacacctgatccttacccggggaaggcaaggcttctgtttttgctacaactgaggcagaggttctaggttgctggagctgaagtggccaggaggacaggggaacagcaaacccttctctttcctcccctcacttagtagatggtctcacctctcccgcaaatatggagtccaaatttaaagatcgtgggctcagtggagcaccaagtagcctgcccagggcctcaggtggctcctttctcctccctgtccctagcccctgttactctagcctttccaggctgctccttaccaagtcctttccctacctagattggaatgatgggtggacctgttctgactcagccagtgaaactattttcccctctttccctgggtggaagtggtcttgttcccactttctggactctcagccccttgggtccagccaccctggattaatacctcctggctgggccctccttcagcctcggtctccctgacccccagatatttccctgggcttggtctacaccacagcttcccgtctttccagcatcccaagaccagattctgtcattgtagaaacaatgcattcattaagttttaaaattaaatgttatccaacaataggaaagttgtgaaacattaaagaatccaaaagaatcatgtttcacacctgaattacctgaaagatcatctctctcaaaaccctcattttccagcagaggaaactgaaacccagggacttatcagaaatcacctcatggacaaatgagaacagttggagccacatagaccagccaatgggccgcagtctatgtgactcaaccccaacccgaaagatggtaacagaggatctcatcccaacagaagcaaactgacaaaacacctatttcagctgacttactgatggattggaattcagatgggttaatgaacaagaaaatcttttgtgaaccagaagtgttttaagcacctagaatgtgtaagtccccctagcttttgccccaaatattatgtccttcaatcaacgtggccctgctcaactagcacgcttcagtggtgcctctgctcacttctccccctcttggcaataggacacccgcattttatagagaataaccaagcctcaagaatttgaacaggtttcccaagtccaaacaactacttagctgtcaccagaacctgagtgtcccggtgacaacctctttccaccactctgcaaggcttccaagcaactccagtagtctctgtggatgaatcagagcacccaggctgacagcactgtgcacctctgcttctgggatgacggtggaacacagggacgtctgggcctcttaggtcagggtcctcttgctcaagggacctaaccactgctcttcacgctagcaccagaccaacacgtgctgcaaggacactggatggtcgctgcactgaatgcagctgcccagagctttatctcatcagtgggcactgaggactgatgtcagcagccctaagacaaagcttcctttgggaggacagtagaagagggggtgcagcaacaagtgggccattgcatgtgttgtttatcaacattcggatgacggagattttggccaatttcagaaagacactcatattttgtagaaacacagtacagtgctctcatggagagaaaaacatcgcacaaattagggtggagaagaatctgatgcagtgcccttcagagacacagctgagtgggatgatgcaaccctgagcttggagccacctgatctaaattcgagcccacacttagccacttaggagctgtgtagtcttggataagtcactcaaaccctctggtctccattttctcacaacaaatctattctccaaggctcagttttcccattctcaaaatgggatactattaacttgccttgcccacttcacaagggaataccgtaatgtcatctgtggcagctcctttctcccaaactgtaaaacaccctctgtgttttagggatcacgtggtagcatattctttatggcctggccagcacagagctaaggataggaaagttcttgtggaatggaattgcaagcatgagttagtgatagtcaaagtactagaattggatacaatgcaattattgcttactgctagtctgagcactatgcagtatctacacaatgattctgaaggcattttgggatctcagtggctgaacgtccttcattataagtttgcagtttgtgagaggaaggaggaagagacaggataaaaacttactgctgttgaaggtgtgctgggtataagaccccatactcacaacctccccatgaagggagcactattattcctatattatacctgtggaaactgagaccaagataggtttttgctcaccagcttttaagtggtagagatcaggttagatcacagatctccctaactccacagactgagctctactccttttaacaatgctttttgtaaaaaaaaaaaaaaaaaaaaaaaaaaaaaattccacaagaaagtgagattacacaatattcttctttttgtgtctggcttatttcacttagcataatgttctccaggtccaaataggacaaacatggcaaatggcagggtctcctcctattctaaagctaatattcagttgtatatatacatataaaccacagtccctttatccattcatccactgatggacacctaggctgtttccataattctttagtaaatcacagaaccctcttgttttctcttctaacttagcaaacttcatttgattgagtcacaacaaaatatttatcacaagtaaacaagaaagatggaaaatttctgatcaatgatgaccatccatgttgctgatgatggaacaaaaagccagattaaacaagtaagacagataaaatcgttgattagatccattgcttcaactagaaagggaacataggtgaaacatctactctgtactcttgtatgtggggttttaaaaacaaaccttaataccaaaatgaaagacaagatcagcaaatattaggtgagaagtttaaaaaattattggtattttgcatataggaaaataatttaaaataaagtccctttacttcattgtacatttaattgaatttggaggttttttatagtaagaaatgaaagttcgattgagaagagatgccagctttcactcaccatttctgacagtctcccaggaaccttcttcgtacactgcctttggtaagctcctttctcactggctttattggcttgtgtctttcatttgtaggaacagttaactgacaaagctgcagaggcaggctgagaggtggctccaagagaaccctggccaagccatttatggtcaggggagtagccaagccctcagtccatccctcgggaaagatgggctgctgctgcatggccgacgtgtatggcctggttcacccaccctctttgcct

SEQ ID NO: 913927 - DNA, 4001 bp, Homo sapiens
acacaccctccacagaggatgcacctgggtctcaattagtgccagtcagtcaagtctccctggaccatttttggccctttccgtgaccttcaggaaggtctgggcctgagatcatcgaaggcatggccctgccctccttgcctagcctcaacagtgccctggccagagctagagtcaacattcctgcctgcattttcttccctgtctgcatggctgccaccctcagtgccctgggcccagcaccaccaaccaggcacctgcagaaggtatagatgaccgtcaggttgcccagcatccccgtgagtcccaccagcaagatcactgtgcccagggtatagtgggcatggtctggaacatcaaccgtggggagggggacccaggcagcagcccaagtcccaggtgcctgcggagagacagagaaacgagggaatcatgttatcgcttgtcaccttcaaatagtcctgagaaggaagagttaggattctcaacagggcaggtgggaaaactgaggctcagagtggcaaagccagttgcacacacagctcacaagtggccaaaagcagaagggaagtgcaggtcctttctaaagtccagcccaagctcctagaacatggcacaggggccttctaggagtgggctcagatcacctgctggaggctggtaggacagacagacatgtgactggcaagcagggacatggccctggtcaccctatctttccttagggagaagacagagccaactcctgggtgcatccctgcctgcagtatggactccagcccaagggcccaagacagtttttgaggcctctagacgctggggtggtgagtcgggtggagcccctctcaagagtcccgtcccctactgagccttagaggagaagctgcattgcccaatagcatagctgggtacagctaaccttgatgcctggcatgaaaatgaagggaattccctttagaaagaaagcttaggcctcccagggtcactgaagggaggtcatgaccatatcaggtcaggacaaagggatttaaagactcctcccaccctaacccctttctggggaagagagggtggcttggtctctgtcctgccgcagtggcccctatagctaccggagccttcccatcctgtccagcacctgggccagcatccccaggtcctgagggtgccctcggccttccccaggtagcagtggtgttgatggaatatggccctgggcctgggctaggatgatggaggtggcagaaggcacccaaggcttcactgtgggcttggcagatccagaggcccagggtgtgccctcctccctggagggctccatggggcatccgagcaacctctgaaaggaatgagtgcagccaaggacaggtctggccattccagccccttgtcctcagggctggcatttctgttccttgaatgctctccatgaggaaggacattgcctgcaccctcctctatcagcctgtttatcaggggcgggctcagagaggtccagtaatggctcaaggccccacagcagagttcagaccttttctatctccctgtcaaagcccctgtgtgtggccaggaggggaccaggaaggggtcagggaaggctctgtgcatgcacatgctcgcccaggcttactgtgggactgatggatggaagccggcccaggctggagatgctgctctgggagctgtcccaccagctgggtggtgctggggtggccatgcagctgggctcttgggttgggctgggcgggactcttggccccgaaggagggttcatcctgagttgggatggtccttgctcgagcccacagagaagtcaagggcacagggagctcaggacttcagctgtgctcagcctcccaactttcctccatcctcagcacccctgcttagcctacccgctgctttctcctgtgtccggcgcagatccagcctggagctgctcttggggctggcggttgctctgtgtctggtgaagcgcaaatgagtgagtgtcgcagttatggtgactcacagccacagagttcatccccatctttatatagcgatgtgggagctgcacatgctcagtcgctccatgccgccagctcactcagaccaaggtctctgggtgtctatctacgaaggtctgatgatggtggcgtgaatgtgtatgtgtgagtgtgtgtgtgtgtgtgtgtgtgtttcaagggagacttctggaatgatggtggcatgaatgtgtgtgtgagtgtgtgtgtttcaagggagatttctggatgatggtggtgtgaatgtgagtgtgtgtgagtgtgtgtgtgtgagtgtgtgaaagtgtgtgtttcaaaggagacttctgggatgatggcgtaaatgtgtatgtgagtgtgtatgtgtttcaagggagatttctgggatggtgtcatgaatgtgtgcgtgtgtgtgtgtgtgtgtgtgagggttcgtgagtgtgtgtgtttcaaggaagatttctgggatggtgttgggaatgtgtgtgagtgtgtgtgtgtgtgagtgtgtatgtgtttcaagggagatttctgggatgatggtggtgtgaatgtgtatgtgtgtgagtgtgtgtgtttcaagggagatttctgagctgacagtggtgtcaatgtgtgagtgtgtgtgcatgtgagtgtgtgtgagtgtgagtgagtgagagcatgtgtgtgtgtgagagtgtgtgtgagagtgtgtgtttcaagggagattcctgggctcgggctcttggacattgggcagaaggctgtgtcctctcctttgaccagtctctgttgtgtttcttccctgagctcatcaagagcagcctcagccatcccaagagcccccagagctgtttgtgggcagctgagcctgtgcagcccagcctcacccttgtcacagtgggccctaccaccatgtttggcccccatgagccatggcattttcacagtcaccctgcatagaaccaaggctggtcaccctttcacagatggagacacaaggaggatgtagcagtagggtgagatcagatcacgaggcggcttttgcttgttttttgataagaaagttttatttttttatttttattttttttgagacagtcttgctctgtcacccagcctggagtgcaatggtgcaatctcagctcactgcaacttccgcctcccaggtccaagcaattctcctgcctcagcctcccgagtagctgggattacaggcactcgccaccacacctggctaatttttgtatatttagcagaggcaggagttcaccatgttggccaggctagtctcgaactcctgacctcaggtgatccacccacctcggcttcccaaagtgccaggattacaggcgtgagccactgggcccggcagaaatttttaaagtataaagattttttaaaaccttattgggagagtcccaggaactcacccaggcctgcaggcctgatccaagttgactggatgtcagaagtggaggggaccccgggcctgccccttgccctgtcttagaggaggcagcaggagctggagagaagggaagctgaacacacggcttccagggagggctgctcgggctaggcctgccacagaggctgcgtttaggggagcccgaccgggcagcggtcatcctaagtgggggccatgtcctggcacagtgctgggagtgttggagccctggagtggacagagatatcactcctcttccagaagttcccccagtctttacaaacagttctcctggagccccaggtttgagcaggagaagtgggagcagcctcactgggagcgggagctgtacttcctgcagctgccagcccatggctcagactgccttcctcctgaggctcttccacttcagggctttggctcacagaggccaccctgggggcagggtgaggctgaggggccggcttttctttctgtccctaggctcaatgccagctgcttgcgttttaatgtaggggtttaacaattcctcacagctgggagcaattctgagtcaacacaac

SEQ ID NO: 913928 - DNA, 4001 bp, Homo sapiens
tgttccctactccgagcacccaagaacactctgcatttccacctcctccgcccattctgaaattactgctatcgtctgcccgtctattttctctccatgttattcttactagagactggcacatagcaggcttgcagtaaatgttggttgaaatgaaatgaaaatatagcataatgaggtatttttaagtctaatacctgtaaaatgctttctgctgtgtaggtgacaaactcagcatgccagtattgttaggagtttctccacagttccacggcattcacttccagattctcaaaatcctcctttctaacttatttgaaaaattagaagtgttttctgtcactgcaaagccatctgggtatcacttcataacacagattctaatgctcctcatacacatgtcaaagtggaaataacaaaaacttttaattttttctttctaaatgaaatatttttttaaaaaaaagtttaatttttttctttttcctttgggttttctatttcataaattccaaagaacatatatcaaatatgccaaatctctataaaacagaaggtgtatttcatggccagaatacttatgcgcctctacctaagtaagggcgggggttcggcaggacataatacagtgtccagttgccctcgagaataaagtttggttttccgggggtgggtgggggggtgggggggtggaggttaggttagttatattcctagcataatatgcaacctaaaggttagtttataaaaaaagaagctgttacttttattgtgttgtacgtaatatataaagaacgcctaaaattggcccagtggaaaaacagatgaattatgccaggacttaaatcaatgatcgtcctctgtctacaggtcacatttaaacttgccttgtccactccagggcaatccctggccttggggtctgccctgggacttctccagcccccgccccaaaactgggcctgtcctgggaggcagcctggcaccactaactcttctctccctgggtcaaaagagcaaggtgggttcttctgttcacacagcctgcaccttgctaaccagatccaaaggcttctgaggtcctcacattgccttacttttctatgctttcattttccatttcatccttacaaacagttccttggtgtacatttccatacaacagttttcctgctggtggaggccaggtcggaacctgggtttcattttctttgagcgatgtttacttcctgtagcttatgcatttcgatggcaaaaacaattcctttggggttctcggcctcatcaaatattctctctatatagagtgtacacactctcctagacacagcagtctatgtggattcccaccgaccctgggcacctcattcagctcgggtagtggtcccatgtctcccacaggcgtgtctgtaaccacctccttatggcgaggaactggctgcggaatccttcccagcctgcgggaggacgtcacctccaagtctctgggtgacttgtagaggggttacctgcggccaagaggccggccctggacccttcttgggcccaccctgtgttcactacccaccctctcccaccaggtcaggacccgccgaggcttggggatcctcccagggcagccgtctcgcgggagggccgccccacccctcgccaccctcaccccgacaggctccgggccgcggggcagggcggcgggtaccgttttcaggccgcggaagcgcccgccgggaaggagccgccgccccctcgcccaccgctgcagccccctgccctggctcacctgccgcccggcttggcttcgctcagggtcactgtttcctcggcatcgtgccgcctggagagaactcccgaccgggatgggacgctgaccagggaacctgccggcgggcggcggcggtggcggagggggcagccgggactggggtgcctagggctgatgcgcggcctggcgaccccgcccagcgcggctcagctgacagccagccgctccctgcccgcgccggggaatttcccgggccccgcccatcccataccccgcccatcccccccaccctgcccattccataccccacccgaccaaggccccgcccctcctctttcctgcgtccgcccccagctacccaccctcgctgtccgtgcggggtcgaggctgggacccgggtgaacagggactgctctaaggcgtcactgtgacggcgttaatcaaaataaatcattaatcaaatgcagtgtgcggagttcgtcttccccgtgtcttcccgcagatcccgtagtggaggctggagccgcagggggtcgctgccgcccacagaaagaggagaatgccaggcatcctcggagggaggcctccatctgtgttttttgaaaaaaggttaacatctagacatagttaactgagcatacatagctttccactcgtttttgctttaaaatacactcaaaaagcagaaagcctgcaggatgcttcttgggctcttgttgcggacgaataggctcggctattcttgttgctgaagaatagcctctgctggtgtggaggagggaagctgcccccggattagacagcaggatgacaaggtaggagcgagagccgccctatgtgcatccagagtacccgggtagcgctgcagggatgggagggagggaaggagggagggggagagagagagagagggagggacggagagagggagagagggagggagagagggagggagggagagagggagagaaaaaaaacaaaacaacaacaacaaaacctaatctgaaacaggaaaaaggcagatgcgccctctcctggtatctccgaaggattctgcttcgctgtctggacctcctgctgcctggccaagcctgactctcaaccctgcccctgaggctaaccccaagagcagggcagagaagcaagcaagtcagcgactgccccagacccaattccgggccctcgagttggtgtggtgtaggaggggcagatgaggctagaggctgctttataaggagtgagcctgggggtgggagtggggagaaatagagaatttaaaaaaattctttttatatcagtgcaggagggccaggcgcggtggctcacgcctgtaatcccagcactttgggaggccaaggcaggcagatcgcaaggtccggagttcgagaccagcctggccaatatggtgaaagcctgtctctactaaaaatacaaaaattagccgggcatgatggtactctcctgtagtcccagctactcgggaggctaaggcagaagaatcgcttgaacccgggaggcagagcttgcagcgagccgagatcatgccactgcactccagcctgggtgacagagtgagactccgtctcaaaaaaaaaaaaaaaaaaaaaaaatcagtgcaggaaataactgatcattcatgaaaagggcttggaaaaatatatacagagagaaatggaatgacgatctctaatttttgtttatctactgggataatccaggcagaaaagacggtgtcacagctgtaccctgggatcggcagaaaagggtccccccggggcctgtaaggggtgcctgcggtaagtcgtacttcactaggctccttttactgtttaaaaccctataggtggggcacggtggctcacacctgtaatcccagcactttgggaggtcaaggcaggaggatcgcttgagcccaggagggagaggctgcaatgagctgtgattgcagcactgcactccagcttgggtgagagggagactttgtctcaagcaaaaacaaaaacgagaacaaaacaacactatgaaagtgaattaaaatgagcatcagtgaaactcagagccaagagaagaaggtcacccacaagctgcccatggctttggtgtgggaggctcgaggtgagtttctggtacagaaagcagtcaaagttgttttctcctgattccttgctctcagtggtggggtcggggtggggggtgccctgaagcactgcacacacacatgcacacacactcccccgac

SEQ ID NO: 913929 - DNA, 4001 bp, Homo sapiens
cagaagtgactatactactatccaacaaaatagacttaaagtcaaaaatagtcacaagacaaaaaaatggatattatataacaaaaagtcaattcagcagaaagatataacaattacaaatatatatacctctaataccagagctcctaaatatctgaagcaaacattgacagatcagagaggaaacataaacagcataataatggtaggcgacttcaattcctcacttacaataatggctagaacaacaagacagaaaatcgataaggaaatacagtacttgaacaacactataaatagtgctaacaaacatgtgcagaacattccacccaataaaatcagaatagtatttttctcaagtttacatggaatattcccaaagataaatcacatgttataccacaaaaaaacttgtaacaaattttaaaagattgaaattatacaaaatatctattttgatgaaaatgacataaaactagacatcagtagcagaaggaaaacaaaaaattcacaaatatgtgaaaattaaacaacacagttttcaacaagcaatgggtcaaaaaagaaatcacaagggaagttagaaaatatcttgagataaaggaaaataaaaatacaatgtaccaaaatgtgtaagatgcagcagaagcagtgctaacagagaattttatagctataaatatgtgcattataaaaggaagaaagtggctaggcatggtgggtcatgcctgcaatcccagcactttgacaggctgagggaggagaacttctggaggccaggaatttgagaccagcctgggcaacaaagcaagaccccatctccacaacttaagaaaaaaaaaaaaagaagtagaagaaagtttgcaaatcaacaacctaactttatacctcaggaaactaggagagaaaaaaaactacacccaaagctagcagaaggaggaaaatcctaaagattagattaaatcagagataaatgaaatatagaatataaaaacaatagaaaaaaatcaacaaaactaagaggtggtttttgaaaacaccaacaaaattaacaaatgcttagctagattaactaaggaaaaaagattcaactaataaatcagaaataaaaaagagaacattagaacccatgccatagaaatcaaaaggattataagaaaataccatcaacagttaattatatgtcaacaaattggataatttagaagtgcataaatttctagaaatatacaacctaataagagtgaatcatgaagaagtagaaaaaacgaacagacttataactacgaaggagattaaactggttcaaaaacctccaaacaaacaacagcccagaaccggatgactaccaaacatttaaggaagaattagaaccaatgtttctcaaagtcatttacaaaaatgaatataaaaaacacttcaaagctcattatatgaggccagtattaccctgatttcaaagtcaaacaaagacattacatgaaaagaaaactacagaccaatatttgtgatgatcaggttggctttattcctggaatgcaagaatgatagaacatgtggcagggtgtgctggctcatgcctgtaatcccagcactttgggaggctgagacaggagaatcccttgaacccaggaggcaaatgttgcagtgagctgaggtcatgccactgcactccagccagaatgacagaatgagatttcatctcaaaaaaaaagaataatacaacatgcaaaaatcaatgtaatacactatagtaatagaataaaggacaaaacagcatgatcatttatattgatgtagaaaaaatgtttaacaaaatttaacaccttttatcacgaaaacactcagcaaactaggaatagaaggaaaataacataataaaggccatatatgaaaaatccacaggtaaacttacactcaatggtaaaagattcaaacttttcttctggattaggaacaagacaagtatactctgtctcttcgcttctattcaatatagtatttgaatttccaagcagaccaattaggaaaaaaaaattaagcaagaaaagacatccaaagaataaaagaaaaaagtaaaattatctctgctcacagatgacttgatcctatatgcataaaatcctagactcctgcataaaatctagaaaactgttagatgcatatatgcataaaatccagaaaactgttggaactattaaacaaattctggaaagttgcaggatccaaaatcgacacacaaaaatcagttgcctttctataaattaactataaacaatccaaaggtaattaagaaaataatttaattacaataccatcaaaaatagtaaaatacttaggaataaacttagccagggaaataaaaggcttgtacactgaaaactacaaaacagtactgaaagaagtcacaaataaatgtaaagacattggtattcatggattggaagatttaatgttaagatctccaaaatatcagatgtattccccaaatctgtacaacattatgtattaatttgaaaagtcaatagaacccaaagcagtctacaaattatatgtaatccctatcaaaatctaagctgcattttttgaaaaaagagaaaaatttatctaaatattcatatatactctgactagacaatcttgaaaactaactgagttgaaggtctcatgctccgtgatctcaaaacatgttacaagactacagtaattaaaacagcatgacactggcttaaagagagacatatagaccaatggaatagaataaagaacccattaaaagaaaactccacatatatggtcaaataatatttacagcattccagatccgctcaatgagggaagaacattctcttcaacaaacagtgttgggaaacttggatatccacacatgaaagagtgaagttgaaactttgtcttatgccatatacaagaattaactcaaaatggatttaaaacttaaatggaagatctaaaactataaaactcttagaataaggggatatggcaattattttttaatatgacaccaaaagtacagacaacaaaagaaaaaatagacaattgggactacatcaaactttttaaaacttttatgcattaaaggacataacaatgttaaaaaaaacttgtggatggaagaaaatattagtaaattatatatctgataaagagttaatatccagaatatataaataatttctacaacacaatatttaaaaataatatgattttaaaatggcaaaaggatttgaatagacatttcttttaaaattatatatgaatgggcaaaaaacataagaaaaaatgctcagcatccaaactggaaaggaaatcattagagaaatgtaaatcaaaaccacaatgtaatatctcctcacaaaaattgagtggtttactattaagaaaaagaaatattagataggatgcagttgatagcaaacagcttaaaagcaacgtgaccccagatactaactcaaagccacacaaaaaacaaaaagctctggcaaagacatttatttatatttttatttatgtatttattgagggttttgctgttttgttgttgttgttgtttactgttttatttttgctttttcaacttttattttagattcagagggcacttgtgcaagtttgtaacctgggtatattgtgtgatgttgaggtttggggtatgaatggtcccattacccagatactgagaatagtactcaacagtttttcaacactttctcccttccctccttcaccaccccaatagtccccagtgtctattgttgctatctttatgtccatcagtacccagtgtttacctcccccttatgagtgagaatatgtggtatttgattttctgtttctgtatttgtttgcctaggataaagtcctctagccaaatccatgttgctgcaaatgacatgattttcttcattttcttttattttttatttttatttatttttttttattattatactttaagttttagggtacatgtgcacaac

SEQ ID NO: 913930 - DNA, 4001 bp, Homo sapiens
cgtcatagatgaaggtacaccagtttttaaaaatgttgtgcaaaaatacatttttatagaaaatagactaccaggaatgaacaaatttacactgtgagaaatcagcttgcaaattaagtaatgctcactttatacagcaaattataaatagcagtaaaatcacccaaagctatcatgaaacatcatttaggtgcccagcaacctccagctctgagaaaacattcaaaaagatgattaaggcattacacctacagtaaaatctactagcaagtttgaaagtgctattaccctgattaaagttcatgtgattctccaaacacaagttatatatgcaattattcccagggtgtaaggttttgagacatttcaagagcatgcattttgttcaatatacattttagacaaggatatggccatagatttggcaagttcttcgtcgcgtttcctttgcacttgagtttgtttgcaccagttgtcgtactctgggttaggataggagtgatcaaatacagcatcatagtgtccgttactgagccaactgagccaaatactaggcctcagggaatcctctgggcccaaataatgaatcatggtagacaccgtgggactctccagcctccctccagtagttaaatggatattcacattcagcatctgccccatggccagcaactccgggtacccggcccatgccccgtcttgggcagcagcgatgataaactcccccacgtcgccctcaatcagggggctgaagtggtcgagatggtcggcgatgtagtgcaccgtctgctccctcaactcccggtgcaggctctggtccccatacaccgtcttgctgacagctcggtagaggcagttgccgtctggaatgatgtggaatcggtacttattcctctgccgcagatacttgtcctgcttctccacctcggccaggtatagggccagcttctcgtctctgggatccgacctggagacgatcaccggctccgccgcactactcggggcggcctcgatgctcccggcggggggtgcctcggcctctgggtcgggcctccgcgccgcgtccccaccgggcgcgtcgcagcgatcgccgcccctctcccagcccctggggcccctctccgccaagtgctcttcgccccacggaccggggccgggatcggggctccccggggtcgccgcggggcctcggtgcttggcggcggccagggcctggcggtgctcgctcagtcggaagttccgatcgggcccctcccgtgtcgcgtccaagcccgcgggctcggggcagtcgggccgcagcagctcctccaggagccaggccgaggagccccgccgcggcgggaccggggctgcgggcgccggggcgagcaggaggcagcggccgcgcggggcagcggcggagcccgcggcgccgggaacgggatcgggcccgtgcagcaggagcctgtcggcgcccagggcccgcacggtgatctgtgcggtggacgtgtagtgcggcggcagcggcggcttgcaggacgcgccgggcgggccggcggcggcggaggcgggcgcggcggccccggacaccacctcgaagcaggaggagaaggcgggcatcttggcggcggggacagcggcggcttcccggtgctcggcggccgcggcgggctggcactcaccggtctcgggctcgggcgcggcgccggcggctcccgggggctgcagcgagaccttgaagggggtagcggcggcgggtggcgcgggggcggcggccgtgggacccggggccccggcggggtagtgggtgcagacgctgctgtagagctgcatgtccctgcccgccgctcggccccttataggcgcggcgagccccggagcgggggacacaccctccgggcccgggggagggggccggcggagcgcggtgacccaacggccccagaatagagatgagcgaaaggcagccggccgccgcgagtcagcagccgcgaatagcgcccgggtcccggccaaattcctgctgcgccacagcgcaggggggcggggacgggacgcgagctcgacccctgccggtgcgctcggcccgcagacccggggcgccgcgcccgctgcagctgcttcggcccgcggcggccgctggggactcacggaggaagccgcccgccccgttggagcgcgtcccgccggcgaggaggagcgcggtgcgcgcggaggcccgggaggcggggccgcggttgtttacctcaggcctcgcggccgcgtcacgtggactcactggaatgcgcggctctttgcggcgcccgattcagtcgcgcctgctcgccccgcccactccggcccgcgccccgccccctaccgcgctccgccgacgtcacgggcgtggccctcggcgcgcgagcgcgcgcgggcggggcgaggccgggggcgcggaggcctgagcagtcctgggatcctggctgggcctcccgcccacgtgactcccacggaccgcttcccccacctgggcactgggcactggtttctgcgctgcgccactctcctcagcggctgcagtggatgctgcgggatgggagctgcttggggcgagttagcatgctcggaaagcttgcgtggcaggaaagcttccggcatgggtgtggagaacggaatgctgccttaaagtctgtttggcctctgctggtcatgggctaccatccctgcttgcattcactactgcctcttttcttttatctttttagagatgggggtcttacctgtctccgaagctagagtgtagtggcgcagtccatagctcactgcagccttgacttcccgggctcaagcgatcctcccgcctcaacctccagagtaactggaaaccacaggtgtgcaccaccgcacccggctaattttctttctttctttctttctttttttttaaggcgagggtctcaccacagttgcccagtctggtgtcgaactactggcctcaagctgtttcccgcctcgacctcctaaagtgttgggattatgggtcctagccaccactcgtggaaccgccgcgtcttttcctttttttttttttctttttctttttgaggcaaggtcttgctctgccttccaggctgagtgcagtggcgccatcatgtcccactgcgacctcgacctccagggcccaagtgatcccccttcctcagccttgccttgggcagggattacaggtgcccagctagttttaccactgtgtcttttctatgcatttccttggactcaccggtaagggtgagtccgctagtggattctcttgccttgctaagacaaaaccaactttgcacctctgacctatgccatttggcaaatatctggcttgggggaaagcaaggaagccttttaggcttttataaacaagctttctcagaataccaaatgcagtatcacttagggccctttgagaataggtgtgaatgctagccagaggtcaaaagcggtggagaaagtcgtgacctgcattccggggcaagatagactatagaaaatacttctaccgagtctttttgtaatacccgcctttgtaagggaaagccagaggtagtgggagacttttgctatattctgagctgtgatcaaatgctaaattaacagggcctaaacattcgaattgaacccagaggttgtcctaacattttagagatagggagactgaacctgtaggtgatgtaggctgtactccggtccccacctttccggtggaatgtgaattccaggaattgagagacttgggtcttgctcttatatttccatcccctaacaccgtgcttggcacataattggacctaattaatatttactaagtgaatgagtagatggaaagcgagtttccaaggtttgtcagacagtggtgaagccaagattactatccaggtcccttgaccctagccagggcttttaattatctttgggcagtatgactggcagggtcccagctcaggtcactccagccgcttatgtaaattaactcagaagaaggtaaatgactgtct

SEQ ID NO: 913931 - DNA, 4001 bp, Homo sapiens
aaatgtcaataaaaacagcactacccatttaaaagagacagaaatagtccttttcctagttagtctatgtaaatctaagaaacatttgtcatcagctatcaaaaacaatggcaggacttaaggcacaatgtcccaaaaccaaaactgactatgaattttattaaaggtaagtgataaagtctcttttcccacataaagaaaaaagtaaaatttgaagttcacatttcagattcttaaattacgctcacaagctaaaaaaaaaaaaaaaaaaaaaaaaaaatcacggggtgtgtattcacatttcacatgaagacaaaatatagttgaggttgttcactttcagcttcttgaatatatcgtcttaggataccgattttctccatagaaacttgattctaaaaatccctttaaaatgttttttaaattaacttccaacgttcctgctatgcagactgaattcttcatctgattattttaggaaaagactagcctcattcataagctacgtctaaacctaaaaggggaaatacgtttctaaccagaactttaaaaaaaaaaaaaaaaaagagtaaaaaattgatgaaagaacgctgctgccacgtctttgcccctccccccttcacgtagtggctatttcatcccctccgagtgcattccaagcgaaagtccgagaaccactgctctcggagaaaccagaaacagttaagtggaaattggcaagtctctttggccttttagatcaattcctaaaagaggatctagctgcttcttcaaccctttcttaaagaaaacagtgcaaaattccaagagtcttcactctatccggaacgcgtaagatgttagtgtctaaacattgaatttgtatgtaacagagtcgattatttaggagaaagagtctcacagttatcataccatccttcctccccattgaaacatacatccgggggccagccatgtaatccaactcaaaatcctcacacaaccatggaatttgttggactgatgtggacttttaaaagctgcaaattctcggcagagagagacagagagacagagattgagagaagagctcttgtctctttttaaaaaaagttatggggaagaagagggaaggaagcttccctgacgacgaggtgacctgagagcctacttcctcggcgctacgagcagaaagctcggcgccccgggctacgtctggcagctaatgctgcaccgctgcgcgcaacagatgagttcagccggaactttctggggaggtccccccagctcccggcgactttcgatagggcaaaaatgcctggcgcgctgcggatccagctccaagccttaaaatccgctctccaccgccacatgcgaaccatctgcggctgtggcggccaaaagcccacgccccgcgcttgcgttccccttagcctcgttagggaggaccaggtgcaggggaacttggaaaaaaaaaaaagcaacagagtgattcctccccgggaaggaaaattcaagaaagtcctggtccctagggcggggactgaggctgcagcagccccagcggtccgaggcgcactagggacagaggtgggaaggggggcacgaaggagcgcgggcgccgggagtcgcgtggcgcagggagaggggccgagtctcccgaggggaaggaaccgaggctgctgtggtaacctggggaacccccgccccagaagtaccaccacagcgggaaggaatggatcgccgcagccgtccgagaaggtccacggctgcccagtggcctcagtctccgggatcgagggagcgtctcacctggaaagtgggacgagagggcggcgcgctcttcagcccccagtcgcctccactcggagcggctacttcctaccctcagcccgctggcggcgcgactgggcagcagagggagcccgttagcccttttataacctctaggccgcgatggcagcgccagggaggaggcgactgcagccctcgctacgtgagctcgatcacaccagcgccccggcgactgcgcaggcgccaagcccgtgcctccctgctgcccccacccgtggccggcccgtggagtctgaggccgagaggagtggctgggaccggccgccgtggtgtgggtaagcgggagtgggatgtaacgcgcctgcgcagggttctcgccccgccaccgttaccgtggttaccacggggtttcccccgctcctgttcagtttgcctccttgatttcagggtccgcgtcaggcctaagcgacgaggccgccggcaataaagtatcttaaaaatgagaagaggaacgtgggagtgtagaaaataaagcagaatttttctagggtggaaaataatagagattcagtcttggtatctcagctgtcttgttcctctcacatctcagcactcattttatactaatcgtgctctatctcctacctttataccttatcagtagataatagactaagagctccagggtcaggttatctcaattcaaatcctgcctcaatcctgtgtgtaacactaggcattaacaacctctccgtatccgtttactcatctgtaaaatagaaatgacggtactacccatcttgtaagattcttgtgagaataaaatgagataatgtatgtaaagcacttaacacatgcctcacacacagaaatgacttagtaaatattagattctccagtaacattaatttatataaggcacccaatgttgcgtttgatcttagtctaacatttgccttagttataaagtaaccccaaaccaagggtttctttatatctccctgtactatgagggagaatacaatgaagaagataattttttccttgtcagttaaagagaaaaatgagttgctaagacttgttattcattaagaattgtggtttctaaagttttccatgtatgctaaaaagtatagcaataattaacatttgacttacgcaggaggtgagtgattatatagctacagaaagagagagagggtactctgggagcactaggcaactaaaaagtagatataatgatgtctaaatcaatggttctgaaagcgtagtcagggaatccataaggtcaaaattattttcatactaagactttattttcatactaagacttactgcctttttcactctaataacaatacagtgaggtcttccagagactacatgcctgtgatacagatggaacgcagacacagatatgagaatcttctattagcccagacactgaagagatttgcagaaatgtaaaataatgccactcttctcactaaattattttgctttggaaaatagttatttttcattaaaaatatgttattaggccaaatgaagtggctcacacctgtaatcccagcactttgggaggccgaggcgggaagatcacctgagcccaggagttcgaaatcagcctgggcaacatggccagaccctctctcaaaaaaaaagttatttatgttatgttaacatgtaacaggtttattattgttgttttaaatgaataaatattttatatgtttgttttaattcctaatatagtaaatgttgataaatatgatccacataaaagctttttggagtcctcaatactttttaggagtataaagtaattataagaccaaagaggcagggcgtgcggtggctcacacctgtaatccctgcactttgcgaggccaaggcagacggatcacaaggtcaggagatcaagaccatcctggccaacatggtgaaaccctgtctctactaaaaatgcaaaaattagctgggcatggtggcaaacacctgtaatcccagctactcaggaggcggaggcatgagaatcatttggacccaggaggcagaggttgcagtgagctgagatcacaccattgcactccagcctggggacagagtcagactccatctcaaaaaaaaaaaaaaaaacttcctcaaatggagctgtaatcaacatattcactagccctacatagagctgactctgaaagttgacagtttactcagtaattaaaatg

SEQ ID NO: 913932 - DNA, 4001 bp, Homo sapiens
tcccccacaggtgcctgggtaacccaggtctgtgcaccacctgtttggaggcaggcaagtgtgttcacacaagttctcacagtgccagccaagggcttcgggtgagctcagcaactcccactcccagaactgcacccaaggccacgagcatgagcacactgccacctccacgaagtgctccagaaaaacagaaacctgccagggacaatgagggagggggcagggccccagatacagcagagcctcacagaagtgaggtcagagctgtgccaggaaccacccacctcaagccacctgggccctactgtgcccacccccaacactggccaggaaagggaggggggtgcatgcaccacctggggtctgtctgcactcataggaaactggcccagtgcctgccagcctcccgacctaccccaaccccccgcgacagaggctcttcagaaaggaagtgaggacttcctcctgcttacctctgaacctcctacaaggctggctctagaccccaaaccccaggagccacagggcaactaggagtgtcctgtgctcagcccaagccaagaaaccaaatgggttatttcagaaatccaccagcaggaaacaaacaaacctgggagtgggtggggatgagtgcaggagaacctcctcagcgcccctgctgctccctgcccttggagcaaggtaataaggaagggcgggcatggagctggaacatttcagcacatttgcttgcttgcatggaactggatctctgctgccctggcactctcgcagcctacattactcacatagcaattaatggtgtgtagcctcttggctttccactattaccagttcaggactggtattgaaaccctgtatcggggaactttgtgtgtttatgtcctgtcttgcccccaggggctgagcctcctgaggacagaatcctccaaatcctcctccatccacacattccaggggcacggcccagtgcccttcctggcatttaagaggtgctcggccactgggttcaggttactctacccagaagccaaggagttggttcctgggcctctggctgggagagtagagatgcccagaagattccctgggccatgaagctttactcccatctctgacaacccaagagaaagggctccaaccatcccggccaccttcaggagccgggtctcccataggccactctctctctgacaggttactgccccttcaggaaaaccctctgaaactgaaaaacgtactctccttggagacccgggcctacagaggaagagggccagactgggccaagaatcaaagcctgtgcccgctgagacttctggactcgtcctgggtctgagggcctcacgccccctagagatgagtcccaggaccccatctcggtcatgaagcggcttccctctccccaatctccccctaacttcgcgggaaaccctagctcctggccatgctcccaggtctggcaatgaaaagtggaattgtcaccaggccatgcctacaccaaacccagggaactcgggagagggggtagcccagggtccaacacacacaaccacccagcaactgctccctgtgagtccctcttgcctcccagggaccaatcctgagcgggtgtggggtgaaggcccaggacctcacctctccaaaggatggggagttggtgtctggagcagcctcgggctggggggtgcccgggggattccagatttgccctcccctcgccagccccagggcaggacacttcggtacctgccagcccgcggctccggggggcatccgtgctcctgcggccggcgtgctgcgcccgaactgcgggcgccgagtcaggcagcgacggggcgcgcccggcgcgcgctctggctccagctcgctcctcccaacttcgccagcccatgcgggggcagaggtggctccggaggtgggcaggccaggcggacccggcgaggccacgcgagagggagcccgtgctcaccggcgacgggacctgcgcgccccggcccgtgcgcgccgcgctgctccccagcgccccgctacccaacgccgaggggcggacccgacccggccgccaatcaccgcgcccgcccccgcccggaccgcgagtcccggccccaccgcgaggggcggggggctcagatttaaagacacactcagcccagccgcagcccccgggcgggaggaacgcgggcgccacgttccccggctgcgcttcctccctccgcccgcccaccctccgcgaggaggaaaagtttggggcgggggagactgcccgggaagccagttcctcttccctcgtcgctagtgcggctccttctggaagacacccaaacccgacatccagcctcctggctgcgagaggcagcagcgctctgggcgccacaccccgtcccggacgccggctacccgcgacacccgctggcccggcttccctcgcccccctctgctttacagccaggccgagcctcggcgggaccgagcccagcatccgggctccgggccggcctcgctgtgcagtgcggccggagctggatgatggtgcgctctgcacttttgcctcccacgtgtcgaaggggagcccctaaacagcagacggtccccccaagcaggggcttctcccacgccccggggtcctaaggaaacgcgcccctcggcccccagaggtgagaggggaacagcagagcagagctttggatggagaggggtccctccgcccccacccatcatgcggctccaggcagtgacccgcaccataggcctgccccccccaccactcctcaccccacacgcgcggactagcactaggcggcagccagcccggcccactccgacggccccgcacgcccccgcgagcacgtgggtgaacgcacccacgtgcgtgcgttcactcttcgctgtgcttcctcgcggagagataggctttgttgtggttggtgagtcacttcctccctctcgctgctccacactcgggaaatccttttttctcacctgttaccacctgcctcacccccattcaggactggagctggatttcggcgagctggggttgccccaggatgcaggcagtgtaggccccacctctgtcaggctggagagcgctgggctgggagaggggaacacattccccatgacccctaagaataactgaagacaagagaaatcactcattgtggtggtctcaccatgtccctagcacctagctcttaagtgcctcgcgaagttataaggtcggtacttttctgatccctattttaacaaatgaggaaacaggcccagggaagacttgtcctcagctccatacctgctcctgcgccacccaaggtgtgtgaaaaggacagcagcagagaaaatcccatagtggccttgggaaacagacctgaccttcagagttcagcagagctaggctcaaagtggctcacaatttactggctgtgtggtctgggaaaagtgacgtaagttctcagattcccaacttctacatccataagatggcttcatcctccttcaaagaggtatttgagaagccagtgagctgggcaagtaatgtccaggcatcgtgtgtggcacactttaggactccatcctgggccacagtttccttccttcttcctcttgccacagccccatatcccatcccaccagctgtcagactccccagctgaagcctgccatcctgaggatgcattccaggataatgtcctcttctaggccaggactaaggtaggagcaacatgtgtgtgagcaggtgcaaaatatacatttacatacatgtgcatgtgtatgcacacatgtatacacatacatgcacatatatgtatacaaatatatacataaacatgcatacctatagggatgcatgcacacatatatacatacagaaacatagcacatacacatatgcacataatacacacatacaaatacacacactttgcttcccctcaccctccctgcccagcagatgctgggatccacggcggtgtgcctctctagctcccagagaacaa

SEQ ID NO: 913933 - DNA, 4001 bp, Homo sapiens
agaattctgaaggtacaggaaacagcacttggagatcacctagcctagctccagcagttcaagatgtgacttggtaacttggttaagatcacactgctgctaagtagcagaggtgggtaaagtacctaaggaaacctgatagtaagtagatagtctaagaaaagccttccaagaataagtagagtgaggtgatggcactttagatgaaaagagtggacaacattctcctttcctggtttagcaaaattaacctgccactggtctgacttttagattgtaggatggtgaatagtctcggcactgagaggtcagattaaaatttgttaaataatctaaaaatactgatctgttttattccatccatcattttcaaacatgaagtattttaatgtgtattgtcctttacctacaatactacaaaatagaaacacacctatccacacatgcattccaggtgcatttacaagtgttaacactggctatcttaacacacatcttgttgggacagaggccaaactgttgtaactgaccaggaggaaataattatgtgtctagcttgatgcttcgccaccagcacacactaaagtttgcgtttaaagcacacaactactctttgcaaaaatcgttcctgtaaaatctgtcagtcatcagcaaataggaataagcttagagtatgtaaatactcacagagtacctaaatattcctcttagagtacctaattcctcttagagtaactaaatatcaactgattggacaatattctttttataaagatatgtgaatgtcaataggcaaggcacaaagatattaagttaagccatttttaactaagaaattttggtagtgaaaaggccagatgtgactcctaggaacatgtaaaatttatttcagacatgattgttcaaatctgagagaagaaaacatggtaaataatgtaaatccaattttgacgaaccgttttttaaaaattataagtaacaatcgtggtcatgaaacttaaaacaactaggatttttattctgtaagaaacataaaccactttaatttctgatacaaagcacacaggcagatagttacattttcttgtattttaaaataatttctgtgggtttgcaagcacaagttaaggctcaggttagtttttctctgtcttcaagatattcctagagggtgtattttcaattcctcagaagttatttcaagaggtgttatatcctcaattaaacatagaagattaagctagaagctccctttcattatattttagctattttcattgcaaactctagtacaatctgtcaatgtagataagagaaataactgaagtatagcttcaaaataagtgaaacaggtttataaatcacaggtaatcaatattaagtcctgacttttaaaatattaatactaatgaaagtcattttctaacaagtatcaaaaacaaaagcaaataaaaattcaggtgctagattacaaccttacaccttacaactgtagccaaatctgctgtttggctttaaagttccacacaaaatcttaacctacaaatttaacatttcaaacccacaaaatacaagtaccagagtcacccacagtcatgtcaaagggctttccaaggtcttagaaaccttaatccaatacagaaaagctaagagtcaaaaagacatagaaacagggaaaagtgaaggtgttatttgccaaacattaaactttcacagaaatccaaaacctacttaacaatttccctatatcgaacagcataacctctatgcaaatgcagtcatttattagcatttactgtacttactttgctttttgccatttataagcttcattaaagacacccacaaagaagtaaccagttgaatgagcttcagtcaagaaaaaccagctgtaaactcgacctacaaatttacatcccacagcgtcctgtggggaaggtacactttacaaactaccattatatatacaagctttagattgtgaaataatgcacttcggctttctccggtgtacattacaattacaaaccctcaactcaacctcccccttcgttgaaaaaaaaaatccacctccaatcctcattggtccacatagttccggcccacatggtatcagtgggtgtgtccctcccaaaaaaccctctcattggccgtgaagaaacagcttctaataggctgtgattttggggggtagttaaactccacgcctccagacttgcgctctccaatagacccgagacgctgctggctactctgtgattcaaagggcaggcaaccccagtaggacgcgctcagagaagcgagaggggtgagaaaggagagagcaccctcggtgtgccgcccactttatcctcactcctggaccccagcaaatgttcacacacctgcgttttcccagccaccaattagaagggcggacagagcgttcgcttattatatatccttgacctagggacccgctcaagcttcgtgtccaatcctcgttctactgatagaagcgagcaaagggcaggctcaggcaaagacctgtagtgcttgatgtcccctaggaaaagaatcagtcccgggaacctactctgtgcagtccctcgaccgcagacgcgggggcgcacggggcgtgctgcggcgcctgcctcagccgctcccagtcccgggccccgcacgctgcgtctgccttgcgcccgcgctcccctcccagcgggacttacgcggcctgttctttctccccgagtccatcctcctccgcagccggcatttcttggccggggagtcatgctgagggagcagtggctgcggctgcagctccggcaggagcgggaggcgctggggcgccgcgtcgctgccgcccactggaccccggctgcagacgtgcggcggctggactggcggcggatggaagccgttgtgcagcagcccgttcacagcggcggcgctggtgcccacgggggcccctggagagtgcgggaccgagcgctcctgctgcccgctgcggtcgcccatgccgggggctggcggggctgtgcgcgggccccggctcaggcggcctcgctggaggtcattctccggcgtctttatttccccggatcctccctgcggcttccgattcagcagccgcagagccggcgcctggggatggcgaacccggcgctcctcccctcctcctgccgactcccccacctcctctgcgccctgccccccgcgcgccggccccacggcgccggcctggagcacgccagccccgggcgcggaatcggggatccccgcgcacccccagccggggctcccgccgcccgccttcccctgatccccaggccgcgcgacttcaaacgcggcttcctcgcctcccagactggtccccgccactgagcatgcccagtcctgcccgccaccgccaccgacgagtttcaacatggggaatcaagttctctgggcttgcagagaggagatgggcgggttgggctttgtatggcgatgtgaaaaccagatgggtctgggagagacagcgaaaggagcgaaccgtttcaggaggaatacgggaggaagacaattatttgcagaggtgtcaggtttgctaatcctgtccccagtgagcaagatacctttgcaaggtcattcacgttaccctccccgctttgtgagtgtgtgcttacgcgcgcgcgcgtgtgtgcctgtgcgtttggttaagtgaccaaactacttagaggcctgaggggagggagaacaattatttatagaaaagttggcagacttggggagggaggggagtgaaatttctttgctggcacgcacacacactcaaacaccatgtggtctcatggagttgtcttttgcagggaggaaacctaggaatacagtgtaaggacagtgaaggacaaaactgtaggcaggattaatcggtgctgaaagagatcaagtaaacaggagcaattccatgctataaaaagcactttcctcacccagaaaggacttcaaaagacaatgtcatgttatttatagagtaa

SEQ ID NO: 913934 - DNA, 4001 bp, Homo sapiens
gaaggtgttatttgccaaacattaaactttcacagaaatccaaaacctacttaacaatttccctatatcgaacagcataacctctatgcaaatgcagtcatttattagcatttactgtacttactttgctttttgccatttataagcttcattaaagacacccacaaagaagtaaccagttgaatgagcttcagtcaagaaaaaccagctgtaaactcgacctacaaatttacatcccacagcgtcctgtggggaaggtacactttacaaactaccattatatatacaagctttagattgtgaaataatgcacttcggctttctccggtgtacattacaattacaaaccctcaactcaacctcccccttcgttgaaaaaaaaaatccacctccaatcctcattggtccacatagttccggcccacatggtatcagtgggtgtgtccctcccaaaaaaccctctcattggccgtgaagaaacagcttctaataggctgtgattttggggggtagttaaactccacgcctccagacttgcgctctccaatagacccgagacgctgctggctactctgtgattcaaagggcaggcaaccccagtaggacgcgctcagagaagcgagaggggtgagaaaggagagagcaccctcggtgtgccgcccactttatcctcactcctggaccccagcaaatgttcacacacctgcgttttcccagccaccaattagaagggcggacagagcgttcgcttattatatatccttgacctagggacccgctcaagcttcgtgtccaatcctcgttctactgatagaagcgagcaaagggcaggctcaggcaaagacctgtagtgcttgatgtcccctaggaaaagaatcagtcccgggaacctactctgtgcagtccctcgaccgcagacgcgggggcgcacggggcgtgctgcggcgcctgcctcagccgctcccagtcccgggccccgcacgctgcgtctgccttgcgcccgcgctcccctcccagcgggacttacgcggcctgttctttctccccgagtccatcctcctccgcagccggcatttcttggccggggagtcatgctgagggagcagtggctgcggctgcagctccggcaggagcgggaggcgctggggcgccgcgtcgctgccgcccactggaccccggctgcagacgtgcggcggctggactggcggcggatggaagccgttgtgcagcagcccgttcacagcggcggcgctggtgcccacgggggcccctggagagtgcgggaccgagcgctcctgctgcccgctgcggtcgcccatgccgggggctggcggggctgtgcgcgggccccggctcaggcggcctcgctggaggtcattctccggcgtctttatttccccggatcctccctgcggcttccgattcagcagccgcagagccggcgcctggggatggcgaacccggcgctcctcccctcctcctgccgactcccccacctcctctgcgccctgccccccgcgcgccggccccacggcgccggcctggagcacgccagccccgggcgcggaatcggggatccccgcgcacccccagccggggctcccgccgcccgccttcccctgatccccaggccgcgcgacttcaaacgcggcttcctcgcctcccagactggtccccgccactgagcatgcccagtcctgcccgccaccgccaccgacgagtttcaacatggggaatcaagttctctgggcttgcagagaggagatgggcgggttgggctttgtatggcgatgtgaaaaccagatgggtctgggagagacagcgaaaggagcgaaccgtttcaggaggaatacgggaggaagacaattatttgcagaggtgtcaggtttgctaatcctgtccccagtgagcaagatacctttgcaaggtcattcacgttaccctccccgctttgtgagtgtgtgcttacgcgcgcgcgcgtgtgtgcctgtgcgtttggttaagtgaccaaactacttagaggcctgaggggagggagaacaattatttatagaaaagttggcagacttggggagggaggggagtgaaatttctttgctggcacgcacacacactcaaacaccatgtggtctcatggagttgtcttttgcagggaggaaacctaggaatacagtgtaaggacagtgaaggacaaaactgtaggcaggattaatcggtgctgaaagagatcaagtaaacaggagcaattccatgctataaaaagcactttcctcacccagaaaggacttcaaaagacaatgtcatgttatttatagagtaaggagttgcctcttctaagaagggaaggcggcatcacgtggtgaccagcactacgagctttggagttagcactgggttcaaattccaactcagccactgagcaaacccagataacgttaatgctcaaggtaacacttctagcaataggaaacgggactgtccatgctcactatgcaggactaatttgggtggtgaataccttcccaaagttatgcaatctcttgaggcctcactttcctatccataatggggctgttgtgagaaaatctactaaaagtacctggtacaatcctggcacacagtaaatgctcagaaagctagttttccttattacgctattatgattagcagttcaccctttgtttcgacaggggaacaaaccatgcttacagccgtatttattgtgtgatttattttgtgatattctccgtgatttgcaattaatctacagaggagtcagagtctggcaggtgctggctggctactgggttgctgggcccctgggcttcagtgcattcagcagcatctagggcttgcatctggcaattccttccagcagagccttacctagaatcagagcttgagaaccatgggggccactggagcactctggtctatccactcttgcatacttttttcgtatcaggaaactgagctgcagacagatggctgaggttattaagagcaaaggtgggactaaactccaaatctcaactctcttagcttccctaaccttatgctatttaaagacagagaaaaaaacccaggtgatctggcccctccctacctctcctgcctcatcaggggctccctgtgctgccttcaattccttaaacaacattctgctgtttccattgccttagagaagtctcttctctaagacctcttttgtctactagactccaactttagatctcctctttaacttctcatatttagagaaatgttccctgacccttagggctacattaggtctccctgccataccctcttcctactccttgtactctgtttatgactccttatcattttgtaactataccatgcatctgttccctcatttgtaacttgagaataataggacatcactgagttgttagactgatgaaatgcataacacatgcgtaaaattaattcaaacttcaagctattggaacttttttgtgagacttgagagaaatgtggctatgcagctacaacttctgctttttttttttttttttttaagacaaggtctcactccttcacccaggctggagtgcagtggcacagtcgtagcttactgtagcctccaactcctgggctcaagcgatcctcccaccttggcctcccaaagtattggaattataggaatgagccaccatgcctgggcttgccttttttccttgtaaataattaggaagaccgagcagggccagagatactaatcccttggatcactgcctctcctcacagagtaataatcttccttggaatgcagcagtctgcaaccaatcaaatcgctgtggcatatgcattggtcttgtatggaaaatgtaattctgctggaacttctccatctctgccagtataagtgaaatcttaacttctccactttggagcactgatcccactcatttggagttagtgtttccaggtggctatcctcaagctttgcactcaaacttcatacttaatcatgt

SEQ ID NO: 913935 - DNA, 4001 bp, Homo sapiens
actcaaggcaatctgccggaaccagggcttcctccttaccaccacagagttcctgactcacaaatgcccattgcctggccaggagccttggggccaacaccaggggtgacgggacagcccgaggagggtctcatctgcacctggtacctggcagccaccctgccacagggagagggcctgtctggccccctctgcagttgaagcccctcataaatacaggagcaagagaagtctttactcttcttctttttttctcttttgagatggagtctcactctgtcgcccaggttggagtgcaatggcgcagtcttggctcactgcaacctccgcctcccaggttcaagcaattctcctgcctcagcctcccgagtagctgggattacaggcatgcaccatcacgcccggctaatttttgtatttttagtagagatgggatttcaccatgttggccaggctgttcttgaactcctgacctcatgatccacctgcctcagcctcccaaagtgctgggattacaggcgtgagccaccgcactcagccttacctttccttcttttaaacactctctctcagaaataacttttttggcttaaatgagcaaaactagggaaaggagcaaccagtctgtcggaatggggaggacaaatggtctcctgtccctcccatacccaagcaagagcggagctcagccagccccggtgccctggggagcctggtgggaggactggcggggcaggggctcaggcacgcacttagaaaaggtgcagtccagccccggcagcacggtatactccccaaagggtgccagggccaccaggtccatgctgtgggtgccgctcacacagcattccaggttgaagaaggagttcaggacggccagcttcagcttcctggtctcctcatcctctgtccagccggccacgtgctggccaatctccttcttgaggtactccccgacgctgggcaccggggtctctgcagcgtgcaggaactcccgggtctggtctatcaggccgtagaacagagtcgccatctccgccaccagctggaggctcacgctggccccggagctggcgtagctcacggagggcaggcccacgtgacccccggtctccaccagctggttctcctgggacagctccttctcccccagcagcccgtactcagcagccagctggaagacggggttaccccgggagggcccatggatccagtgcgcgcccacctccaccacgccacctgcgaggggacagcagatgccacctggaggtccctttcctagaagggtcaccccgagcccttctcctgggccacgcccacgctggccttcccaaggaggatgtaccacactgtccccaagggccctgtggtcccccagggcagggccctgtcagacccagtttaaggggagcacctgggcaggagggcacttgtcgggcggtgtggaccagagggaggggcgcagggtgggcgtaccccggggctgggggggcccccgtggggcagaatcagggcggccttgtggagccgtaggtcgccttccctggccggcgccctcctgactaactctgagccctgagtttcggggcggtgaactctggcggattaagcgagcggggattccctcggggagcccggtgaggcggccgggcaggtcggctgcgcgcagggcaggttggggccggcgagttcgggcgcagccggttgggttccgggaggggctccgggaggggcggttaccgaagcagcgctccgagcggatgcggcccccggcgcgggccgtggcctccaggacccgcaggtgcgggaaggcggagtggccgcagagcctctgcgccgcgcccagccccgcgatgccgccgcccaccaccagcacccggggtccgcccggggcctccccgacgctgccggtcgactccatcgcgcggtccgggcagtccgagggcttctgagtagccgggaggtctggagctctcggaggaggccggaggcggagcgagggggcggggaggcgctgggaggggcggggaggggcggggaggcgcggggaggcgcggggaggggcggggaggggcggggaggggcggggaggcgcggggaggggcggggaggcgcggggaggggcggggaggcgcggggaggcgcggggaggcgcggggaggcgcggggaggggcggggaggggcggggaggggcggggaaggggccgggccgagccccacagtgcgcctcggcctccgcgagcctccggactgggctcgggtctcagagggaagcgccccgcgtgggagggcccgcgaggacaggcgtcagggagcgtcccgcgctgccgggcggtgcgcgcgagcgtccccatggagggagaagccggccggccgggcgggccagtgtctcctccaagggagacgagggcgcagcgagcgcttcccccagggacccgcgtcgagtgcgagggcgcagtgggtctgggggtgccacggtgtcaggggtgggacctgggagagcttaacgcgtccggaggggggctgtgaaagcctccagcatcgccagcgagccgtcagttcgcgtgtgcgcgcgcctgcgtgtgcgcgtgtagtcacagggctgcagggacacaggaccaaagtacaaagtacactcgcaaagtacaaagttcagaagccgagggcaagtgcagaaacgtccctcgcccgggaagttgagcgcacacccaggcacgcctgtgtttctggagaatccccggtgcaggcggccgagttttctgctgcatcgcagcccgcgggggttggaaaggctcccgccctgttttcaggcgcgtccccgcctcctgagccccggtcctctgccgaggggccgcgcgctccagtttgccagcgtgagcttcactcttcgctctcggcgtgggcctcctgagccgtgtcttactttcctttgattccctctcgtcccagctggagaaaaggctcccggaagggtgacctggtgtcgctggattccactccccatcactccctagccaaccccgcgagctgagctccaggcagggagaggggcgggtgcctgggagtcgggctgactccctgggcggtggcgggcaggggtcgagcgtcctctgtccgtcaggggcccgcagcaccaggaggcgacgctggatgcagtggccatctcctcctgcctccaggccatggggaacccagggcggatcccgggtcagcagggccagctgtccaccaagctgacccacccgacatgccaggactaaggaaagaagggctgccccacacccttagtcggatggcaagtgtttggggtgcagcccccgccacgagtgtcacctgttctgcctgagcaggcttctctcttactccctgctcttgggcctgaagcagagccgctggctcagtggggcgctccattctgaggtccctggcatgcaccacggaagcccagcgggaccacccacccacctgccccagctccccagcggaggtcctgagatggcagattaaatactctggggttctgaattccacagatgaactgggtcccccacgggtatggccaagggaacggcccactccctagtggctccgtgtgaaatcgagctgctgctgctctcgccgcagggcccagctcactgcccagacataggagcacatcgccctgcgcacaggctgggtgggcacagctgtgagggaggccaccccatgcctcaggcctcctgcacaggcgtgggcctcgccactctgggtggacaggctactttggcccctcagcctctggggactgctgccctgttttcagcaccgtgtcaggcaccatctggtcagccagctcctccagccccgagactcccgtgtcctcattctcctgggccgttacggtcggccagtgcccagcctttgctggaaggctgtccaggctgggctctggtcaggcatcgatgtcccccaggcacctggcctcacctcgcgttgggacagcctctgcaagatggaacag

SEQ ID NO: 913936 - DNA, 4001 bp, Homo sapiens
ctcaaatttctcactgcttctgactgtgcagagcccccgcaattgatttgtaatgaccctgttctcaaaccctcctcttcctgggctcctgccgactggaggcatcaagaggagagaccacctcgtccctttctaatgcttgacaaagtcccccatcacaactgagaaggaattcttgatgcaagcaggaaggtgggaattaaaaccccactgatataaaaagctactggcacagcggcttgccatttagaagacactatttaggattttacagaaattaatcgcattaaataggaacaaaatacaagtgattttcatttattatttcaaaaatatgttacaacgctgagagtcccccacttaaaaattactcctgagaaaggcagctggattttgataaatgtcccttcccaaattgatgccacctacaccctggaccctcctgctggtccagtatggtccctggagccacagagcccccaccctgttctcttgctgctcaaatgacccttctagccctgcatggcccctccacactccttccccacttcttggctttatattttgtttttttttttaaacctctccccggcccaccacaaatacacctcaaagatatttcggtaatacacattatataagaataaacatttatcaggcacctactatgtgtccattgcacgtctatctactagagagaggtcaacccattcagtaaccagtacaatcatctgaggcttgcagggtggtggctgaagatagaatgttcagcggccaaactgctgagtaggattttatcaaggcttgctgaccacatctgacgtggccccagtgctgtctagaaggcgccatccaactctaagagtctatgattactgctcccggttttttttttttttttttttttttttttttcagtttattggggtataattgacaaatagaactgctgccatttttaagaatgcaaaatttataggtgcccatgttgctgggaaagaaacttttctctttgacacgccctcatatttcccattaaaggaggacagctcagattattaattctgggtaaaagtgtgcctcctcaacacagtcccctcatcttactccaccaaaccgaggggcaccctcacccctcattactgaactcgagatgccacccaatgccgaaatcaagctagagggctaaatcccgccagtgtagaaatgcaatttcctccagtttgctttgataattgcagtttcctctatgaaagtccgtcattaaagcccactccaaggaagttcccatagacaaaaccccagcgaccagacctggcagaacgggagtcagctcgatctgctccgagaccctacagaagaaaaggcgggtctggaagagctcttgggaaagaaaggggatttcctgtccctggtcctggatctagatccggacccacttgagaagctcgggaggtctctcgcgggcgcggcgaccccaaggagcgcagattcccagagtcgcggggtggagaggggctgcggggcgaggactgccccgggaattccacacagagcctctttctcttgcttccctccgtgccccactcttactcctcctcccgacgccccctcccggggagggtgggacccaagtgccggggaattgggggttgggggtcggcgcgtgcagtgcggtggcggggagggaagccggcgcctggaagcctaccgtcttttgcttcttgatccccgacatgctggctggctgcggcggagcccgggtcccgggagcagagaccgaaggacgcagggacggcggcggcggcggcggcagcagcagcagcagcagcagcagcggctgccggactcccgggaaggaggtataaaaaggctccgcagacacgtcgcacttcccttgaccagcccccttctcctactcctcctcccgccacgctcctctccgccccgtcggttccgcaagcagcgcccagccttggggacccggccgccgccgcctaggcggggtccccggcccggcccctactcgcgggcgcgcgctccgccagccccggtcccgggcgagaccttgcagcggagcggcagatggcacgcccggcacgcggcctggggtcaagttcaccccgcccgccccacccccagagggtcccagagcgtcctccactcccctcaccagcctcccgcgcctcttcaaggaagtcttcctgcctctaggacctaagagcttatttggttaagggcaaggatgcttgaagccgccaggtttgttggcaggatcctcatatgcagtagtaaaaacgaaggttcacactcatggatccttacaatgcactccgctgggctctgccttaattctcatgggccccctccatcctgccccgaccccgggcagcaagtcctactatcttccagttttacaaacgagcaattgaggctttcagactttgccaagattatattccaaatgaggggattcaaacccaggctgacagcctcctcagtgcaggctttcttcaccagcatcatcacacatggtgataactcccaaggttcacagcttgtctgttcactatgcatcgtgctgaggggcttccatgcacttcctccattcccgctcacaacagtatcgtcaggttacaggtatgggcctgtggaggcacggcccctcctcacaacgacaagcaagtggcaatggccaatggaagcccagcaacttgtttcagtccacccccaaagtagcacttctgttccactggaatgggccctgaggaggaggaaaaggaggcacaagatgagcaggcttaggcctagggcgccaagattttaccagaaggcagtatggggcaaccctctgaacgaacccaaaggcagtatggggcaaccctctgaacgaacccaaatgtcaaggccaagtagaggtgagggagagaagctctagtgacaagcactttgggggcagtcactgggtctcacaccccttgtaccttaactgactccttgtgtaatgctacaaacggatggatatgaccatactctcaaaagaagtaacgtaacacacaagggccacacttctcattcccactctagtgttcctgctgtgaaagagttggagtaatattctatggaggtgagggatgggacttttctttcatacctaattgtatttctggaagactgccagctttccagacagacacttgatctgagtattcattgactgcccttcgccgtgggaaggtgggaaagaaaaataaatcaggagtcagaaacgtaaaaggcagcctgcatgtctgtacagtctagagttgtaagctgatttattttcttactcattttgagtaaactgccaccactgccttccaatgtaagcagctaggggcaaatactgagtttgagtttctgttctgcatacaaactagcacattttaaatgtatatgaagtttaaatagcaacatcctattcttatttcattggaaaaatccttttatattagtttccaccatatcttagactctgccagatcttgccctaagaaaaggtaaagtaaatgtgaattgaaaaatagcaatttgcggcctggcacggtggctcatgcctgtaatcccagcactttgggaggccgaggcagtcagatcacctggtatcaggagttcgagactagactgaccaacatgatgaaaccctgtctctaataaaaatacaaaattagccagatgtgatggcatatgcctgtaatcccggctacttgggaggctgaggcaggagaatcgcttgaacccgggaggcagagattgcagtgagccgagattgcgccattgcactccagcctgagtaacaagagtgaaactccatctcaaaaaaaaaaaaagaaaaatagcaatttgcgtgattgttattttgtttttatattgcatctaaaaacaaaaagctgtcttcttgaaacaggaagttaaggacaaatacgtaagctacttcctggaaaagaaatatatgattgttt

SEQ ID NO: 913937 - DNA, 4001 bp, Homo sapiens
tttgttttgttggtttccagagtgcctgaacaatttgagtactcttttggaacatttaaagcataaactgtcacacataaacaacacttaaaaatgctaaatgtccatttagatggttttctttccctttgtcagctttgcaagataaacaggtgcccaattcccactaattttatttgattttcaataaaagagttcaactgtaaggaacataacagagctactaaagccaacgtcttccatccttgtgtcgggtctccaaacgtcccccaaaattatctttaaaaggccaaatttatgctattttttccaatatatactaaaagcaaaacaaaagtctaaaaagcttttacttcttaatttctgagagaactgaagatgccaccggagtaccctgtgtacgctcaatagggctgaccaagccactttccaacgtcatttgcagcccccaagcccacaggggccaggccactgtcgggaacaaatgggaaatactgcacccaaacgaatgcgctccccaccaaagaggactctactacaaaggaaatatatccccgggtgcttgggagaaacttcagcgtgggctgttgtcaaacacagacacagtcggtaaaacaatttaacaaaacgccttttcacttctgacacacagtagaggaatgctgtgaagtggagacaatgttatcagtccaccaggaaaaagggaaatccactcaactcccaagtcaggcccggccccgcagcccagccacatggaaccagcccgggataggtaggagctgaggtcctcgcaggaaaacttttcattccgcgactcttccaaggttgtgctttccagagcccagcaagtgggatcagctcagtaaatgctcgcaagcgagtgccaagtgccagcggtggccctcccgggaacgcctccccgaccccaagccggcgactccccaaaccctgcagcccccggacgcgacgggccgcccctgccggcccctaccagcaggggacatggaggaaaagccccccgccgctgttccgcccccgcccgagtaagggagaggaggcagaaggctcgcaacccgcctctgtcggaagggcagtcacgaaactctcctcacaccaaaagttcccagtccccggcctgtgcccccggggcctgggagccgggaaaggcctggggctggatttcccggcctgcgccccccgcgcgctggctcggggcttggctgggtctgcagactccggggaggcgcccagggccggcctatgcgccgctgcccggctcgccccgcgctaccgaggccggagctcccgggcggagggtgagggcgggggccgcgggacccggctgggtgtcccagaggctgcgccccggcccgcgcagagaactttggcgcccgcagtccggggcggggggcgcccgcgaggcccgaccggccgcactttccctttccccgcctccctgcgcctctcctcccccttccaggaagcgccatattgatcccggcgccgtccccgccgccgccccctccccgcccgcgcccccggcccctcaccttggcgatggccttccggtagcgggtcaccgcctgctggatgaggctgaaaactttcatgtggccgtccccgcacggcacgaccacccgggtccgtccgaagcacacggtcactttcatgccgccgccgccgcgggcgggcccgcgcccctcgccgagcgcagccggagcagccgaggccgggaccgaggacgctgggcgcggaggagccgctggggactcgggcgcgcgggcggctaggggcgcgggcaggcggcggcgacgccggggggccgctcagctcgcatgcccggcccggccgccctcgcctcgcctcgcttcgcccggggcttgcctcgcctctccccgccgcggcgcccgcagcctccggccacctgttcggcgtcgcggcgcgctcgccggcggctgcccggggctgtgtggcgctggcgctcgctcggggccgctgggggaggggacggcgggaggggaggggaggggaggggaggggagggggaggagcagggcagggcacacaacaccgcgcacatgcggcagggggaggcgcggccggctacccgcgcggggcggagcgcaggaccgcagctcgcgcccccgccaccgccctcgggggccgacctccttccctccttccctccctccctccctccctccgggggcgcgggacccctcgccccagtgccagcacgggcaggcggccgtctgcccccaccagccctggcccaggcgccccccagcccccttcaccccgcccgcccagcaccctgcagggctgcgtcgcccctcctcggggacgccccttccacgcctccagaagtctccacggagccccccttcccctttctttgtcacttttaatcccattcctcgaactggagggttttgggtgcaggcgctcccggggaaagcagtttgtgctcagtgcggtgagtcccctcctcaccgccccggaggctccagcccgagcctctccgcccgcggggactcgagcctgcagcttgctcggctgggtttctgccctgcccgctccctagctctgctgcagggccggcagcggcagttctgcctgaaacgcaagaattaatagtctgctctggggagacagtggggaagccgtgagcgaccgggccttttccagaggccactatttaccttgaagtttcctgttgaccctctgctgacccacccgcttaaatagattagaacttaaacatcgcaattctgatacatttatttctttgaagttctgcagcataaggaatcctaacgcgaatccgtgaacagtctattccgacggcgcagagaaatctcacgcggggatccccacgatgtgccggcgcttaacgcagacgcccgaacccaggggaaggctgcgactccgcgatgagtgacatgcgggcttgagacgttctaaaggaacgtggaccgagttagggaacgtaactgaagctcattttgtcttagttatggactatgagtccttaataaatgtatgtcattatgtttaaagaatgacaaatgtctgcaaagagtggtccctgtcccaagccctttccagactatgtgaaattcttttttgccagttgtttccaagacacgtgaaagcaatcaagctcccctgggttggcgcagaacttgagcacttaagagctggaagagctggcgatcgaccatccatcccactccacctccaatcttaaaacaaggaaacaagacacgaggttcgtccgcttgccacactccctgcgctttgcagcaccgcagctgccccagcatagtgcagtttctcctaggaaacattgcccttcctctcctctcccagccctggaccaccactttccaccacctgtcccagcaaatcagtgcagtggtgttagccccatcttactccaggacattgacccagggccaaagtcacttgcccaaggcggcagagaaagctcaaggcagacccagaaatagtctaggtttccctccttccactcagccatgggaaaggctcctcctactgctgtttggctgcagcactagacatttctagccagtaattaagtttgtgacaacgatgacaacaactgttgatgtgggttttttgcttcttacatagatacttggatccacaacaacaattactgataattataggtgttgtttctgttttcatgcattgggagagtatactactagtttagaatgtatactactttattttattttgtgttttttacatttatttatgtatttatttttatttatttatttatttatttattttgagaccaagtctcgctctgttgcgcaggctggagcgcagtggcgtgatttcggctcagtgcaacctccgccttctggattcaaatgattctcctgcctccgcctcccgagtagctgggattataggtgcccgccaccacgcccagctaattattgtattttcagttagagacaggg

SEQ ID NO: 913938 - DNA, 4001 bp, Homo sapiens
cttctcttcagtctactcttaaactttggtgttcctaaggcatctgccctaggtcacctttactttctctacatgtttatgttatctatgcccatagcatccattataatgtttatgccacgaactccccaatctacttctccagcacagaaatatttcttctcaagtatcccattctttcatgaatccatccccttccctattgccagcatccaggcctaagctacaattatttccaacctagattaactccttaactgagtcttgatgctccacttgagttccttttcaatccattctttattttccacacaccagccacacagacttttcaacaaataaataagtctaatcaagtcactcccctactaaaaacccttgagtagcttatcaatgcccttagagttcaaaatccttagcaatgtctacatatccaatttgatctgacttttctgtaccaccctgcagcctcatctctcacactctcttgcgttcactctatatatcaattgcactcctgtttttgttttgttttgttttgttttgtttgaggcggagtttcgctcttgttgcccaggctggagtgcaatggtgccctctcggctcactgcaacctccgcctcccggatgccagcgattctcctgcctcacctgcctcagcctcccgagtagctgggattacagttgcccgccaccacgctaggctaattttttgtatttttagcagagacggggtttcaccatattggtaaggctggtcttgagctcctgacctcaggtgatccacccgccccagcctcccaaagctcagggattacaggcaaaaccaccgcgcccggcctcggttgcactcctgaaacacttcttacttcctcttcatctaactcctactcattctacagtcctcagaataagcatctcatcttctggaggactattttcgattccataaattcagttaggtaaaacaatctgtcattcatctatcagaacatccattaccttttattatattaacttttgctatcgtctatctctccagatagattttaaggtatgaaggcagaggccaagtttctctcgttcaacactgtataccagggacgggtacaatgccagcttaaactaatagctctgcaccctgggacccagaatctgaacaagtgaagttgttttcttcctatctagaggctgaagcgccctactgttttacatacacaattagatctccttgacgactaaggcaatttctcaatcaaacctgaagaagcaaacaggtggtggagtctcctgccattttccgccctgtgagtgactgctcatcagagtttctcacatcaatcgcactgggaaaaatgcggccccattcacccactagtggctttggtagctcagcaagtggacctcaagagtgacgatgcacacaagaccagaaaggagtgactggagcccctgggtcctcagactgagaccagaaggttcgggccgaggcgaaggacaaagatttttattttcccacgtaccaagcgaggtggcgctgcctctgtgctgtcccgcccgccctgggacgcaggctggcgaggacggtgggaccctgaactgcacgtgagcgtccttggggtcgaggacgcgcctctgcctgctgggaaagctccgggcgtccgaagcagccggcgaagttgtagcggcgccccagcggggtcgcttggtgcagggttcacagccggggcccgcattcatgctgggaccagcagcgcactgtccccgggccggcccgggcggagagcctcattcactaaccctgagagagatggactgcgcctccttctcagcgcctgcctgcaccattccctctctgccgctgcctgcttctgcaattgctgatccgccggcctcccaagtcaggccgtaaacactcgcctgccttccctcttccactggcaccccacctgcctcaatgcgccgctttgattcgggattcgttcactttcccaccaccggaaagctgccgtcaggcgcttccggcttccggggcgcacactgccgcaaagcggaagtgtggcgcttaacgggaaccggcgcccggaatgtcagcgtgtgaagtaggcgctggcaacgcggggttacccgctgttattgaggagtaacggcccagcggaccacccaggcttgaggcagcggcgggaaccactcggtttgctgcgataccatggaaggaggcgggggaagcggcgacaaaaccacaggggtattggccggctttttcggagccggcgaagcaggttactcgcacgcggatttggctggcgtcccgcgtaagtatggggcctagcttgcgattatttctgactggttcttgcgtttacactaaagttgcgcgtcccatgttttatgttgttggtttttttttccttgctggcgtttacaagcttaagtaccagtggtggggttagtgtatctgcatggctgctctttcaagatagaaaggcctaaaaaagggccacggatctcctggggaagctgtccgtgattgacctggactcgcgagatgatgcatgttttcttaggtttatatccaagcctcgtacgttttgtgtgtggtgggccgtgtgattgacccttaagagtagagcccagctttgggagtaaatgtattccaaatagcaagcccgtagttaactttttagtacacagtgacatattctgagcctccaagtagccgtaagggcagaatattcagtaatattgcatgtaagtgagaaataaatatgacttgggacaggctaggaaaccttctttaggagctaggaagtaagctgaactttaaaggtgatatatagacatgaagaaagaagccaggtaagaattataggaaaggaaataggcaacatcaaggtatacagaggcataaatatcttgcctttgcctctcctcggtcttgtgaatatgttttccagaactttggtactttgtaactgtggttgttcaactagataaatagaacttggacctaaagataggcagttggtcgtggataaagcctttacgaaagtactttctttttagagaatccttgtaatatttctctaggtattttatactaaggaacaacaacaacgaaatatgttcagactgactctagtgcaaaaaaatataaaagacctttcatttccctggtgtcacctttgtcaaaaaactgaatctacaacacatggtgttttgtttcgttttttttttgtttgtttttagagtcaggacctcgttctgtcacccatgttggggtgcggtggcatgattatagttcactgaagcctggcactcctgagctcaaacaatcctcccctctaagcctcctaagtagctgggaatctaggtacgtaccaccacacctggctaatttttaaaattttttttttgacttattgtggagatggggtctccctgtgttgtccaagctggtctcaaactctcgaactcaggccatcctcctgtctcggcctcccaaaatgctgggattcctaggcctgagctactactttacctgtttagaacacagtttcatattaatcttagtatttctgagtttcagagcacaaagggcatatacacttccttaatgtgacaatattgttaaattaatttgattaagatttgaaggtaaattgggggaccagggaatgaacaccatttactgagcttttacagtgtgctagctacttttctgggggcaggactatagtggtttttgtgggtttttttttttttttttttttttgaaaagaggacccttgcgctcacagagcttacataatactgaggtaaaccaacaaacataaattaaaacattgcctttagtgataagtgctgtaaagggaataaagcagagtcatgagattgtgatggaagcaggatgccattttagagcggattagggaaaacatctcaagggagttgacatttgagctgtgacccaaatacagtacaaatgcttgggaggcaag

SEQ ID NO: 913939 - DNA, 4001 bp, Homo sapiens
agaaaaatatattttatcccagaagtatttttaaacgccccccccaacccccgcaacgctaaatatatgattagcgaaaaacacagctctccctcctcggctctcttgtcctaaacacaggtccaagccgggtctaaagtttccttgtgaaaagttacaaattatccttaattattaatctgcagatagggaggagttttctatttagaattttagcttttaaaaaaaaaagcctgcaaaaaaaatctcagaatagtttttcaagctaaagacatggcataaattcaaattttattaaaataattccctcttttctctatttttttctcccttctcccttttcttctgtaacatcatgtcaactttctttctttaatttcctttcccgtgtttggatttctcttttcctttctcctcagctttggcatttgctttccttttgttctttccccctcattttttgctctttgctgaccccctggccaggttgctggctgcgtgatcctcaatggggagtcggcagtctaggcaaggagcctccagagctgagagcagagctgcactctgccgggggcccacctggaaggctgcgctgctggctctctccctgacttcgatttcttctcggagcccctctttgtttttagagcatcccccaggcagaggcagggaaagatgaccatcgtgtcttgacaacctgggattcccaatgtgaagggaagggaaggcaagggaaggggggtgggaaagaaaggaagaggaagaaaatatttcaaaccaacccacaagaagcctatgctgggctggaagggcctggagatgctgagagatgagggtcagaagggggcaccccacccccacactcttctgcccaattgtcctgacactgaggctgaatactcttggagtctcctggaccccacgactcttaagtttgagaaagataaagatgtggggagacaggagagggaggcaaacagaggaagagagaaagagagaaaagacagagaaaacaacaaaacaacaccctgaaaactgcctgctaatttgccccccagcccagggcaagaggctgactagggagagggtggctggaaccagggctccgaggccgtggatcccatgacctaagaaggagcggatagaaagagcaaaggcaggtgatagggatcagggaaggtaggaaggcaggcagacagagaggtaagaatgggtgacagaaggcaggagagaaactggaggcattagaaacaccgggcgagggagagaaagaacgaaaagagggaccagaagccagggaggcctccaagatgggacctgagcgcgaggggccggggccacgctgggactggacagggttgggacggagagccccgagccgggacaggagccgggcgccggtactcacggtgcatcgcggagaaggggtctgctttgcagtgcatatccatggggaggcagaggagcgggagcagcgcggccgccgccgccgtgtcgcctctcaaactcaacttcaggacttgaggagaaaagggagggacggtgggggagggaggatgagtgaacgcccggctgctgcggggcgcgcgggggcggggggcgcagcactgcgctccccgctggggctcctccgggttggccggagcttgcaactgcagtagccgcaacttgccactgtcggggctcggggctgggcggtcagcagaatggccccggggcggtgggccgggccggggtgcactgggggcgcatggctcgcgctgcagctgcagccagggctgaagctgggcgggggaggcgactcgctcagctcccctggaacctggtcatccgagaggcggtggtcggagagcgcgcggggcgggggcggtcagagggcgccgggaggggagccgggcctctccaagtgctggcgagttggcgaagttggcagagaagtagcaatcccggggatgtccgaggtggcgcctgcgggaggggagcgcgcgggccaggcccccgcccccggaaaaggcaggcgcacgccgccgcggccgaagggccgggagggagggagggagccgagcggcgctggcagctctgggctggccccaggtgggttgcggctgcgagaagactcggccggagactggagcctcggctcccggtgtgtgtctctctaaaagctgcaaagccccctccagacctcctccccctccccgcgccgggagatggatgacttgtcagacaaaggcaatagattccaccactctgtgattcgccagcgctggagccccgagcttcggcgaggagggccccgagcctgtcactccggtgccggctaggggagggcaggggagggagaaatgggagggagggagggagggagcagccggcgaaggaagagggagggaggggagcggaccgggggagggggaatgggagcccgggattaaaactacactgagaaacgaaactcgccgataagataaacgctagataaggataaagagcggtcagtctaatgaatattcaggtaacgacagagggcctcggagcgcgctgcgctgtgaagccgggctctcagttctaactcgcccagccctgccatccactggccagtgcccgcctgggccgcgcggccccgggcccagtgcgcatccctagccccaaccccaccaccctcggctctgagttcccttccgttccttcccggctcttccttcctctctttctggtccttccctttggcctttccctccggaggtaccttcccacccacgcaccccccacttctcattccacggaaaagtgtccagcagtttgtcttgtcccctcccgttccacgcgactgtgcgcagggcctccccagtccccttgcccaccgggtctgggcagtccagaacgcttggttcagaatcgagctgaagacctccggcgagtacccacctgcctcggtgggacccagcggatggcgggagagccgggggacttggtttctgaaccctcgggtgactgggaagggggtacaggggagggaaacagtgcggagctgcaggtcgctggcggcagaggatgtgggagacgaggctggctctccccggctggggagaagaggaggctgcggacgcggctgagcgccgcccgctgctagctcggtggatccggggcgagcgcaggaggcgcaaccacggggacgtccccactcctgccggagcctccgcagctctctctggcactagctcccttgctcgctggggtccgctcgcacgcaccaggcagaagaagccctttgtctcctaactggttaagtacagaatatccgggagatcttcatgaaatattttccctcgtctcataaatcatcttggcacttcagctgatgttttaactctctctccctccttcgctccctccccccgcttccctgggtctgcgaaagggcggctcggcgaagcttgcgcagcgctcttgcagcccgaatccgagattcctccagcccccgtctgcagctccgggcgccccgcggaagcgcggcggactcgcgctcccctccctctggccggagcctgggcggcagataccatggggagagatgcacctgcctgactcagcctaactactactactgggcgtcttgtacccgggtttttgggatgcccttattcctcaggaggagctcaggccaggctcagcgggacgaggttctgagcctctcactcctgtggggcctgggtccgctgggatcctggcatttgccctccctcctgtatcctccagagcccaataagcttaatccacctgcggggtaaagtctgggaggaaaacactcctcaccgcctgcccctcccagcccctatcccacttcccttgggtggctaggcaggttggttcccttgggctagaggttgaagacgcagggcctagcctctaaggtcagtctcttcctcttgaggcctgcagatggcgctcccgggtttgctttggcctcacaaccccacgaacacgcactaacttcgtgt

SEQ ID NO: 913940 - DNA, 4001 bp, Homo sapiens
cactgcagcctcaacttccagggcacaagccatccttttgcccagcctcctgtgtagctgggactactcgggagtcccatctactcccgtgcgctgccatcacgcccagctaatctttgtattttttgtagagacagcacctcactatgttgcccaggctggtctccaactcttacgctcaagcgatcctccccctcggcctctcaaaggcgtaagccaccgcggccagccttttttggaacttaaaaaaaaagccataatgtgtcattaggaaccttggtgacatgacagcaaaaccaaaatgtacttatttattaggtgtcacttggaagcgcaattttcaacaacgcaaaactataaaaaaaacccaacgtcggcctccacaggctaatcagtctccgaggcactgacggcgggagagatgaaaacgcgaaggccagaggagaaaaagaggaaggatttgcagagagaacggtaacgtggtggacatgaatacacccaagaaacccggatcccgcgcggcacattgggacgaagcgcgctggcgggcggccagcaactctgggccaggggaaggaggcggacacccagcccgagagccgaaatcggccccagtggacgctttcatcttcgcggcccagaaacactcctatttttcaccgcacaatgcaaacatggtggaccagaaaatccgccccgcgtttgccggtcgaaccacgtggggccctttccgcgccgtcgatgcctagccagggcggggccctcacagaatttgttcacggtgggggcagatcaccggagaacttctccagagcgctacggcacggttccttctacacactggcagaactgccattgccatcgccccgaggcggcagaatggtacgctctgaaaactggatggttctaacgtaagcaagaaaaacggtgcgcgctgcagctctttaactggaacagcctctgctcggtctacctcgcccccaacagctgcgcaacccaccaccgcgcaggcgcgctgcgtgccgccagcgccatgcgaaaccgactttcccgtctcgcgagagtggggccggccgccttcgcagttctcgctccgccccccacttcttgctcgttccctcccatccccccaagccagtagctgtgctgcgcagctccctaagcggttgtcaccgctggagacggttgggagaaccgttgtggcgagcgctacacgaggcaaacgacttctcccttctttgaactggaccccgcgagcaccagagtcggcgtaactatcgcctgacagggtatctgaagtaaaagggggtaggttgggctggtggtttcgagagcggagtcgggagaaggacgaaaggccgggaggggctgggttggggggtagtggggtggtcgccgctcggaggccgccgcttggaagcggcggggctgcgcctccccgaccatctcccacttcagggagggcggcttgccgatgggaggacttgctcaggtggaattcagtggacgacgccgaggcccgaagtaggggacatccagcattttcccctttccctgctggcttggcctccgccattttgggtacagtggcgcggccacctcggcttcccgcccttccccgctctttttacttttttgttccccagcttccgaaaactgatctagaaggccaggggagggggtggtcaaagctccctggaagggatgagggtgggtagtgaagcgagcagggaaaggccgggcagttgggtggagggaggatcgggtttgccgggcgcgctcccgatggaaatggcgccggatgggcctggcctcccaccgcggcctcccttcctccgcagtctcggcagggctacctgggctgacgggactgcgagtgacttctgacgcagattcccaagatgagagaggctggagctgggggaggaaagccaatggcgacgaaggtgctcaactcccaaatccaggacaaaggaggcagacggcctcctttgtaattctgccgcccggtggcgaagggttttaagccaggcttggctgctgacgggagggggaaggggcgtactctccctagctttctggtctctagggcagctagataaacggaaagtctcctgggaggaataaaggacgcttagccggcccttatattccagatttggaacttcgaaaagagtacgtactgattttccaaagggttttttttttttcatgtttaaacgttaataaggacttcggggatgattttgtgagcagaaaagtgggtgatttatcaaataggaatgtgaaatgggcatgtttcaagtaggtcgtctgggcccagtgaactataattgttgctttttgaactttcggggtgggggtgggtgatgtagcaattgttttgcgtagtttggcgtatatatgttagaatttgtttttaagttttacttttgggaaacagttaaaacaacccagtgatggtagatgtgtgtgtattgaaattgagctttcgatgttaaatcttccaagagttgtattttgtgcagtttttttttccgatggcattaaggctctagaagtaaaatacttcaaaatacggttatggtttattttcttttggtagctaggcatgttttttctttagtgtaggagtatagtacactgtaatcgtattttaaacaagggaataagcctactaaacataaaaacaaattgtaaacccagtcacgtggtggtggtgtgattcggatgagggtcctgagaactggatccgtaattttcattgaagacagtacaaaagggaggagaaaggcctgagagtaagaatttctgataattcatgtaaaactttataagaatattgttacctacttttccagctctaaaaacaaaaacttattattattgaagatgttcagtgatgctttctcaagattgccaaggaaaagtttacgaaaatcttaccttgaaacagtaggtttgagtgaccctttgaagagatagtccagactgtcctgtaaagttatatatgatataacaaatagctttactaattggattggactacacatcttttttctgtcctcttttcatttgtgccgttatctggaaatccatctaattgcctttttaaaataatgttatctttgatttccttgttttggtaaactgactgaactgcagtagataaaaacctggttctagtgaactaacattttagagaccttacctccttaagctattaggggtgtgtctagttttttgtttttgtaaagagcaagcccattgggaaggaatgatgtaaattttctgttaaacttaaatcatcagcactttttccaaaaaataaaattcattctcatttcttgaccactgggctaccatttagaaagttatttattgatgtaaaatcctttatgtattacttcagaagataggctatgcctccgtgttaagaggattctctatttcatttgttctttagtggattttttttctttaacgactttggtatataattcacataccgtaaacttcaccaattttaaatgtacagtttagtggattttagtacattcacagcgttgtgtgaccgtcactacaatttaattttagaacatttttgtcactccaaaaagatatccataccctttactggtcattcccattgctggcatcctccctcccctcaagcctcagacaatcatgaatagaaatggaatcatgcaatatgtagtcttttgtgactggcttgtttcacttggtgtaatgtttagaaaattatacttaaagtctcataaaacttgaccaaagctatcctcatattttaactgtggtatcttttattggtactagcacctagaattcttaaagcagagtagtgattagccatgacattgttgcaaagaaaggttgaggtggattatcctgaataattagtaaactgttttaagtagtttctgacagctttattagagcagattgcttcttcctgtgcccttagagtttttcttgttttt

SEQ ID NO: 913941 - DNA, 4001 bp, Homo sapiens
acctaatgtgcgaagtgccctcaaggcagcccaaattggcacaattcaggccatgagtggaacctcagagaaagcaaggaagcaagggtcagtttcatcctaggaggatccaggtctaggagcttaacagatcccagaacctaggcttctagagtagcaccaccccagggcagaaatagagtgctgaattgaaaagatacccttaggggtggggagggaatgtgagggaggttgatttagcttttatgaggcagcctgcagactggacaccatgtgttgattggcaggagttttgagacccgctttcaccatttaccagccaggtggctgtacctctcttggcagaacctccacctccacagatcatcatgaggtgccaatgggacactttaggaaactccactgctataaagcaaatgtcatctgcattacaaaaaaaaaacttcctaaggcaagcaggcttgtgatgggcctggtagcatttggggtagctgaagcatcgcagtgctttcctaagtccgtcttttttccctgctgttttccctcctgaaaacgtgagctctctctggactgatgtagcttggcccctctcttcccctcggctctggatgactatagggattgaatggcagcagcgatttgcatcatctgcccagtaggtaggtctctactccagagctggccttctccccgtggctgaccgcctggtccgtgtatctagacaaccagaagtcagccaaagcatcagagcccactgtttacttccttggctcttaaaggggtgggtgagtccaggtgagctcttaggaggcttccctttctcggtagagccttctggaaccccccaggtcgcacagcctgcggctgaactgacaaaccttccaggtgccggctctggagacagagagggggacgctgccccgtttgcctcctctggcgaggtgtggggagtggttaccgatttcccaagcctgcatctctgggacctcagcgcccctcacaaacagccccactcatcctccctcccccaagtccctctcctatcaaaaggccctcccagtcttgcctgctccgaaggcctgtggaccagaaatggtctgatgaagctcgcgagcttacagcagagcaagggccccgcccccgcccccgccccgggggtgggtgggggaagctcacgggaggagggctgctccagcgccaccaagcccccgtggcctggcacgggcctcaagccggcgcggggagtggctctggggccagcataccggcgcagagcgtgagtcccaggcagaccccgtacccagagtgccagcgggaaggggcagcggacaggcacgcacacgagcgcgcaaactcagcctccctctcgctcccaccccagtataaagcagaatcgggccaccaaggggacgagatccgtggactcctccacgactgtcttccccggcccaggaaggtcgtaggccccgcccccggaagggtcccggaacaagcactggccggggtcagggcaggcctggcctcccaactgggtgggattcgaacccgccaccgcccctctcagggcttcagcttcccctccccgccgccagcgacagagagccgggcagagaccccactttcggaccccggcggctccgcaggggactcgaaaagactttcccccgccccttcccgctcccacctcgcccgcggctgccccggccccgctgccccgatcgcggccgcgcacccctggactcaccatggcgcgggcggcagcaggtggccagcggagagggcaggcggcggccgggcgcgcaggctgccgtcccggggcggggccgcgctcgggccgccctccggtaatgattaacgtccccagccagggacgcgctcggcctgcttgcttccagcactttcctcgctgctcagagccatcctccgtgcttgtttcagggagctagggtgaagcatgagggctccaaatgcccgcttctgggttggaatcccaccccgccgcttacagctgggtggccctgggcgccagaatacctatttttttctttataaaaatctcttatttggatataattgacatgcaataaattgcacatattcaacgtgtacaatttgataaattttaatgtttccctcgtgagaccatcaccgagatcaacattatgaacatatcatcatccctgcaagttttcccttgccctttggtaaccccttcctcccgaaaccacctggccaggcaagcactgatgtactttaggtcactataaattagtttgcattttctagaattttatgtaaatggaccatagagtatatactaggcaggataactgttttggggttcagccatgttgttgcctatatcaatggtttcttccttttatggctaagtaaaatttattttatagtattgcattgtacagatagactacaatttgtttagcgattcactattggacatttgcgttgtttaccttttggctattacaaataaagctgctgcgaatatggtgcacaaatcttcgaaagtacgtatgttttaattttccttgagtaaacacttaggaatggaatgcctgggtcatgtggtaggtggacttttataacttattaggaaactgccatactgttttgcaaaatggttgtatcattttatattcctagcagcagtgtatgaaggttgcagttctctgtcctcaccaacacttgatatagtcagccttttaaattttaattggtgtgtagcagtatctcattgtggttttgagtttccttgattagtaattgtattgaatgtcttttcatgtacttatttgctaaggataagttttttttattgaatagcatgtttgaatttcctgcccattaaaaaagaaattgggttgtcttcttatcgagttttgagggtgttttattctggatataaggacatgatcaggcagtgatttgcaaatattttctttgcattatcttatggtgcctttcaaagagcaaacgttcttaattttgatgaaatccaatatatcaaatgtttcttttatggatttctattttgatgttgtacacatagaaatcttggcctaacccaagatcaaaagttttctcctatgttttatagcttttggttttacatttagtctgtgatccactttgagtaaatatttttatatgcttcaagttatagatccagatgcacttttgcacatggcgactcagttattcctttctccactgagttgtctttgcacctttgtaaaatatcaattgactgtatacatgtgggtttatttctgagccctttcttctgttccattgatctgtttgtctgtcatgacagaacactaccttgtcttgattattatagctttataataagtcttagagtcagattagaaaagtcctctcacatttcacatttttctattaacttttattcttgtgctccacttttattccccgccccccaccaccgcccatagcagcctctctaatgtgttaatgtgtatttttgtttgcacaggttcttgcaaaatgtgtggtgttgtttcgtctatgtgtatttttaaatttatgtaaatggtattatgtaaatatattacatttctcagtctgtttcttacaaaacagagtatttagtggaaaattaagatctacccatgttgctatatgtatattcaatctgtagcttttaactgcagcctagtattttgtaatgagaatctgccatgggtttcttgttctatcagtgatggacactcaggttcccttcaactttctgctgctaccaccacctcccaagcccgtgagcatgtgggcacacaaacacatacgtacacagagttaaacaacaatgctgctgcagtgaacatctctaattgctccctgggctgtgggcagtttcttaggcaacttaagtatatccataccctataaatccagcaattccccccatgggtgtgtatctcaaaatagttctagatgatgtccaggatggggacacc

SEQ ID NO: 913942 - DNA, 4001 bp, Homo sapiens
ggaccttccctccatgagattattacatcagtgagggcgtaaaagcaaaataaatcccagatgcaaatatgttactccacaacctctcaggaagagtacccatgactctccccccttccttttcctattatgtacttcatcatatgcaccccacgtccctaccgtaactttcacgtgtattgaagaggaaacaggcctagagaggggaaacgacttgtctgctgttctttcccgcccacccctagccagtgatggcgcagtgttgtctgtgtgtcagcattgctggggctggacgaaggagctacatttaaaataagtgtccatcccattcttagccacactgcagctgaccgccgttggcactacctctagtaggtcctcagtcatgctcccaggcagcctctggtcctgagccgccagggctaggtttctctggttttccgtctgcttttctggctggttgggaagctcaggccaaagtggaaggaacttggccaaaggcagctggcaaacctagtgccccatcctatttacctaatgtgcgaagtgccctcaaggcagcccaaattggcacaattcaggccatgagtggaacctcagagaaagcaaggaagcaagggtcagtttcatcctaggaggatccaggtctaggagcttaacagatcccagaacctaggcttctagagtagcaccaccccagggcagaaatagagtgctgaattgaaaagatacccttaggggtggggagggaatgtgagggaggttgatttagcttttatgaggcagcctgcagactggacaccatgtgttgattggcaggagttttgagacccgctttcaccatttaccagccaggtggctgtacctctcttggcagaacctccacctccacagatcatcatgaggtgccaatgggacactttaggaaactccactgctataaagcaaatgtcatctgcattacaaaaaaaaaacttcctaaggcaagcaggcttgtgatgggcctggtagcatttggggtagctgaagcatcgcagtgctttcctaagtccgtcttttttccctgctgttttccctcctgaaaacgtgagctctctctggactgatgtagcttggcccctctcttcccctcggctctggatgactatagggattgaatggcagcagcgatttgcatcatctgcccagtaggtaggtctctactccagagctggccttctccccgtggctgaccgcctggtccgtgtatctagacaaccagaagtcagccaaagcatcagagcccactgtttacttccttggctcttaaaggggtgggtgagtccaggtgagctcttaggaggcttccctttctcggtagagccttctggaaccccccaggtcgcacagcctgcggctgaactgacaaaccttccaggtgccggctctggagacagagagggggacgctgccccgtttgcctcctctggcgaggtgtggggagtggttaccgatttcccaagcctgcatctctgggacctcagcgcccctcacaaacagccccactcatcctccctcccccaagtccctctcctatcaaaaggccctcccagtcttgcctgctccgaaggcctgtggaccagaaatggtctgatgaagctcgcgagcttacagcagagcaagggccccgcccccgcccccgccccgggggtgggtgggggaagctcacgggaggagggctgctccagcgccaccaagcccccgtggcctggcacgggcctcaagccggcgcggggagtggctctggggccagcataccggcgcagagcgtgagtcccaggcagaccccgtacccagagtgccagcgggaaggggcagcggacaggcacgcacacgagcgcgcaaactcagcctccctctcgctcccaccccagtataaagcagaatcgggccaccaaggggacgagatccgtggactcctccacgactgtcttccccggcccaggaaggtcgtaggccccgcccccggaagggtcccggaacaagcactggccggggtcagggcaggcctggcctcccaactgggtgggattcgaacccgccaccgcccctctcagggcttcagcttcccctccccgccgccagcgacagagagccgggcagagaccccactttcggaccccggcggctccgcaggggactcgaaaagactttcccccgccccttcccgctcccacctcgcccgcggctgccccggccccgctgccccgatcgcggccgcgcacccctggactcaccatggcgcgggcggcagcaggtggccagcggagagggcaggcggcggccgggcgcgcaggctgccgtcccggggcggggccgcgctcgggccgccctccggtaatgattaacgtccccagccagggacgcgctcggcctgcttgcttccagcactttcctcgctgctcagagccatcctccgtgcttgtttcagggagctagggtgaagcatgagggctccaaatgcccgcttctgggttggaatcccaccccgccgcttacagctgggtggccctgggcgccagaatacctatttttttctttataaaaatctcttatttggatataattgacatgcaataaattgcacatattcaacgtgtacaatttgataaattttaatgtttccctcgtgagaccatcaccgagatcaacattatgaacatatcatcatccctgcaagttttcccttgccctttggtaaccccttcctcccgaaaccacctggccaggcaagcactgatgtactttaggtcactataaattagtttgcattttctagaattttatgtaaatggaccatagagtatatactaggcaggataactgttttggggttcagccatgttgttgcctatatcaatggtttcttccttttatggctaagtaaaatttattttatagtattgcattgtacagatagactacaatttgtttagcgattcactattggacatttgcgttgtttaccttttggctattacaaataaagctgctgcgaatatggtgcacaaatcttcgaaagtacgtatgttttaattttccttgagtaaacacttaggaatggaatgcctgggtcatgtggtaggtggacttttataacttattaggaaactgccatactgttttgcaaaatggttgtatcattttatattcctagcagcagtgtatgaaggttgcagttctctgtcctcaccaacacttgatatagtcagccttttaaattttaattggtgtgtagcagtatctcattgtggttttgagtttccttgattagtaattgtattgaatgtcttttcatgtacttatttgctaaggataagttttttttattgaatagcatgtttgaatttcctgcccattaaaaaagaaattgggttgtcttcttatcgagttttgagggtgttttattctggatataaggacatgatcaggcagtgatttgcaaatattttctttgcattatcttatggtgcctttcaaagagcaaacgttcttaattttgatgaaatccaatatatcaaatgtttcttttatggatttctattttgatgttgtacacatagaaatcttggcctaacccaagatcaaaagttttctcctatgttttatagcttttggttttacatttagtctgtgatccactttgagtaaatatttttatatgcttcaagttatagatccagatgcacttttgcacatggcgactcagttattcctttctccactgagttgtctttgcacctttgtaaaatatcaattgactgtatacatgtgggtttatttctgagccctttcttctgttccattgatctgtttgtctgtcatgacagaacactaccttgtcttgattattatagctttataataagtcttagagtcagattagaaaagtcctctcacatttcacatttttctattaacttttattcttgtgctccacttttattccccgccccccacca

SEQ ID NO: 913943 - DNA, 4001 bp, Homo sapiens
catgcaaaatttaaatgtgaacaaattaagagcaaagttgtaatggacatttatttttcactgggtttttttaaagcataattattagtgttttttaaaactatagttcagatacttatcaaatattatcagtgggtataccatatttttaaacatttcctagaaaatgaaatgttttatttaaatctttttgtgaataatattcaaaacttcatgccataattttccagagaagttgctgacacttaggtagcacaaactctgacctgttcaggtcacttaatgattatgtttaagggtaatttggggggcaaagttgtagggattcacatttcctgctcagcacataattgcaacagctgaggggttaggaggtcgccactcagtggaattgggcacccattaaatggcacttttatttcataggagaatgagtccacagtcaaggggatcaagttgctgaaacttgaagacacacatgtacagatacattcactcattcacacttagccacaacttaagcaaactaaagaaactaatagtaaaaccaattttctgtgaaaagaaaacaaaaaaacagttcacatgagcatatacaacaaagcttcatacctgctgtgcaaaccacagcaagcattttgcgctcaaaatatgcctcttttacagattatttgtttctctaatgttaagcaacataataacttaagtatttggttactagatttgacaattggctcttttgtgaaagcaaatgagtatgacttggagttaaccttacaggaggccatcatattatactctagttaacaatggctttctgcatacgtgctacaagtccatcaaatcgatggccatctgtgtgtactagagacacagagtatcaacacactgaacctgaaacttgttattcagggcccacccactctatagctaccaaagtatattttttaaagtaaaggccacatcacaaagtgggaaagctgttaatactatctagcattaattctgtattagaaggatacagttgacctagattcaaattctaaatggttaatgcttccagatacgcacaaaggaagtaaatattctaataaactaaaacatccacagtaaaaatatcagtatactcacaaaagacaaaaaatactgttcattgtgaggcagaattagctactttaactcaactgccaactataacctccagcaacaaccactcataaaacaaatcatcaatatttgcacacagaaaaacaaaaagtcaattctgatgccatttttctgtattttttcaggttggaggaagtagaagaagtggttgaggactaaaaattcttttaaataacaaaccagagttataattcaaaagcttgtgtctttgtaaagattacattgtcatctaaacaaaattacaataccagacagtaatcaggaagaatgaaaggacaggcagttgtgttcactcttccagcaaataatcacttgcaatcattactactctattctttcaacaagcatgacagaaagtagcatcatgacagagatcattgtactgaaagaacatcttaactttctctgtggttcactgctgccttaaatttgaaaaaaataagagaagggcgggggaagaacttacttgcggtttaaagtttcatctttagtccatgtaagattatgcagcaagttttcttgccaaggctgcctcttgcacatccctttaaaaagaaccagtgctcataatctagttccaagacgattcattcacatgttccacctcttgtttctgtgaggcattgatatccactctcatatcatcaagaaaatgttactaggaaaatttttagaaaagcaaaacagttcaacatgttaactcagaaagcataccatcattctccacgttctgagatgtatgccacctgccttagttaccacaagcaactaacactaagctgctagcaggaatctgtctgccctctatctgtcgctattagctcagcacgttgatttcactggcactgaagcaacagcaattagctatcttgcttctcgcagcacatacaggagacagctgagtgcgctaaaccacgcactgactggtgagcgctttgcaccaattagtagcaggtgctacagcccaaaagacaaattgatgtccactgatcatcggtactggctgctttattgtactgtgttcgtcagcctgtctgatgattctctgttctgttttgtgtgtttgtttttactgttttactttatctaagaagtttagcagcttacattcaataacaatgtcgttgacaagataaaataatctcttaagcttcttttatcattctctctgtctctccctctctctctcattaaatctaccctcttatatgaagccctccacatctttggggcataaaaacaaaacaaaacaaaacaaaaaaacaatttcacaacttcacacattctgtaggagccaaaagtactctttagatttttacaaacacgtgtgactggtagtatataaggttatcacgaagaaatatactatacaaaacattatagcatatttcttaaacattgtaatatatgaaatctccaaaacaaagttttacagatggacaggtaaactagtaaaatacaattatgtcatataaatcagagaaacatttcttaaggaatctatcttgcatagtacatatttcaattccatattaaatttcacccatgtgttcacctgagcatatgagaaggaaggatctagaaacaagcaatttaggaacatattttagtagtgattgtgacagagcagataggctgaggctggttgaaaatgacaggtgaagactatcacagacaaaagccccagaacacatgttttcttaatgaaccatgtggattatttactaggatgatacattaactctaagaagaaaaagaaaaccatgcctccagaaatgttgccgtatttatgcacaagcatttgcagaaaataacatctcatttaaaacaaaatggacttatcttgcaggctcagttttccagagggagggaaaaatctttaagaatatggaaataatctgaggcaagccaaatgtgttatacattttaaacattaacacgtgtagaagtaaatcagataattatagatgaaccccttgagcctcaagtggaacccatttgtttttattttatgtaccactgaaacaaactaaattacttgcttccttaaaaccacagatcagtgggagtcaatgaggacttgtaataagtgaatacattatacacttgttagaactgatatttttagattttaaaattgatgtgttaataaagataactttattgatacatgtttaaataatgagcatattttgtgtgagaagtttttctgttcatttcactaaatgtctcacctgtggagcaatccatatattgatatttgttgaatagagcagctggtattttaagattgtttcagtaaccataagaattattaagtgtagttatttttctaatgacaattcagcctcattcgtggtaatgttcaatgataactctgatgacacatcagaaatatagctagaaaacagaaaattttatcccttcctcatcttctcagagcaattcaattattactaattgaacacttgtcaatgacaacagctgattttcattttcaaaagtaaattacaatatctagttttcagaacaacatatttaatgaaatgtgaaaatgcaatatttacttcgggatgaataaaggttaagttttaaccagtttgaaaacacagtaagcaaaatggagtcactgtaatatttactactagagatgatattttctttgaaaaaagtgttgcataatattctgtcacctcccctgcattgtaaagtccacttgaatcctactctgaatatgacatttaacttccttttttctcttaaaatatatcgtgaacattcacttctataaacacatataggtttaaattatcatctatgtttcattgcatgta

SEQ ID NO: 913944 - DNA, 4001 bp, Homo sapiens
cttatcaacgaatgtcagtgtcttctctttacaaacagaaaaatgtttcccattctgtcacataagaccttctacaggttaaccttaatatacccttcaacaactttcttcaacctgaagggatcactcctctcccaccgtctcctctgcaggttctaagcactctatccaacacgccctttctctcctctgtctgcatgccacctatccttcaagcccttctccaatgctattctcagtgcaatctttccctagtttttaatgcttacttctttcctattacatttgccttttattttgatttatagttacgttcattctttaccttctttgttagaccaaaaactcttcaatagaaactggtcatatttagtagatatataacctggataatgctactttcctgtctcaggtttttttttttttttaactgtaaaatatgtatcctctcagaaaacacaacatgaaaggtgttgattttcctaagtgcattctataaacaggaactttcccccatcttagctgttaactcattggtaaatataaagcaaccggaaaggtaaaaggcattccatcaacacatacccactgcgaatgtgcagggaataggctctacgtgtaatcatcctatcctcttgggaaaccgtattcgtgcgtgtaacagaaagcaagcataattaaaagacagggaatcagggttctggcccttacccctgtatgaccttcagcaaaccgtttcatatctgagcctgggtctcggcttcctcctctataagttgggattaactgccttgcctttcccacaggtttgccatgaaactccaaagtaagagaaagtcctctggaagaggaaatgcacggtcccgacctggggtggtactaagatcctaaggcacagagccctgtgaccaagacagttaagggaagcaagaacttgcaatgacggggcgggggcaagggggaacttttctgcgttctccggcaggacccagcggtacagccctgtggggtcccagcacagccgcgcccgcccggcaggtgcgcgggcccaggccccgcgggcgcgctgctcaggccggggagagcgagcagcctttcccggggccggcgtccgcagccggccgctctccccgccgaggtaggcacagctccgaagcccccgcccgggtcggtagccccctgcacccgaagggccctcccggctccaggctgggccggccagggcaggtgtctggaggtgtcgctctcgcctgaggcgcaaacttgggtgaggagtctggcgtccctgcagctccccagcccgcccggtacctacccagcggccgccaccgccgccgctcctcgcccgccagcgcgccggcctcagagtgaaggaaagtgaaacagaaacagcacccgccgcggcctggccggtccccgcgccccgtctgctctccccctgcaggcgggagcgcgccggctctgtggggccactcggctcaggcccgacagggcgcggcgggcctcggggcccaggtccggtgccgcctccaagggcaactccacccacttccaaccggcggcaccgcccgccccgccgcccggccacgcccccgccgcccggccacgcccaccaccacgcccggaggccgcgcctgccgcctgcgctgctcgcaggtgcagctgccgccctggctccctgtgctacacgtagctctggccaaatattatctcggttcttcttatcctcaccgtccaccccttcggttgtttacatcataacaatgactggcatattttccctggagggtttaaaagcaacggtcagtgatgagactgacgcaccctgagaatttgtctcttcagctgcgtcttccccaagtctgtcccacctgcgccgaagtggggacaaagccatcccttgatttgcaccttatctgaaaatgactgacaaacttgttactgtagtgtgggtccagagatcatggtcgttgacaactataagcaaacgggaacgttgtggaggttgagggtggggggagggtgagtggtaaagaagcattactgtttgcaacgttcaaaacaaacaaaaacccagtactctttctagtggactttgagatctacaagagaccattcactgcaaaaaccttcattcaaaaatgtgtattctagaagccagagcagtgatggcttaagaaaatgacaataatagagggtaggggagactgtcaatgcaaaatatttgctttttctccaactgataggcgttaacttcttactaaagtgatagatgactctaagtggcaaaccaacaaacttaacaaccgctagtccagcagccatacaagtgttcaaagatccatttcaaatttaaaatgcatcaagcagtagaccaaggcagctttttaaactatccattttataatcaaactttgacatgtttaaaaattgccatttctaatatcacagcaggagcaatacattttctgaaacagctttaaatgaccacattcgtatagtcctttaaagaaccattttccaaaatcatacatgccaatgtccaagctgggatcaacttcataagtcgcagcaatcacaatgagtaagagaaaacaagtgaggtcaaatgacttcatggcagtaggattactctttatgcttcatatctttcatttcagagactaaacagaacagtatgtgaaaaatcacactacttctagtgtgtttaaaatatgcattggaggatattactgtatatataccacaatatataaaaaagacttggtatgttcctattttgtgtctgaaactattttaaatatgttttaaaagaataacagtggagtccagggggcttaaatgtgattggtgacctatcacaagtgcggttaatcagtattcctgaaggaaacgagcttgaaggcgggttttaggatgacatatgttagcaatgaaggaaggggtcacaaacatgtgatacagcagtacctgaggatgaatgtggaggtggggttgccagaatggacttgggatgagggagaactacaacttttataaggcaatctgtgctttgtgtctggagaggcagcaatagtttgcagttaagtgttctgtggtttcgcctctgccttcttcagcaaccattccatctctcccaccccaatttaaaaaaatgcacacatacacaaaataaaaacaagtttaaaaactcaaacatttgtctggttaaaaaaataataataggcctggcacggtggctcatgcctgtaatcctagcacttctggaggccgaggtgggcggatcatgaggtcaggagtttgagaccagcctggccaatatggcgaaaccccatctctactaaaacaaaaatcagccgggcatggtgacatgcgcctgtagtcccagctactcaggaggcagaggcaggagaatcgcttgaacctaggaggtggaagttgcagtgagccgagatcgcaccactgcattctagcctgggagacagagcaaggctctgtctcaataataataataaaataagaataataacaaaagtaatggtaagagggagtgttgtgaaatggcaactttcctgtgtgatgtgtatgcagattgtaagtattaaaacatgggactttcagctgctgtgctgcctctccttctcccctggggctccttaccagttacttatcctagtctagtcccttggtactgccagtgggggcagaggacaaatgacggaagctacaacatgagggggtagctctgataacaaatctcaagtaccagtgggaccctcaagtaaacaaaggcctggaagcaactggatataggaccaggggaaaaaaaaaggcaggataaaggaatcatagctgggagtccccttatcaataatgtacttcagctttctcattttatagatgtagaaactaagatcctgagacgtggtgaattcataattacagagctgattctggtagagccaagacaaaaacaaaggtgtcagcttcagttttcttta

SEQ ID NO: 913945 - DNA, 4001 bp, Homo sapiens
tactaagtgtttcatatatgccaggcactgttctaggtgctagggttatagcagcgaacaaaacagcccaaatccctagcatagtggagcttacattccagtaagaagagatcagactaaaagaactcctaaacaaagtaagatcagatagcgattaagcgcagtgaagaaaataaaatagtattatggggtggctcctgggggaggggacaggagataatgaaggcgatcaagaaggcctggctgagtagatgccgtttgaggtgagtcttaaatgatgagaaaactttattcagtcttactaatgtgaggtgggaatgagtcaagttaatctttgagagtgatcacattgggaaaaattctgtattcatgaatggcaaccgaggttccttttaggatctggctttttaaaaaccctcaaaaaactagtcttaaggagtcttcttttaagatccacttttaaaatttttctaattacttcagaaccagttaggtagacgcaattactaggaggattccttcagagtctgatacctccctcacttgacaccaaatactgaatgagacaggacccagccctgcagcgaaccagcgctcctcaaccggttaatgtagccaggtggaattttgtaactctttcgagaacgcaaaacaagccttggggaatgtgtggaccctgaccccccaaaagttagtgtggaagaggggaccccgctgcccttttgcactaagtctcccccgtccctccgggcgtccctgacccccccacaagttattgtggaagggggggaccccgctgtccttttgcactaagtcttccccgcccctccgggcgtcatcactgcagaggggccactctccctgggtcagaggtacatagcgagtacgcgcgcgtgtgtgtaccccgcatgaatcatcggggcccggtccgcggggcgatgattcattcaccgccctggagctcacggccacacgttccgggtgtactatgacggccgcacacgcagctttcttaatattaaacaaatgtttcaaagtacaaacgcctggggccagaaacctgtagacccaggagaggtggcagcgaaaaaatagcacgtttcggccgctgcccgagtgttggcggggaggggatgggagcagcgggcacgtccgtccgtgcccccccaccccaccaccccggcacgcgcgcgggcagcgcccgcagggggcgcggagggcgtacaggtgggtcccgccgggtcctgcctcctgcccctccctgccactcgcggaaggccaccgcgccctccccaacgcgcctctcgctcgcccctttcctctccgtgacatcttatataataacctgagctaatcaaaacggaagcgacgcgcgcagccgggagcagatgctcgcgccccgagccagcggcccccaaactaggcgccggggcgcgcggctgccggcgggggaagggcccgagcgccgactcaggtcgtccctcctcggcggaggcgccgctgctgccggtccccatcaggaagccgcgagcgtcacaaactgcgtcagcttcttcgaacacatttcatggtctccctccagccagggagccgctgctcccgcggcggggccgcggccaggactggaaggcgcccctctggggaagagaaagttcctcggggccctccccttgcccgcccggcgcccggccccgccgtgcctccagcccctttccgcgcgccgccagcccggccgcgccgcccaccggcccgcaccgaggtcaggttaggcaacttgtgaccccggggcgccaggcggccccctcccgcccgccgggctcgcctggctcccggggcctcccccccggccccgcggaaaacagccacgccagaaacttccctgggccgcgtcgggcggggaagccgcctgggtccccgcgcatcgcccttaccttgctctcgagaggccacgatccgggcgggccgcgcggggcgcgtggtgcgcgagcgcgcgcgcgtggggcggtaggtgagggagcccgcgccggcgggggcggggcggggcagcgggggtgcgagcggcgcggggcgggggctgggccggcccggcgggcgggcgcgaggagagcagagcccgcggcggcggcggcggcgctggcggcggcgggcgcggggcgagcgcgccgagggggcggaggagttaccgtgggtttgtttacgcattgctgcccggctcggggcacagcccgcactccctgattggacacaaactggggcacagcctctcgccgccgcccgccaggcctcctcgagccgccgccgcgcagctcccggagcgtcctgccgggcacggcccacggcggtgcccaggcctggaggggacgagccgcggcggctgccccgggcgggcgtgaagccaagctttcgctcggggctcgcagtctcccacctgtagtggcccgaccttggcaaggagaaattcgaaacttctcaggccggagacttcgaatcgtacagcctctgagggggcaccttctccccccacagacggaggaagcgtgcccttgaatagatggaaggcagctcgaatgtcagtatgcctccctggcgatggtcaagtccaggcttcccgtataagctgccctccacccgagagctcgcagtttcttttcctgcctccagcttctttgcttctaatcgcaaagtccccccaccccaccccacccccgccaccccaccagaagtgaccttgccgccctgatgctgaagatcctccagtgactcaccatggcctcgagccttaatgcctcattctcagagtcctcaatagctgggcctccatttttcagtctcccctccacttccctaccctcaccccaaagcctccgtttacagacaacacctgaaatgtgtctgtcctttgacactttattttgatccttctctgttctctgccagaataccccttagccgcctccacctgtcaaactttgttggactcagctcctgtagccgtctcctaccatctctgtgcagtcttcctgctcccccaagcagaatccccccttgtggctggcatcattctgacctgggggtcagttgtgtgcatgtgctgtaccctctctgatctgtggattccttaaagaggagtctgcttttaacagagctctggtgatgggagaaatgaaagctgtaagactaatattgcctccgagtgtctgcagctctggtgagactggaaaagttcaggagtctttatcaagaggctctcctgataggtccgcaaacctcatcttgcaggaagcaaacacttccaaaaactgagcatgccctccatttttcctgcgtctctatatctcctccccaccacacctagctatgtgccctccatactcataatgggcacttaagtaacccttgaggaataaaattgaattctacagagatgttccttaagccaaggctggcggtgatcaaagagaatagagtaaatcatgaaaaagtagacatgaacccagtcattttacagctaattcctaggctaagagccttccggccctgttaggtagtgtgggtttgtcgctgtctgatcacacactgaagtagaccctgacccttcttgactcctgggactgctagatttttttctccgatgcgctgcttgcagtcccattaggaaaagtgtctttgaactctgcaagtgaatccagcgaaagtattctttcccaagcgagtcaatagcaataatttaatgcagcaaattagttacaagtgttgaaagaactggacgttcaactagggtaaggtgaggcaatcctgagattagcaactgctggacgtgccttctcccctgaggctggaggggcaaagagaggagacagccggaaccctggagggcttgtccaataggagttggagccacaaagttagtgcaactactgcggcagacatcttccaaagtaggggatgagagtccccctggcttctccctgcctcccaccctccaagcccacccagtggtg

SEQ ID NO: 913946 - DNA, 4001 bp, Homo sapiens
gttacatgttcccaattgggtgaataggtgaatagaacatatccttcattgtatcattaacttgcaaatctgctataattcagaataatgacaaattcatccagtcctggaacctcaactaccacctctatactaatgacacccaaagctattaactacagtttgatatctttacctcttcactaatgcattttaactatctgcttgactgctctattaggagtccctgccaatacaagttaaaagattaaaaacttaagtaattatcctccctatcaaaatgttccccatttccatttttaacccttcatccagttacgagtcaaaccaagttgatatcctctgctattccatgcccggctgctctacttgtatatcacctctccacctgcagtccatcttatattctgctacgaggcacattttattttgtgacacttggttgggtcttcttatcaacgaatgtcagtgtcttctctttacaaacagaaaaatgtttcccattctgtcacataagaccttctacaggttaaccttaatatacccttcaacaactttcttcaacctgaagggatcactcctctcccaccgtctcctctgcaggttctaagcactctatccaacacgccctttctctcctctgtctgcatgccacctatccttcaagcccttctccaatgctattctcagtgcaatctttccctagtttttaatgcttacttctttcctattacatttgccttttattttgatttatagttacgttcattctttaccttctttgttagaccaaaaactcttcaatagaaactggtcatatttagtagatatataacctggataatgctactttcctgtctcaggtttttttttttttttaactgtaaaatatgtatcctctcagaaaacacaacatgaaaggtgttgattttcctaagtgcattctataaacaggaactttcccccatcttagctgttaactcattggtaaatataaagcaaccggaaaggtaaaaggcattccatcaacacatacccactgcgaatgtgcagggaataggctctacgtgtaatcatcctatcctcttgggaaaccgtattcgtgcgtgtaacagaaagcaagcataattaaaagacagggaatcagggttctggcccttacccctgtatgaccttcagcaaaccgtttcatatctgagcctgggtctcggcttcctcctctataagttgggattaactgccttgcctttcccacaggtttgccatgaaactccaaagtaagagaaagtcctctggaagaggaaatgcacggtcccgacctggggtggtactaagatcctaaggcacagagccctgtgaccaagacagttaagggaagcaagaacttgcaatgacggggcgggggcaagggggaacttttctgcgttctccggcaggacccagcggtacagccctgtggggtcccagcacagccgcgcccgcccggcaggtgcgcgggcccaggccccgcgggcgcgctgctcaggccggggagagcgagcagcctttcccggggccggcgtccgcagccggccgctctccccgccgaggtaggcacagctccgaagcccccgcccgggtcggtagccccctgcacccgaagggccctcccggctccaggctgggccggccagggcaggtgtctggaggtgtcgctctcgcctgaggcgcaaacttgggtgaggagtctggcgtccctgcagctccccagcccgcccggtacctacccagcggccgccaccgccgccgctcctcgcccgccagcgcgccggcctcagagtgaaggaaagtgaaacagaaacagcacccgccgcggcctggccggtccccgcgccccgtctgctctccccctgcaggcgggagcgcgccggctctgtggggccactcggctcaggcccgacagggcgcggcgggcctcggggcccaggtccggtgccgcctccaagggcaactccacccacttccaaccggcggcaccgcccgccccgccgcccggccacgcccccgccgcccggccacgcccaccaccacgcccggaggccgcgcctgccgcctgcgctgctcgcaggtgcagctgccgccctggctccctgtgctacacgtagctctggccaaatattatctcggttcttcttatcctcaccgtccaccccttcggttgtttacatcataacaatgactggcatattttccctggagggtttaaaagcaacggtcagtgatgagactgacgcaccctgagaatttgtctcttcagctgcgtcttccccaagtctgtcccacctgcgccgaagtggggacaaagccatcccttgatttgcaccttatctgaaaatgactgacaaacttgttactgtagtgtgggtccagagatcatggtcgttgacaactataagcaaacgggaacgttgtggaggttgagggtggggggagggtgagtggtaaagaagcattactgtttgcaacgttcaaaacaaacaaaaacccagtactctttctagtggactttgagatctacaagagaccattcactgcaaaaaccttcattcaaaaatgtgtattctagaagccagagcagtgatggcttaagaaaatgacaataatagagggtaggggagactgtcaatgcaaaatatttgctttttctccaactgataggcgttaacttcttactaaagtgatagatgactctaagtggcaaaccaacaaacttaacaaccgctagtccagcagccatacaagtgttcaaagatccatttcaaatttaaaatgcatcaagcagtagaccaaggcagctttttaaactatccattttataatcaaactttgacatgtttaaaaattgccatttctaatatcacagcaggagcaatacattttctgaaacagctttaaatgaccacattcgtatagtcctttaaagaaccattttccaaaatcatacatgccaatgtccaagctgggatcaacttcataagtcgcagcaatcacaatgagtaagagaaaacaagtgaggtcaaatgacttcatggcagtaggattactctttatgcttcatatctttcatttcagagactaaacagaacagtatgtgaaaaatcacactacttctagtgtgtttaaaatatgcattggaggatattactgtatatataccacaatatataaaaaagacttggtatgttcctattttgtgtctgaaactattttaaatatgttttaaaagaataacagtggagtccagggggcttaaatgtgattggtgacctatcacaagtgcggttaatcagtattcctgaaggaaacgagcttgaaggcgggttttaggatgacatatgttagcaatgaaggaaggggtcacaaacatgtgatacagcagtacctgaggatgaatgtggaggtggggttgccagaatggacttgggatgagggagaactacaacttttataaggcaatctgtgctttgtgtctggagaggcagcaatagtttgcagttaagtgttctgtggtttcgcctctgccttcttcagcaaccattccatctctcccaccccaatttaaaaaaatgcacacatacacaaaataaaaacaagtttaaaaactcaaacatttgtctggttaaaaaaataataataggcctggcacggtggctcatgcctgtaatcctagcacttctggaggccgaggtgggcggatcatgaggtcaggagtttgagaccagcctggccaatatggcgaaaccccatctctactaaaacaaaaatcagccgggcatggtgacatgcgcctgtagtcccagctactcaggaggcagaggcaggagaatcgcttgaacctaggaggtggaagttgcagtgagccgagatcgcaccactgcattctagcctgggagacagagcaaggctctgtctcaataataataataaaataagaataataacaaaagtaatggtaagaggga

SEQ ID NO: 913947 - DNA, 4001 bp, Homo sapiens
cctcctggattaaagcgattctcctgtctcagcctcccgagtagctgggattacaggcgcgcacaaccacgcctggctaatttttgtatttttagtagagatggggtttcaccatgttggccaggctggtctcgaacccctggcctcaggtgatccacccgccaaggcctcccaaagtgctaggattacaagcatgagccaccgcgctcagtccaccttcttcaaaaccttaaaccataatctcaaaatgtcattgcaacatggaaacatacacctccaacccattaaaagactactgaaagttacaataataacacaatataaattattgtttctttctttccgtttttttttttttttttttgagagggagtctgcctctgtcgcccagactggagtgcagcggcaagatctcggctcactgcaacctccgcctcccagattcaagtgattctcctacctcagcctcctgagtagctgagattacaggcgcgtgccaccacgccccgctactttttgtattttcagtagagaaggggtttcaccgctttggtcaggctgaactcctgacctcgtgtttcgcctgcctcggcctcccaaagtgcggggattataggcgtgagccacaccgcgcccagccaaattattgtttcaaaaggatctttacgctgggcgcagtggctcacgcctgtaatcccagcactttgggaggccgaggcgggcggatcacgaggtcaggagatcgagaccatcctggctaacacggtgaaaccccgtctctactaaaaatacaaaaaataagccgggcgtggtggcgggcgccttgtagtcccagctactctaaaggctgaggctggagaatcgcttgaacctgggaggcggaggttgcagtgagccgagatcgcgccactgcactccagcctgggcgacagagcgagactccgtctcaaaaacaaaacaaaacaaaacaaaacaaaaggatctttactgcctagtaagcagtagcttcaataattatacaggacaggcaacgtggctcacgcatgtaatctttcggaaggccagagagggagaatctcttgaacccaggagttcgagaacagcctgggaacatagggagccctcctcgctacaaaaaaaaaaaaaaatgtttaattagcccggcgtggtggcgcgtgcctgtagtcccagctactccggaggctgaggcgggaggatcgcctgaggccaggagttggaggctgcagtgagccatggtcgcgccactgcactccagcctgggagaccctgtctcaaaataattataattattaacagaacgaatgagttggactcgcagagcctaagtgacctgcaagaacttcacaaaataagcgggtaaagacccaggccgggccggaggcctgtcggcgccacacgcctaggcagccggggcagaggtcgggggaggtccgctccagtgctccgcgcggcggcggcgcactaggatcgggccggcgcccggcagacgagggccagctacgtccctgacgccgcttgggcccagcggggtcgcgcgggggctctaaatacctcctcctcgtcctccgagtcctgccggcctccctccagcctcaacgagaagtgactcatgtcctcctcctcctcctcttcttcctcctccagctcctcttcttcttccaactcctcgtcctcgtcctcgaagcggcctctgaagcggcccaggctgcgctccggctccagctcagggggccgggagccggagcagccgggagcccccgtctcagacagaggcgccggtccctcctcacccgctgcgggtgcaggggtgagggcgggcggggagacaggaggcggaggcggcaaggctgcagctccctcggttttggcagcgcctacgctgcccgccgtcaccaccgcgaccccctccatggtcgggagagacaccaggcgaggcgaggcggcgggagagcgcgggagttcggccggcctcggacgccaccactgcgcaggcgcggcagcctgaggggctcgccgggaaatgtggtttagcggccctcacctccgcggggcgcaaaccctgcagctccggggcaggctgcggggcgcgcgggccgcactttaaaggaatctcaccagattttctccttggaaggggacgctctcttcgccgccttttaaaaacagcaaaattgctaccgttccaagcaacaatattctgtttgcatcacctaattcacagagcactgaactaggtagcatgtgacgttgcatcacaaataataatcatttccacttgagtaccaattatgcatttcctctgtggcaaatcacctccatccaagattatttcccttaggaagtataaagttcctgttctgaagtatgtacgtttatttattttaaggaattatatagtgtattgatacaaggtgaaaatctaatcactactcaaagatcatccatgtcaccccatcccataaagcccattatattgaattcgaaaagctttttttttttttttttgagacagtttcgctcttgtcgctcaggcaggagtgcagtggcgctcacttgcaacctccgcctcccgggtccaagcgattctgcctcaggctcccaagcagctgggactactggcgcctgccaccacgcccagctaacttttgtattttcagtagagacagggtttcaccatgttgaccaggctagtctcaaacttctgatctcaggtgatccacccgcctcagcctcccaaagtgttgggttacaggcctgagccagggcgccgggcccaacaaacatttattgagggcctactgtagcagaaactcagacccacccaggtacaacccaccccattgcccaattttattaagagaggtttggagttggcttaacattattcttgctagtccgggcgcggtggctcacacctgtaatcccagcactttgggaggccgaggcgcgcagatcatgaggtcaggagttcaagaccagcctagccaacatggtgaaaccccgtctctactaaaaatacaaaaattagctgggcatggtggcgcgtgcctgtaatcccagctacttgggaggctaaggcagaagaatcacttgagcccaggaggcggagcttgcagtgagctaagatcgtgccactgcactccagcctgggctacagagtgagactccatctcaaaacaaaacaaaacaaaacaaaacaaaacaaaaaacaaaaaaaccattatccttgctaagataatgccagctaatgtcacgatgcctgcaagaaagattcgggaagtcaaatgctcctaatcaaataatgcctggcaaagtcacatttaagagctgaatgtgaccaggcacagtggctcccgcctgtaatcccagcactttgggaggctgaggcaagcggattgcctgaggttgggagttagagaccagcctgaccaacatggagaaaccccatctctactaaaaatacaaaattagccgggcatggtggcgcatgcctgtaatcccagctactcgagaggctgaggcaggagaatcacttgaacacagacgaggtggaggttgcggtgagccgagatcacaccactgcactccagcctgggcaacaagagcaagactccatctcaaaaaaaaaataaattttaaaaatatggccaagcgaggtggctcatgcctgtaatcccaatgctttgggaggctgagttgggcgggtaacgaggtcaggagtttgagaccagcctgaccaacatggtgaaactccatctctactaaaaatacgaaaattagccgggcatggtggtgcacacttgtaatcccagctactcaggaggctgaggcaggagaatcacttgaacccgggaggcgaaggttgcagtgagccgagatcgcaccactgcaccccagcctgggcgacagagtgagactccgtctcaaaaaattaaaatacaataaaataaaataaaatagctgaatgtgtgccaggggtg

SEQ ID NO: 913948 - DNA, 4001 bp, Homo sapiens
ttatagaagtagacttcaatgcaaaaaaaatctggaaaaataacacattctcaaataaggctcatttttcacaagacactacagtaaaagtttccagtgagtgtcaccaaacaagcatactacttacatcaaataagttgtcttgttcaactgactgctggaaagctttctctggtttgtggatctttcttgtacctcctcgggggaagctttcttccaggtttgccatgtttgggtctcctaaaaacaatgcaaaggataatggtgacatgttgtcttggtagcagatttcagaaaggtgttatcaacgggcaagagacagaacgttccagcaatatgctagacaacattcaggactacaacatagatggtttagatgtcaggcccggaataatccatacttcatctttccaaaggtctctgcttcaaaaccacaagtccacccaccttcttccagaaaaagaagttatagattcaatgtagcacatactcactaagaagctacagttaagtcagagatacactgtagctctacagatgaatatataatcctctgccttcaaagaacatgcacactttttggaagataaaacaattatgcaagtaacttaaaatgcaaatcagattataaatgatcacaaagatgtaggaagggataaggcaatgtaggaagggataagtaaaggaggcaagcttcataaagaagatcttttttagcttaagggtaaaagatgaacagaagcttgacaggtagaaagggaatgtgagaaaagacatggatgggaaaagcctattatttcaataaacaccagcaatttccctatcaaacaactgctcaaaggcttgctgttgtctctgaggaattattcaactagaccactgggagattaaagcataaaaattgaagttaaattttaaagaaggccgggcaccatggctcacacctgtaatgccagcacttcgggagcccgaggcgcgtggatcatctgaggtcaggagttcgagaccagcatagtcaacatggcgaaaccccgtctctaccaaaaacgcaaaaattagccgggcgtggtggcctgcgcctagtcccagctactaggcaggctgaagcgtgagaattgcttgaggccgggaggcggaggttgcagtgagctgagatcatgccgccgcactccaacctgggagacaaagtgagactctgtctcaaaaaaattaaaggagaagttgggcttttttgtggaagaccttgaattagatatgggtagtttgctttggcaagtcagagacttaagcagggaaagcgagagaacagtaagcaagaaaaatatactgcaggctatagattggacatgaagagagacagtattgaaggcaagtaaattcggtagaaggattcaaatgcactgtttcctgttatctcagtgacagaaaaaaaaaaaaaaaaaaaggattcaaatgcagtacagcagagaaaccatgagaaccagaactgggtataagtgaaaacagaagacaggagaggttagttctgacagacacttggtaataagactctacaagggctttagactaaagaagtgatgaccgggtggggccaaggatatggaatcagggatgggtatatgattcatagaaacaggaaagtttggggggtctagtttgctgataatttcacccttaatttcctttcaagcaaggggaaactgaggctctgaaaagtaaggcgatccaggggcacagaagatacttaggctactttccgaacacaaagcctggggttacaggggctgctacaacagagccggcttcgaagcggggctaaggtggccgaaccacactcatctagcgtgtgcctggcagggaaccaggcctgggacagacctgacagccatgaggtttcctcctttttcgcctctgcctttactcaccagcgccacggcgtctgcacccagctaccactaacctcgcgccgcggtactcacacacgcggagaccaggatacccacagtccagtgcaattcttccggaagtgtgggcgggctcaacaccctacttccgttgctgtgttgcggaggtgacctagagacaggaatcggaagggcgggatttggagccatagccaatcgtcgcattaggccgaatcgcgggggccggctaaacgcgtgcgggggaggtggcttcttccggccgggccgagaggtggttacattcgttgaaggacaccagctgcggaatttgcggctttggcaggtgggtgaagaggggagtccgggcttggacctggcgcctgcacgttgcaggaccgcccgccgtttctggccgaggagcaactcgagttcttagctttggaggagagaaacggtggggaatgggaaaggagctagaaaaaacgaggggcgcaagggggcggccagcgggtgagaagcctcgaggtgaggcggataggtgcgcccaagggctcccacagtttccgaagacccttagattgcattcgccagtggagaaaaatgaggccctccgcgaagcgtccctcgaggtcacccagtgacgtaatattggacgaggactagggcttctgatccccatcaccggccgaattaacctcttttcttctgtatgtccatagctgtttgttcccaccgagctgtgctttaggaagctggccagccgggcctcctttaggtgcgctgcagcctttttcaaagcgagtgaatgtggcccggcccctacagttcgccaggcccgctgtaaaagggttagatttcagtctatagacgatcagtgggaaggcctttcctaggaggtaaccagaacagagagctgtaaactccgtgaatgcaagaggctgcttctgttacctgagtggttctcactcatctttgccttccttacctcgtgatctcaccattccaggtaggtgttaagttagaaaggaaaatagcaatatcgaggaacagagaaagtaacaagagctactggtcactttggacctttaataaagtgcccatctcacaggtggagagaggcacggaaggattagttacatttaagagcagttagtggccgggcgcggtggctcacgcctgtaatcccagcactttgggaggccgaggcgggtagatcacctgaggtccagagttcgagaccagcctgagtagtatggtgaaaccccgtccctaccaacaatacaaaaattagccgggcgtggtggcgcgcgcctgtagttccagctactcgggaggctgaggcaggagaaccgcttgaccccgggaagcggagattgcagtgagctgagatcgcgccactgcactccagcctggacgacagagcgagaccttgtctcaagaagggcagttagcaacttaattaaaacataccaccgtttaacaacattaaatcacaactaggagtcttacaaagggcactgtaaacacaagggttcctttatctttgccctaaagtaacctgcaccgtgctgaagagtgcagaaccaaatttttcgaccttactccattatctcaccagcaacaatcccgttccccatttggccctccatttgagcctctcaagagtcctcctcctttaagacccagactaacttgagtgattgatttcagttcttgaaccatgcacttccctgcaatcagaattagtcttctgtgggatatcacaaaacatcagccttcctcccatattgtgtgtaaattaaagggaaatttaaagcgctgtagtattgttgggcatatcctcctaaaaagtttagttagatgtaatgtagtggaggttttcgttaatggtcaaagtgaagcccttattttctgtagcgtttctcctaaaaacctacttcaaaccctaagaagtgaatccaaaaatgtatcatgaaatgaatggagctggtgggggggcggggggcggggggaagtatgtctttagtaagtttagtaaagtggaacagttgatagctacattataaagttgcttttatcgcttctgttggctaagat

SEQ ID NO: 913949 - DNA, 4001 bp, Homo sapiens
caggaactcaagtcatatttgacagcaacaaacacgttttaagagtttagataagacatgttccacgtttttacgctctttaaagtagtaggattttttccaatttatttaacaacccttaattggcccaaacaagaaaatataaagcaaaaaatccaaacgctatttccttcatactaacctacaaaaatgaattttcgatgagaaaactatacatacaagttagaagaaaatgaaggctgacattaaacactgttcttttctccagtgtgttacacgaaatatacaatcagaagtattcaactgccaagacattccctaagagacagaccctccactcccccacgaaatatatacatatgtatttcctgaaatatacctcataaattgctctggcattttggggagtcaagctttggccatttattaactaggattacttgtattcattcttcggctacgaacggctaattagcagcttaaaaccagctaaaagcattctactacagtaatgcaaaagcaagcactacagataatattcaagcggcatttatttttgcagtcctaatattttttcctttcacattagtaccacagaaaaagccagtcaattataattcaaatacacttactgagatattaacgtattcaataagcctataatgaaggaatattaagggcataaataccagtaactccttgcttaaaaagcacttggtggtttcccaaaaaagtcacgttaagaatatcaagattgtaacaattaaagtaaaaatacaagttaaaaacaggggaaacccttttttccccgacacctaatcgcatttctgatcgttttcatcatttgtagacactacacagttgctggctacgtagcgagttctcacaagggggaggggggcgaaattgacgtctgcagacagttttgaagctcttgcaaaaccccatgtacgttacagcatcaaactgacaaatggagaagatggcatgcgtttcacagaaagggggctcccttcccggctttgttttctctgggagattttattttacctaaactaaaaaaaagagaccctttgccggaagacgggcgcgacgaagttcgcgcagggatggggcggcgggcacgtgttcgcctcccagcgcccccggcgaggatagcgcgcggcccctccccacagcggccgggcctgttctcccgcagcgggctcaggctaggacccccgaagtcccagcccgggtcggcccccggaaggggctgggccggggccgaggccggggctccgggttcacgaaggacagggggccgcatcttcagaggattcccagggagggcagggggcggggagggcgcgaatcttcctcacaggatttcagtccagccggaaacacgccttccaatcccggcccccgaattcaacctccgccagagggggaggagggctgagggggaccttcaagggcgagcgcctcgcgcgcccctctcagtggggagatggctccgggagggggcgggcccgcgccgacacgctccaggctgggctcagaaagagggaaccaggccggatgcccgcagtccggggcgttggggagggcgcggctggacctgcggggctacaagaaggcagccggacccccgcaccgcaggcccggacctgacaggaccgcgacccccacgcctccgcccccgccccctcccatcttgcggctgcctccgaggagggatgggggagagggcgcagtcttcccgagcgtgtgagccgcgcctactggtactgacccctcgggcccccgccgctgctcgcccaggttcctggtcagccggccccgaccccgctcttctgtctctgccgccgcctcggagagtctctggcccttctcgctctgtttgtttttgttttcttctacccagtaacacgggggcgagagggcggcgcttattggccgaggccgggtggtcggctggccaatcgtggcggcggagccggagctgaggaggaaaagggagaggagtgaaacgtggaaagttggggaggggcgcgggagggcgcatgcgcatgtggctcctgggactggctggagcgggagttgagcgggaagtcggggtgggggtatgttgggaggcgtggcgggatgggagcgttgggaaaagggcagtgctgggggatggggacgaggatgaagcttcctcgacccagctcacccattctcctcacagggcgttctgcaaactcggctgaagcaaaggttttgagcttcctgatggtccctgcctccatttctagaaactgcttaggcgaacactccaagtgatcagcctgtccgattcctcctccctctggccgctgctttctctgtggcttccagtttctggagatcccatgctaagaagtttctctcagcgaatcccctcaaacctttgagatggaaataattcccatttcacagatataaagcaggctccaaaactctttgaagttcctttgctaatcatgactagccaagcctctggcgttcaaacgcacaaattccggcctccagtgctggggttctcagccatggctacaatttctgtattgaaacttccacctcccctcgctgttctctgtgacttttcctcttggctgcattggttttggctggtactatccttactctttcaaggtcacggtcccctgagggtgataaccagaaccttaggcttcctttgtgttcccaggcggggacttagccactgcctctgatcagatttttcagttgtctgatgggcagcaccgaatgattgcttgtgctctccagaacccaactgcctcatcccgcacaggccagcgctttcccttggctgcccagtcaccctgcctgggaatcatctctaatgctactatttctctgcacacacacgcacacacacacacacaaaccttcactggcttcccattgcctctcttgagtgtcagcgcctcggtcggtcattcaaggctccgtgatgtgacttcaagactttcaggctgtgtctccacacatctccccatatgcttcctcaccccctggtagttctttatatatcaccttgaaatgtctctcttctcatctcctatctccgcctgatgcaatccttctgtgcctcatggcccttcctggtagttttttattttgttgttgttgttgttttatttaattgaggcaggggcttgccctttagcccaggagaatgcagtggcatgatcacagctcactgctgcctcgacctccgtcagcctccctagctcaacgatcctctcacctcagcctcctgagtaactgggactacaggcacagctcactatgcccagctaatttttgtattttctgtacacacagggtttcatcatgttgtccaggctggtcttgaactcctgggctcaagcaatcagcccacctctgcctcccaaagcgttgagattacaagcgtgagccaccattcctggaccctcgtagtttttctggagcctcgtgatttgatatgatcttcctgccgctgattcctcacagtgttggcttgccacacctccaggggcactgatcacattctacctggcattatttcatctgagtccctgtcctagcccttctgcccattagactgtaaccttgtttagggaaagacctgtgtcttactcatctgtgattttgttgttgttgttgttttgagacagggtcttgccctgttgcccaggctggagagcagtggtgcaatcttggctcactgcagcctcaacctgttggggtcaagccatcctcccacctcagctttccaagtagctgagactacaggcctgtgccaccacacccagctagttttttgtatttttagtagagatggggttttgccatgttgcccaggcttctcttgaactcctgagctcaagggatctgcctgcctcggcctcccaaagtgctgggattacaggcgtgagccactgtgcctgacccactcacctgtcattgtagtacttaagatgcct

SEQ ID NO: 913950 - DNA, 4001 bp, Homo sapiens
tcagttggggaccctcaaggagcgtattcccatgagaaaaacctcaggatgtgcagacattgccttccagttggttgtctagagaactttgccctaaggatgagcatccatttagacacttgaagcagctgcagtcaggctcaaaagcaaacttaacccagcttaaacttactgaaaggaggaattattcaggactgaagccctaccaggccccatggtaacccttgcacctgagcggtgttctgtggttgtttgcagagagtcactcgtgtttgatgacttccacacctcttgggtccgtgtgaccctccccctataatcagcttcaggaggcatttaggagattatcctcctgcctctccagctgccctatacacccctgcacagaaagcatttcacaagttgttcccattcaactctgttccatcataatccacttttccctttttgttaatggtaaactgtaataatggaccacatgtgtagagaaggagctgccaggagaatctccaagctggtacccttgattattgctgaggggagggatgatgggtgattagcatttcctcctctggtttatttgtatcttataattgtttaaaaatgaacatgtactctaatggtaagaataaagtttttctatttctataaggggcatctcaatgccttgtatttgtgcagtatgctgttggtcttcaagagggtccaaatgtcccacttacttgattggaattcattcttgaaagatctgggttatggagcagtgggagtggtcaattgcacttaaccatcacctaaattcacatatgtaatgaattccaaatttgaacatctgaactttcaaatggcatcattttttctctttgcacatttggtcgatagatgaaagaattgatttactagcaaatccatccaaaaaacctgaatgttttcgaaggactgtgaatgagaggcatggggagcagttcacaagtcttggcatctgggcacgttggcccatctccctagtggggtagtttgttttgctggtgttgctgagaaggaaagtcccccagagcactggaggaggcgtaagggagggtgtgtggaatgcaccagggccaggtaggatcacctgataaaatgccaaactttacatgggacatacttatacttcagaaaataataattcattgtttatctgaaattcaagttcaactgggcaacttgaaatttcatttgctaaatttggcaacactaggcctgggtgatcctcttccctgccacccacattcccccggttattgccaaactaatgccacaaggatagcactatctctctttcccatttgttcctccctgaccctgccaagacctctgccccactgtcataaggccacctacctttttcacatctgggacattatgagttttcttcgtgtgagcagcccaacccactatcccaatgtccaatggaaacacaacttctttgtcagggcccaccaggttgtcctcaaacttggaggtgggggtgacatccagcaacctagaggccacctcaggtatgccgttccgggaccggcacaggaacatgctgcagcggtcagcctggagcaggtgggccagcctctgcagggccctgtgaaccccctgctctggggtgcccccctcctcctgcacggtccacagcagctccaagcacagggctgactcctccacctgggtcagctcagagaaggacatgctggactggactggcacctggctgttcttgaagatttctcccagcacctccacccgcaacttcctgtcaaagtactccttggcaaactgagggttctcctccaggtatttctccacggcaacttggttgatctcacccatggtgtggcttgctttgctgcgtttgttcagaaaggacgaccttcagagcactacctgaggcagagtgatgagaaggaaattcatcctggtggaaattactgaggaaaccgtaaatggtccctcataggacttccaaaggtcaagcagaaagcagagctttcaaactgcctgtaactcttgggatgtgacagaaggccctggcttagggtgggattcaggaagcacaggattaaagagttcttcaggacactaaatccctgagcattagtagctcataagtccctagcgaatcttcagagtatcttagatcagcccagcaagtagcaagctgaggtgtctattccagaaaaataactgaatgtcggctgctgtccacagcaaggaagaatcactgacatatccatgaatgacacgacattggcaacaattggcactttgaatcgttcttgtatgatagctataggaagtaaaactatttagacctcggaagtgcttggattttttttgtttatatagcaactgtaatgaacatctgggagatatggaacagtttgcatcactgcaacataaaggtgaatattaatctttccttttcttaaaagtcttttgatcaccaaggttgcttggcctcctctttctctagaaccttcacctctcaatccctgtcacttcagaaagcttgacctcagaagtgttttaaaggagtaaacctcaagcttattactaaagaggtgaacatagcaaaatatttgccaatgatccaaacctaatcaagtcatgaattgaataataacccttgtcgagagactgtaattacaaaaggtaacctacatagttgctggctgggtttttctgctaagtatcttagttaggattttgttttcaatagtaatagccagaggtcatgcgattttgctacaacatacagtctactaaatctactagatgatagatatcttgtctgttgctaggatccttaacgtctcaggggctactggcatagaaagaacacttaccactacttagttttgtttaatgttcactttactaagcttttacatctattaaacacatttcctcaaatatttaaacactattatgcaactaataattcaaactattaattcatgaaccaattgccttcgatacttaaatgttggtttcaaacttagtcaaggtgttttaaacacttcaataaagctacaaacctaatatgacaaattctcttaagtggaaaacacacacatgttacagtgactctaaaaattattgttacacccacatttaagtttgcttcaaaaatagaaaccctatgagtttcattgagttctctaagatttacctctctagatagtaatctttttctttttttttttttttttttttgagactgagtctcgctctattgccaggctggagtgcagtggtgcgatctcagctcactgcaacctccgtctcctaggttcaagtgattctcctgcctcagcctcccgagtagctgggactacaggtgggtgccaccacgcccagctaatttttgtatttttggtagagatggggtttcaccatgttggccaggctagtcttgaactcccaacctcaggtgatccacctgtgtcagcctgagagatagtaatcttaatagtcacaaaagaaagagagatccgttgaggttgcacattccctgtcatgaattgagagattcttggtgggaaacatggttttcccaggggtacagaaagagtcatttgttgagttatgccacttcttgtgattgagcttcacctgctacctcaaagcaccttgtcaggtgcacatattttcttggactgtcctatgtcacactcaactctactctcaggaggttcctctttgggtgactatttacttcataacaccctgttattataaataggataatgcagaagtgtatttcccaggagagagttgagtcaactgagtcacccctcctatgggaccatcttccttatctaacaattttggacactcttttttacctagttattttgtgtgactcatggtacagttcctacttctcctgtaagtatgtggtgtgctcacgatttcctggtttcatccttccctcttgaaacagagagggaaaaacacatatttgc

SEQ ID NO: 913951 - DNA, 4001 bp, Homo sapiens
tatataaatctcagaagtggagagggctgacaggttaattatagacacaaagaacagggacaaatggactatgaggtaagcgagttgaaatgtgcagacacaatgtcctccctggacaagcatttattaataagcctgcaaggatttacccagcccggccaggtacaggtctgctaccaggctcggggacgattctggggaaggcacagttcctgcgcttgaggaattaggctggtggctggaaaggcagtgtgtacctttgagaataatcagaggtctctgtgggacgaggcaaacaggtggaagataaggcccaaaaactggcccgcctactcttttaggggggtgagatagagaagacctcctcactgggccaggccaaccgggaaagaagcatgggtaggactgtggctggcagacaagtcaagaggaggccaccaattcttctcctgcacctcccaccaaactccttcagctgctggacgcaggagcttgagtcaaaaggatccataaggatatttccctttcttctccacccttcccccaaccccaagtgaaaaagaaggatgtttagaaagtctgggagacaagctgaagggcagcttcagcaggcagatgagcccaagaatggaatgtgccgcctacaggcaaggagtggccatgggtggggagaaaggggacttctttttctccctttcctcattcgaggtacttactgagtctcttcttggtgcccaagcactgaacgtgacatctcttagtgggacatcaacctgtgtttggccagattaaatggccaaagcccagacctctgaacactgagtctgggtctccctgggggtttcactttattaggggggcaatggttctggtggcccctgattcaacgtgagtccttctaaagatccgaagcccctcttagatttcaagcacctcaaccccaccccaggtggacaccccatcgcagtatctactcatgccctgagaaaaaagggctggtgcggggaggggaaagagataatctgggaatgctaggaagaatgacggcggggccacgttctgcagaggggagaatgaccaagagggtttacttgagtttgtttgttgtgtttatttcccgaatccagcacattctccaaaagccattcgaggggcgagcctcggccgtgggtcaagtccaaagagcgtgtttcggttgtttttttaggttaatcccacttgccccccaccccagtaaacttcccacccaccccacctcactttccaggtctttcctgttgcgttcggctgcactgcgatctgggaagaagggagaagtgccatctcccagcgcgcgggatctgcggggaccctcgtcccctcgctggttgacaaagaactaacacccgccccgccgcgcttccggggccaaagaacgaaaactgccttctttttttctggcggacacggagcgcgcccgcggcgggccgaccagcccgggagcgcagcctccgcgaaggggcggcggggagcggcggggcccgggcgcgcggagagcgctcaactaacagcgcacctggacgcgcccggctgcggttccgactccgtccccgaccgcgcccgcggggccccagtctccgcatatcacctcccatagcgccccgcttccacgcacgtcccagctgctcttacccgggaaatggcgagaggctgctcgaagtccttgccgcccacgaggcggaagccccacggccccgggccctggaggtctatctgctgggtggtcatggcgcggctgtggcgggcgacgacccgcggggacagacgggcaggacgcgcggaacagcttgcagggcacccccggcggctgtcggagaaagagcggcgcggcgcgggcccggggagcctggggctggcgggggcagggcaaccgcgagggccagggcgggggcggctccgcccaggccgcgtagccgcccgccgccccgcccgtcctcccgcccgcagccgctccccgccctgcgcgccggcctgggggccctggcccggagtcccgccgagagagcgcgagtcagatgcggggccggggctctcagcagctctgcccgggaccccacaccgcctccctccctcctgtacgcacggccgcaccgcggctctcgggcccggggcgggtgctaggtgagagggaagcaggtcctgacagcgagacaaactcgcgcctcgtgctttgtaaaacgagaaatttgaagtgctgtgccaagtcagccctctgaggtcggctccgacttcccatttgctttttgtaatcggtaatgatgtttaaaaggtgctttcgaacgatctcatttgatgctgaggcaaccgggacgtttagtcccattttacagatgaagtaactgagtctgctcagtaggtgagaagacttgcccgacgctacaccactcgtcagcatctggaccactgcccgggcccagtgctgcagaaccccatcctggaacttttataatgctaatgagaccatcactcaggttataactgaacttcaaggccttcctagaaatctttcctccaggctggagttcatggtaggttctgacctcaacagttcaaacctcaagtttggggcgggccaagggccaagtcaatgcaaaagaagagctgagtccgggacctggattcccagcctcccaccagcttcctagccaggctccccctgacgccctcccggtggagtgcattctccacgccggaccagaccatttctcatgctgtccatggcgtccccacctcaccaccagtgaaaacccagatccttacaatgcctacaaggccacccctagaatggccccaactccctctctgaccccaactcctcctgccctttcctcacctgccccccagtctgccaggctgtgctccttgctcctaactcagggccttgcctcagggccctgtctgcaatgctgttctcccagacatccccaccactctctgtcattttctaggggccggacacgtggctcacgcctggaatcccggcactttgggaggctgagtcaggaggatcagttgagcccaggaattctagaccagccccagcaacacggcaagaccctgtctctacaaaaaaatttaaaaaaataaaaattaaccaggtttggtggggcacacctgtcccagcttctagggagactgaggtgggaggatggcttgagccggagaggtcaaggctgcagtgagctgtggtcgtgcaactgtactccagcctgggtgacagagtgagaccctatctcaaaaactaaaaaataaaaaaaatgcaaatgtcattttctgaggtcatctctgagcatcatttaagatatcctctctagaatgctctattaccttcccctgccttatttttttcttttgtatgtatcaccatctggcattctctatattttgtatatttatttgttccacccccactcttaagcattaattccataaggacaggggtttttatctgtttagatcactgctgtgccccagtgcctagaatagtgcctggcacatagtacttaatgtatataacacattggccatcctcaggaccacttaccctctctgggcccagtttcttcgcagttttcttggcacccattcatcctggtacccaggccccagcacagtgcttggcatagagcccatgctcaatgagtttgttccctgtgcagctctgtctccctgtgatcctggcctacctactgaagagccctgtgcacagatttacacataaaaagattatcttgcttgtccaattgtgtgacagcacaaatgcctatgtttgggaatagtttgtttgcttttagaaatccaagtggagggccgggcacggtggctcacacctgtaatcccaacactttgggaggccaaggtgggcggatcacctgaggtctggagttcgagaccagcctgaccaacatagagaaacccatctctactgaaaataccaaaaattagccgggcgtggtggcgca

SEQ ID NO: 913952 - DNA, 4001 bp, Homo sapiens
cccgcactttgggaggccgaggagggggtggatcacttgaggtcaggagttccagaccagcctgggcaacatggtgaaatgccgtctctactaaaaatacaaaaattagctgggggtcgtggtgtacgcctgtaatcccagctacttgggagtctgcagcaggagaatcgcttgaacctgggaggtggagtttgcagtgagccgagattccgccactgcactccagcctgggcgacagagtgagactctgtgtcaaaaaaaaaaaaaaagaagaagaagaagaagcatgtagtggcataagagggtggatgcacccatctcttcaaatactggcttcttctgtggaactagaaatatctgaagtctggagagaacagtcctgaaatggatcacagcaaagcctaccttcctcctctaagcctcttctcccacatgcccctcaccccccatattctgttctctttactctctagcattgtctagttgcccagctgccacttggtctccaaacgtcttttttgctttagattttttagagatagggtctcacactgttgcccaggctggagtgcactggcactatcacaataaacagctcactgtaatcttgaactcctgggatcgaacaatcctcctccctcaggctcctgagtaggtagaactacaggcatgcaccaccccacctggtgaattttttctattttttatagagacagagtcttgctatgttgcctaggctggtcccaaactcctggcctcaaccgattctcccacctcagcctcccaaagtgctgggattacaggtgtgagccactgtgcctggcccaagccttgttttggataatttgtgatacgcatctactttggtacaaagtagatatttataagtgttatatatttcatactgggaaatgatgtttgatgagaacacggacacataaagtataccaaatctgaattaaaagagtactaaattcaaataaacttaagtaacagtgagtccatagattttgcacggttatgctaatagcatgggcctaccccatggcacactgagaatcattacaaagcgcagaagggctcacagtgtccatttacaggggctaaactgaccagaaagggagaaaaaggagatcggaacccaaaggcagcagaggagaccctgaaagaatgggctatcgctgagattctgactttagatgactccagggtttctctcctcctgacggcctcgggcctttctccttccagtgtcattccagccccatccaggtgtgctctcctcccgaggccactgctggacaactaaggtccggtccaccctagcaccagccctgcattctccacaagaccttttcggactattccgaggccgattcgatcctccgtttctcggagagagctctgagcactttggctctaaaatttcaggcaagatctgtcttcctctaactccaaagtaaatagctgcagtcgctctccaggcttaaccttgtccatatagcagcggtcaatctgatcgctcctgcgcttcccccaggacacggatcccaccgctttctccaccccccaaaacgctcccggggtccccaggacaccgctttctgcaaccccgtgtagggcgcccctacttcagtccaacgcgcggctccgtcccaccgcgagcacccctcagctccggagtcccaccccggagctaccccggagctaccccgcgcgcccccgcgtcgcgacgcacgtgctccccgctcccattcattccgcccactgctgtcattggagccgtgacctctgagccccgccgggcgcgcgcctcccaacctcacctgcgcgcggacttcggcagcggcgctcggccccaacggtcccgcacggccgggggagccgggcccggggctccgcgccgccggcttccaggagcagccgcgccgccaccgccaccagcgcgaggccatggtcggagtctgaaagtcgcggcagggcggcggctccgcctctggcccgcgatcctcctcccgggacccggagccggaaacctggcacaggaagcgcttcggccaggcccgggagcgcggttcgctcttcctcgcttgcggtccggctgccggcgcggacacttcgggtgtctgcccgtctgcagccaacggggactgcagccgctcccgggaggcgacggggcaggggcgtgcggagacctggtctggggaccccgagcgtaaccttccccggggcgagcctcctatccccacctcttcccggaagctgtgcagggagactggccacgcctgcagtcatagcaaaaatgtccctgtggggaccttttattagcaagaaatactaccgcgcgccacccttgcagccacgaactcttttgttctgcgtgtttaggcagaaacataactcagagaatggggttcccgctccgcagcctaagccggaggcgacggtttccgctgctgcttcccttggcagtgacctgacacgccctggtcggctgccttttgcaatctgttcttgaaggaagttccagcccatcgcatcttcctagaaacaagtccgaccacgatcagggttgttgtgaaatagtagctaaattagccgggtctcgtgacttttggactctcccctccaaacgccttataggtatagtttggcaatcttgctcacacctgggtgtgaacctgcgtgtacccagcccgggagatattggagtctgtacaggattagtaccccttatgggttagaaaggccttctttccttagctctaaggccagatctactggtgctaagagacagcgtgttccgaacagaaattaagtgatataaacattcagcgcatgcactcaaacacacagagccagtgagatagggggtaagcattagagatagagaaatgcaatttagtcctcaaaaaattcactctaatgaggaaatagaccagcaagtaggtaattgcagttctctgattcatgtattttcttgttcttgggttaaagaatgcggtagcctcatagctgggtacattaatttcatatttaatcgtgtggattttttatggaatgaagacatcatagactatataaagacatctatgaaaataagccagtttgatggtgttttttccatcttgaagaatagtatgtaaaaatatgcaaagctttatgagtaaagattgttaatatgcacctgtagcttatcttggtttagattaggtttatatattaagaaacattcataaggtggaatttgccaagtagagtgtagcagtaagcacttgggttgtacttgatcctatgactaagacattatcatttgcccttttttgtatataaagataaggaaacatatagaggaaataccgtatggtcaaataagtatcacactcaagctcacccagttgtcaagtatgtcactacacaattttgtcagaccatgttcgtttagagattgcttggccacattaaaacagaaaacattgctcttaaaaagatgctgtaggtcgggggcacagtggctcagcctgtaatcccagcactgtgggaggccgaggcaggtggatcacttgaggtcaggagtttgagaccagcctggccaacatggtgaaacccgtctctactaaatattcaaaaattagttgggcatggtggtgcatgttctgtaatcccaaccacttaggaggctgaggcaagagaatcacttgaacctgggaggcagaggttgcagtgagccgagattgtgccactgcacttcggcctaggtgacaaagtgagactccgtctttaaaaaaaagaaaaagaaaaaaagatgccgtagtattgcaaggctaagtagggacagcagctgaagttcctcaagacttccaacgttactgtatagctaaactcttgagaaaaaacagtaagctaccaattggacatacggaattcacaagtagttcttttgaccccactaggccaagcatgagttgaggaagttaaaaacactatctgagttatgcagg

SEQ ID NO: 913953 - DNA, 4001 bp, Homo sapiens
tcagctgttagtcacctcacatctgtcactacagccaggctggctcctaagtgcccacctaccatgctccatgcttttcacttccagcctttgttggtgacagctcacccctgccaccagctgttcttattgctctgtcctgctacactgtagattcctggaaggtgaagagggagcctgatttctctctaggtcccttgtaacacctccccagggctggtatagaattgtgctccatgaagcggcattaagcaactacataagcttaggtctccccttccctgatggagctccctctccaccctcaaccctcctcttctgaacatttgctgtgctgccttcattcccctccttcagcacggaagccctgaattctgtctacccgcttgggcactgactcctcgcagcccagcacagagcttgtcacacaatggactggttgatggaggatgtccttctttatcctgccccatcccccagaagtacacacaatggatctggagaagggcagagcccatgggagagaggccagttcaatcccctgccttgtccaccaggggctagcataccacacgcatgcctgtccctgctgccatggccttctttccctcctctgacccttctacgaccctggacccctgcaggattggcctggaggagaggccaagggcaggtgaggaagagtgtatgggttcccaggcggcctgccacctccctgtgactcccatctcttgaattcccccaatcatactggctctgcctcctcctgctgagttcccattgtcccctacccccaccctccccaacccaggccagtggctgggtcccgcccctaccttcgatgggggagttgatgaggatgacgcgtcccatgggcgatgaggctcggattccgcgggggggcccgttcagcagccgttgttgcttccttagcaggtatcgcgttgcggtggagcctgagtcgctgcctaggtggcctcgggaggagagggagctcagagagccggagctcaggtctcctaggcccagtgggtcgaagcccactgcgaaaccctgcgccatggcggctgggctagggcggcaccctacaggtccagaaggaatctgctagctctggagaggccagccctgcgtgcttcgagctccatgagcctctgtgcggggctggggtctcagtaacgtgaaggccctcgcttgcgatgcctctcagaagtgtgagctccaggcctgggcagggagagcagggatgagggaggggtgtaaatgtttcccctgctgccccctaaaacttccacccctccccctggtttaagcatcctgccctcccatgccttaggcccccctcctgtctcaccctaggccagagaactgccccgtccaggcaccatcttggactctcgctgactttatacaaggcaggtgggaacctttcacccctcattcctgctcggggctgagtcatctactcccgtccccagtcctcagtagaggttgagagtggagttgggattactgcgggccctggggcttagagaggtgtgagacaaaagagaggtcaggacagctcatggcatcacctctctcatgcatatgcgggcatggaggtggcccggggtggggcgggggctgcgtggggcgggctgggcctcgaggatagggcttcaggaccttagacagctgaggcccaggaagacccccagacacccgcgggctccaggctgcggctccgggtctaaagaggctgcatgaacctctcccaagctttggggaggatctgctggagaggggtcccacgacatcccgcgcaaaacccagggccagttccctcagagaagctctgggacctagaatgaagcaccccaacatcaactcggccctccaggccccccacccctttgtgcctggtcggcctcacctggtcgctggtgtggcgccgccagccttgtcaaaccacccgcaggcgagagctactgccgcagccggcaaaccccacccacgctgcgcggaggctgcgggaattgggctggcctgcaccgccccgggctcccattggctggtagggccgccagtcattctattccggcacctcccttaggcgccagggacagccgagcgttacctggtcccgggcagcggagttctttacccaccccagttctggttctgacgccctagctcattccgcaaatttagggcttgggtctggcttgttcccctccggctcgaaccacctcttctctgagccgagccagctaccggggctcctggaattgccacccctccctgggcacccttgaggcctccgtggagggacgtcacggggcagagcgggacgtgagcctgagtttgctgcaggcgtgctctgtgtggtggctgggtgagttgtgagtatgtgcgtggcggagggggtgccttcttcacttgcatcctcctcctctgtcagaaggcgtctctggctacccagttctggaatggtcgcagggtggggcagctggtcccaggaccggaagaatcctaagaatccttctgatgcacttgctcggatgcagaccgcgaggttcctggggtcgtctgcccctccacatctcaggggtggggctacggtctggggtgcagggctaggggttgggagcgtaaggagaccagggacacagtggagctaggggttacagagggggagcagggagagggctggggacatagaagaggcacaggcacgacaggaacggggctgtgaagtgatgcgaatgccgcgctgctacaagaggagcttgtggatactggggtaggagcccagggggacaagcaagccaaaggccattgccaaggcagccatcaagtaaacaagccaggcggtaacccgagtccctcccggcgcgccagcagaggaccgcccctccacaccgcccacctgcgcccggggctttctctctgggcacctagaccgcttgctgcagggctgggggtctgctgaggcccgccaggggactgtaaaccaagggagcagcgcccgcggctccagcccctcctccctttggctggggagggggccagaactgatccccgaggtgggattggctctgggaagcagcttagggcctggtccaggtggcccaggctgggggcatcgcctcgaatgacacccaccgccctcaggttctgccaatccccgtgcccaccgggtgggcgcggccgggaagctcctgcccctccctgctggtcggcgtcacgcgtgacgtcccgcgtgatggctgggagggcccggcggcgacagcggaggcagagaggaaggcggttctgagagcttcagagagcgatggaaagcgtaagtgctcgctctccccggcgggcggggttctggaatgggggtcagagaaggaggcctgccttgaaactgtctgtcctggtgcagtcaatgtcctcggctctgtggaggtccaagtccacagggcacaagggaggttggggggaggaatgtcagggtggggctgtgtgtagtcacacattcaagtgtctgcagatgggcacagtgtgcgcctgtaaaggtgtttgaaggccggtgtatacaggacacctccactctgtctgtatgtctgggcagggtgtgcatgatagtgtctttgtgtgtgggtatgtgagtgtgaggggagggcgtctctgcctctgcgggaggaagtgtggctggagaggattagtcattctgtaggattctgcccaactcagccagatggctgcaccaggctttcctctctgtgctgggtggagggagcagccactgaatcctgctcttatccggaggcaagtggcccagagagaggtggatgagtgtctgtgccagccctgcctggccagggaccagggagagcctggggtcattcagtgtgagttggagaaaaatgggtctgtagagaggacttgtgcgtgcccacatgcacacacatggctgacatcagagtcccctgattgagatctggaacagataagccctgggtggccagtaa

SEQ ID NO: 913954 - DNA, 4001 bp, Homo sapiens
atgtacaggctcccaactcctttcccatctgctgtggaaagtattcccgggccgggcgcggtggttcactcctgtaatcctaacactttgggaggccgaggcaggcggattacttgaggtcaggagttcgaaaccagcctggccaatacggtgaaactccgtctctactaaaaaatacaaaaaaaaaaaaaaaaaaaaaaaaaatcagcaaggcgtggtgccatacgcctgtaaccccagctacctgggaggctgaggcaggagaatcgctcgaacctgggaggcagaggttgcagtaagccgagatcgcgccactgtactccagcctgggcgacacagcaagactctgtctcaaaaacaaaaacaaaaaaaacccacaaaagtattcctttgcaagagttaccacctctgccttgaaaggtgtcaaaccatcaaagcaaaagtggcttgcaatgtcaaattagcacagacctgggctataagcacactcttcacgcgtgtactgtgtccaggaacaatttctcaaagcggccaaggggatgctgcaaagccagtgacgcggctgccctcaatgcagcaaccacatagagggagagtttctcaacagtcccagaagcgactcctggggattagggtaggcttcccttccatttccaatatgctgcttataaaaggagacgattctgcccgcgttgacagcaccctgagtccccatgaacacgcgaaaaggtttctagctcctatcaatgccgttcggaagcaaagcaagtgttcacgactcgccttgatctggggccctgtccagggtgggaaggccccagaagcaggcgccaggacagaaatgagcctttgcccttcccaatccacgcagcgtcccgcccaggcccgggttcccggcagccaggccccctccccgacctccagctcacctgatcttgtaattcggtagggtgtgcttgcgcttgatgatcttcttgagctggttgacgatgatggaggtgagctggggcatgggccgcccttcaaactgggagcgcacctcgaagtcgatcagcgggtcttccacgaaggagaagaaccagtgggtgaagggcacgcgcgtaaagaccaagcgcagccttcccaccacgcgggacagcttgacaaacaagtaggcggacttgccgaagaccaggtccacgtcgatggccaggtggaagcccccgttgtactccacctccgcctcgaaggccagctcctcggggcaggcggcgggcagcgcctccccttcagggccatcgggctccccggtggccgagggcacgactggccgcacgagccggatggtcttgatgaagggcaccgtctcgcccaggaacacgtcccgcaggctcagcccctccagcaggcgcccggccgtcttggtctgcagcagctcctcgaactccaccttgatcttcttggtgacccagcggcgggtcagcgcggtgtcccgcaactcccggaacaggaataggatggtggcgttgaggaagtagcaagtctcccgcgtcggcggggcgggggtctcgggggccgcggtgggggtcgcgccgccctcaggggccgctccggagggctcctcatcccggccgccgccataaaggtactcccttaggagcaggcccggcactggcttgatgtagcggaagccctcgcccgcgcgggcggcctcgtccgccggcggctcgggctgtctgcggtacagcaggaagaactgggcgaggagcgtgaggaaggaacccagcacggccgacgccaggatcatgagcagcagccccatcccgccaccgcctccgcccgggcccctactcccgcgcccacagcgccgctttcttcacgccgccgcccccgctgcctccattttgaggacatcgggcggctgggtcggggcgagcggctccgtgggcctcgtccaggggctcgggccggcgcgctgcggcgcccgagcccgcagcggcccgcgcctcctcagacgctcccgaagggccggtgtggcggcggcggcagcggggccgggaccggcgcctccctcaggcctccactcattggacgagcagcgcgtgacgtcagaggcgtgctcgctcccggcggcgtcgcccagcagtcggcgcccgggcacgcggacgcgggtcctcctttacttctctgcggcccttccaacctcgtccccccacgccaacattccaatccccgcggcgcgcgccgccacccacgtggccgtcacttctggagctgcggtcgggatctgggaggacggctggggacgcgggctggaggataaggcggtccggcggagcgggcctgacgcgttccggatgccggccatcccgttatcctcggctgcgcccatcccccgtctctggccgcagtccccgcggttacctctgcagcggcgtcgctcatcctgcggtgtgcttcttccactcgcacccgtgacagcccggctggcagcggcgctttccctgcgggcagcaccgcagacgatccgagcgggcctttcggacgcttcccaagcccacggcgagaggggaccgactgcctcagaggcagccatcgcggacctgccgtccccccggcagacgctctgcgtccgcggagggtgggccctgggaaggagggacgcagggaaagggcgcgccacgcggaatgactttcccaccgaggtggatcttcgaaatttcagggaggaggaagttgaaagaacagccaggaggagagatgcatagtgaaacgagtttgccaagtgattggaagattaatatgcgacccgctgtcagtctctggttaagccggtagtccatctatgaggcagttattcactgttagcccccacccacttgacagatgccaacactggtgcagagagcgtggggaggttgcgtggggccgcagagtggagcctggtttatctaacactaaaccctaatgtcttgatcactactctctgccctaacacagaaactgcttcagttgtaagcaggccagtgggttccctaatgttcaggaagggagaattggggaggcggattagggaagacggcaaggaattttgcatagagtagcaccttaaccaaagccacgaagctaagccaggttgcccagcaacagcgttactcctcctgccctctgactacttagtggttacatcataaatgcttatccctccaagcacgtggagttccagtcctgcaggagtcagatatcccataccttaaaggccgattctggctgtacctaaggagccagggcagggctcctctctagcccttgaaaaccttcaagccggccgggcgtggtggctcacgcctgtaatcccagcactttgggaggccgaggcgggcagatcacgaggtcaagagatcgagaccagcctggccaacatggtgaaacccgtctatactaaaaatacaaaaattaaccggtcgtggtggtgcgcgcctgtagtcccagctactcaggaggctgaggcaggagaatcacttgaacccggtaggcgggggttgcagtgagccaagatcacgccattgcaccccagcctgggcgacagtgcaagaccctgtctcaaaaaaaaaagaagaaaacctccaagccaaggattctcttaactgtaggtgattctaccacaaaaatagacctgacccagctgggacaggtacagaacttcggaaccaggcttatcatgccttaccgaatcatgcccagatacgaaaccagaatggctttcattactatgaagacataagataggtgtctgctgaggaaccatgctcaaaccatggccgagatttttcggagatcttggcaacttctgttctctggtcccctttggttcctggcctctgcttctgggctgctctctgggatctacactgtttcaactcaaatgagaaatgtagacccttctatgatttccaccgtaaacctattcataacattcatgcacattgcatattataaatgttacagaagctggaagtagg

SEQ ID NO: 913955 - DNA, 4001 bp, Homo sapiens
tgcagcaaggtctcttcagattaaacaatgataataaccaaaaaaccaaagcttaccttggttggcagtttgcaaatgttttgtcctgtgtgatctaataatgcactaaaatacgctgtcataaagcaaaatcttcatatgcaaacaatacattagcagcttggctatttaatactttgccgcataaggctctctactgagcgcacaagtaaacagaagtctgtcccttttaggagtttcccaaccagagcctacatcgacaaaagtgggcagaagcgatgaagtcagagataaatgattgtcccctgcagttaatgagtagggggggagggacactctgagagcctccagagaacccacagagtcaaggtggccgaatcatacctggattaatggagacaccgaagacagtggccttgggactaaacgtgtccagctgacagaggagtggcagagcccctgcttgctggctgtcaccttccttctggccaccctcccccatctctctaccccaacgggacaggagagtcagcagccacccccttcaccgccaggagcccacgctgatacctaggcaccctctgtttgaaaaacaagtccggtacagcctccaggcaaccgtagcatcacgctggccgtgcctctgagttatgagagaagagaggcagatgggtgggtgcgggaagggagagacggcacagcacaggcccagtgccaggggaggccaggctccccccacacacacccccagtcctcaacgtccttagtgtgcccaggtcgcagtgggggagtctcgggtgttgagtgacaatcatcaccagaactcaacccctcccaacccaaacagacggcgcaggagtcacacaactctgatttgaaagtcaaatcgaggcccccctccccacacttctgcagctcccacttctctcccgggtctttgagctgagaggggcccagggctctgggcagtgctgggcctccaaccacccggcctgtaaaccggggtccggtgcgctgggaccccccggtgcgggtaggaacaccaggtagccgggcctttctggcacgcagggcggaaaaggcggagggcagcccctgcaggaggggccgggccgcgctcatcagcgggcctgagtttgcttttctggggacggctcccatcctcacgcggccgtccctagccatctgtcggttttgcccaggaggcaactggggctgggggctgaaatgactgcccgggggtcagagggcgggaggggcaaaggtgggactcaggccagagctgcccacctcccgcgccgcgctgcccctctccgtgcccccgagcccaccaatcccgccctcaggaccccgggccccgccgccctccgggtctctccgggtccggagccctggtatatctgcggcccggggctggagcgcagcgggaagcgggaattcgctgcaagtgccgcccccggctcgggcacgtggtggcggccggagtcgccagaggggacgcgcgggtctggaggaggtagcgcgggtctggaggcacaatgcggggctgcagaggagacgcggggccggaaaggagacgcgaggccggaaaggagacgcgaggccggagggggacgcgtggggccggaggggacacgcaggaccggaggagacagtgcggatctggagggacacgcgggtccggggcgcagcgcagggcggaggggacaaggcggagcgcgtctcgcttggccccgggcggcaccgccgcagcccgggtgcacagtgcttccgcgcctggcgaggacccaaggctcgggtacccacaggcggccgctcaggtccccgcgcgcgctgggggcgtgggccgcgtcaccgggactcctacctttcctgaagggcatcgcgccgggggcgctccccgcggggccggcccgcgacacccagacaggacgacgtccaagcggcagccccgcgactcggggcgcctgcgggcggcggggcgggcgagggaggggaaagggacatatttggtcaaagcctggcgcgtcacggcgcggaggaggatccgcggcgaggcaggaagcgcggggcggcgccagccgtgagctccgggcgccctcgggctgctgggggaagccggggcgtgggccgggccgccctgtcccgcccagatccccccggtcccgcaggggcggcccgcagccccccagacgcggaacttgccggccttgaagctgccgcctgtcttgtggactccacgggacaggggaaaactggtccgggaagaaaccaactcccttttctctttcgggctgttccgagccatccttcccgaaggacgagacctgagggaattccatcttatttttacttttatgtcctacgggcacaggggacacgctcgaatcaccagctgactcaaattgaacaaactgaaattgtgtaattttttctttctcttttttttttttgtttgttgttttggggggtgtgtgtgtgtgtgtgtgtgtgttttgagacaggatctcactctgtcgcccaggctggagtgcagcggtgcgatcatagctcactgcagcctccacctccccaggctcaacccatactcctgcttcagcctcccaagtagctgggattacaggcgtgcgccaccacgcccagataatttttctaaatgtttttgtagaaacgggtattgtcatgttgcccaggctggtcgggaactcctggtttaaagtgatctgcccacctcggcctcgcaaagtgctgggattacaggcgtgagccaccgcgcccggcagaattgcaattaactgctggctagagggagcaccccggaaactcgcgtctttcactgggggcctccccactacctcggtttaacctcgacccttccacgtcccgccggctgccttctctccaccgcacgggtcaccgcctgaccgactccctatgtgcttattagtgtgtggggtctatgaaagcagccaatttgtttttattttgttcgctgttttcccggagcctgaaacagtctctcacacacagctcaataaatattactcaatattacgtcccttactcaagggaagtaatagtgcgacttaagaaacggacatacggaaatgcagggagtcacctcccggcaccactgaccttgcctccgcaaaggccaacatctgagaagatgccttctattcctccctaatgtctaacaagcagaccttctttggagccagttaacagttaattgttgtgaaaagtgctattttctgttgcacttcgaaaaaaaattatgtcaggagcaaatctcctgatctcctgatatttaaaacacccaggcaaatagcaattggcccgcttcccatgcggtggcaaaaatcatgcaggaaaggtacagccagtaggtgtgggtggttttttttttctttaatctttcgtaatcataatttgtttcttagcctgctatcgttcgtgggtaatagtccaaattcctccctctttggaagggagatgacgccacggggaggaagccactgtcgggtgggacggtgtcttgccagttggcttgggacacagctgctggtggagccttcagaacagaccctgctcgtgggcctggctgtagatggagtcctgagccctgatttcagcttctgcgccaccgcctttgggggtgtgagtgtcagcgaagcaggaagtgggggaacagaagggtgccccaaatccaaagttaggtgtaatcgtcagctccctctgtccttttccctgccataattgcaatggcaggtggacctggacttagctccatggacgtaactgctacagaagacaaattttatccaaggccaagggttccagataaagcgtgcatcatcccgcctgtatcagactcgccaccgccgccgtcatagtaaggccagagcacatgccctcagaggtggatggggccgtggctgcatatttggtctttgatcctgttttctggtccagagcttccaaaacccttgggatctcca

SEQ ID NO: 913956 - DNA, 4001 bp, Homo sapiens
ttctagccagcaccatggcaccaacctaaccacagcctgtgtgacagtccaggaggtcaaccagtgccacaccctctccatgcggagttcagcctcctcaggtggggcttcctactgagaactgctctacatttggacttctgactcccctccctggcacttgctggagagcacaggaggtgggctccagggaggagacaccatgtcttgctgttcagctggtacctagcgtgtgctggtgcatagcaagtgcccaatctagagaatgaatgaatgccgtggtacacaaccactcatctttcccataactacattcagtagctgtccactagttcctcccataagtgagggacaggaccagcacctaagatctttggttgcttctctgttgtaccctgaagaccctctctcctccaaaagggaaatccacccagctctgtgtcccagcagactcccctgtatggaccaccccgtcaggctcccctgtatggaccaccccatcaggatcccctgtatggaccaccccgtcaggtcccctgtatggaccaccccgtcaggctccccggccctctggctgccaaagccatgagatcagagggaggaaggagtgaggtctaggttgaggattctcccagctccctctctgcaggctacacactgcccgccccctccaacagaggccacagtccctgtcaggctgtccctagttttggctctgccacttgacattttaaacctcaaggtgctaatgcccagggctctgcactatcccttacggttttcctatctcctacccaaatctccccatcattaaactcctcgacttgcctggtacccgctgggcccctgacggagctgatcccaaagtctgaagcttgtcaagaggcagaagcacagcctggggagggaatccacagttgtccctgctcagcttccagcccgcagaggatggacgccttctccggatggcttctcttggttttgggagcagggcggcaaagtcttttcatttcccaatttttaaattacttttctgaatagttaacacattcagatcgctcaaaggtcaaaaaatacagaagagtagctgcactggcgtctcctgcacctccgtcagtgcagggttgacgtgccgtgctgtccctcacaggaggaccttgtcccctccaggcagcttcagaccacggctcagcaccaaacccagccgcggcctggctccctgcagttcccacttgctgtgcttacttctaagtgagaggtcccacctgcaactggggaagctctgcctcgataaagcctccaagagcctgtgccctggctcacaccagggtgaccgggaaacgcagacagcacttatgccaagcaacagtttcttacactctgggacctccaggaagtagcatctgccaaatgcaaggataacattttcctcttcatgcagcaaggtctcttcagattaaacaatgataataaccaaaaaaccaaagcttaccttggttggcagtttgcaaatgttttgtcctgtgtgatctaataatgcactaaaatacgctgtcataaagcaaaatcttcatatgcaaacaatacattagcagcttggctatttaatactttgccgcataaggctctctactgagcgcacaagtaaacagaagtctgtcccttttaggagtttcccaaccagagcctacatcgacaaaagtgggcagaagcgatgaagtcagagataaatgattgtcccctgcagttaatgagtagggggggagggacactctgagagcctccagagaacccacagagtcaaggtggccgaatcatacctggattaatggagacaccgaagacagtggccttgggactaaacgtgtccagctgacagaggagtggcagagcccctgcttgctggctgtcaccttccttctggccaccctcccccatctctctaccccaacgggacaggagagtcagcagccacccccttcaccgccaggagcccacgctgatacctaggcaccctctgtttgaaaaacaagtccggtacagcctccaggcaaccgtagcatcacgctggccgtgcctctgagttatgagagaagagaggcagatgggtgggtgcgggaagggagagacggcacagcacaggcccagtgccaggggaggccaggctccccccacacacacccccagtcctcaacgtccttagtgtgcccaggtcgcagtgggggagtctcgggtgttgagtgacaatcatcaccagaactcaacccctcccaacccaaacagacggcgcaggagtcacacaactctgatttgaaagtcaaatcgaggcccccctccccacacttctgcagctcccacttctctcccgggtctttgagctgagaggggcccagggctctgggcagtgctgggcctccaaccacccggcctgtaaaccggggtccggtgcgctgggaccccccggtgcgggtaggaacaccaggtagccgggcctttctggcacgcagggcggaaaaggcggagggcagcccctgcaggaggggccgggccgcgctcatcagcgggcctgagtttgcttttctggggacggctcccatcctcacgcggccgtccctagccatctgtcggttttgcccaggaggcaactggggctgggggctgaaatgactgcccgggggtcagagggcgggaggggcaaaggtgggactcaggccagagctgcccacctcccgcgccgcgctgcccctctccgtgcccccgagcccaccaatcccgccctcaggaccccgggccccgccgccctccgggtctctccgggtccggagccctggtatatctgcggcccggggctggagcgcagcgggaagcgggaattcgctgcaagtgccgcccccggctcgggcacgtggtggcggccggagtcgccagaggggacgcgcgggtctggaggaggtagcgcgggtctggaggcacaatgcggggctgcagaggagacgcggggccggaaaggagacgcgaggccggaaaggagacgcgaggccggagggggacgcgtggggccggaggggacacgcaggaccggaggagacagtgcggatctggagggacacgcgggtccggggcgcagcgcagggcggaggggacaaggcggagcgcgtctcgcttggccccgggcggcaccgccgcagcccgggtgcacagtgcttccgcgcctggcgaggacccaaggctcgggtacccacaggcggccgctcaggtccccgcgcgcgctgggggcgtgggccgcgtcaccgggactcctacctttcctgaagggcatcgcgccgggggcgctccccgcggggccggcccgcgacacccagacaggacgacgtccaagcggcagccccgcgactcggggcgcctgcgggcggcggggcgggcgagggaggggaaagggacatatttggtcaaagcctggcgcgtcacggcgcggaggaggatccgcggcgaggcaggaagcgcggggcggcgccagccgtgagctccgggcgccctcgggctgctgggggaagccggggcgtgggccgggccgccctgtcccgcccagatccccccggtcccgcaggggcggcccgcagccccccagacgcggaacttgccggccttgaagctgccgcctgtcttgtggactccacgggacaggggaaaactggtccgggaagaaaccaactcccttttctctttcgggctgttccgagccatccttcccgaaggacgagacctgagggaattccatcttatttttacttttatgtcctacgggcacaggggacacgctcgaatcaccagctgactcaaattgaacaaactgaaattgtgtaattttttctttctcttttttttttttgtttgttgttttggggggtgtgtgtgtgtgtgtgtgtgtgttttgagacaggatctcactctgtcgcccaggctggagtgcagcggtgcgatcatagctcactgcagcctcc

SEQ ID NO: 913957 - DNA, 4001 bp, Homo sapiens
tacaatcacatgtatttacatatgtgggactagcctccaatgcagtttacaaagtgctatagagataatacttgctttatgcaaaagttgtttctgcatttggccttggccaaacctccctggggatttaagagctgcattccactccacttacaggttttacacaaagacaagagaaccatgggccaccccagttcaagcgcatctgactgggctgggcaacacacccacatcccccagtcctgggctacctcacaaagagggggaacaagacctctcctgagggctaccccagaaccctgaagtccaccagggtggatctgctgacgtccccacccagggcacaccatgggggtgggtgtggggagaggggcaggtctggacgaggccggtgattcagaccgagcagggctccaggagagctgccaagtcccgcgggggccgtcctaagaaacgtagtagccgggcaaccctgcctgccagccgcctgcgctcaggcgccttcggatgacccgaagccacctcgagagtttgcacctggatcccacggtcactactcaggctacgacctgacctgggcaaaaccgcaccaggcggctccctgtccagcccatgggagccggggcgcattacctggagaggcagcgtcgcccctctgcgctgcccacccgcccttttccgcggcggcgctccgcagctgaggtggagctcgaggtaaccctctcccaagcgatcgctggtggcgggggcggcgaccggcggggcggggcagggtactgccagccaattccgagcaccggggggtgcgtgcgcccggggcgcgtggagcagcgccaaccgtgcactcaccaacccaccgaccctccccaaagccggggacacaggcgtggctccaggtggctctcctggcgcccccagcacgggcgcccccatggcactggagatgcacggaagagagagaaggagagagaaagagataaaagcagaaagaaacagtgggagaggaaggaggtagaaacagagaaaaacagagacatatatatcgaaagagaaaacaggacagagaaataggttattaagtgaagcgaggggataggaatgcatagcaaggcgggagaggagatggaaacatgcagagagaggagatccggacggtgaaaaggggcggaggcgcgagcggccgggtccctgggctgcgctccggcgacggccgcccgagacgggtgtcgaggacagggatcgcggaggatgtggatcccctccctggcctgcccaggcgcgcgcgtccctccgtctcggggtacgcagcccggccgggcgcactcgccgtttccgggccggcggggcagccaccgggacaagggccacagcgcccccgccgcccggccaaggacgcgcagcccgcgcctccgccccgccccgccggcgcgacccgcacgggcgcgccccccgcagaggggcgtcggcacaaagccgccccacacaatggcccggcccggcgcagcccgccctgcaacccggctccgcgcagctgcactcacatctgggcaacgagggcctgtggtccacgggcacccagatcttctgcactcggctctgcgtcagttccaacggcatcttcgcggctgcgcccgacggcccgcctcccggggccgagatcccgacgctggcaggagagcggccgccgacccccggaacaaaggaggagaggggggcgtgcgccggcgcgcggccgggcgtttcctgcgctgccaggggaaacgtgctttgggctaagttccggaccctcgcctgtgcggggctcgacgtgtgctgcgagggtagcgaggctggggatgcccggcacggccggctcgtccgctcggaaagctctgggatgctcgggcgcagtgacagccgcgctctcgccaccaggccctgctgctcgcctcctctccggcttggctgggatgccccgcgcaccgccggcttttaaagagtccgggctggccgcagacgcgtacgtcagcctcggggcgggccgcattccttgggtcccagcccccttccacgtggggaggagggtgggcgagccgggaagcagcctgcgagctccccctgcgggccggcgacggcggtgcaccagctcccgccgccctgccccgggcctggagcgcgcccagccctgctgaagggtcctggctgctgttatcccctcgtcccgttgtcccctcgggacgtctggcacagcttccccgactaattccggcccctcacctcaactgtgctggccgggaggagagcagagacgcagtcctgcccagtgtagaccgtggaccccgcagccgaatcccttgggaagctgcttaaagtgcatcctaccaatgcagctcctttagggccatggagccccaatactctgcattcctaacacgcgctgtggggcaggcgcagtccaggtaaggacatgggccaggctgctccctgataatacccgtgagcccatcccccgccacgacccgggcgacccgcggggaggaggcttccctgatcctcccacctcacctcgtccttgtccactttgctgaatcccttagaaacctggacttgaactgagccttgctcccctcccctagcccaaagactgggaaccttgagaggcccgcggtgctgggtacgaggagggggcgggaaagccccggggagctggactgaagtggactggggctgggggcagctggcatctggttttcacactcaccatgtacaccattcaataaacctttatcgccccgagtagaagaatgaataaaactagacccatttcgatctgcaattcattacctaagtcgagggaaaactattgggggcggccccttattaggcagactcctaaaattcactccgttatcctgcacaccctgcagctctgcctccccactttttggtgcatgcgtgccccgtctcctttcccggccctcgcagtttgcaccagctcgcgacttgtgacagtcgtgcagtcaggtcagaggcgtgcggggaagatctgggttgcttttggtggggaaccgccgcccgcgccgggacggatgtaacttttgcaaacgaagcctcagtacgggagcgctgcgccgccttgcagagaggtgcacacttagcgctgaggctgggctgtgattggagggaaggcggcgctcgctgaaacctacaccgcggcggaaaagtctgcgcagaggctgccacacgtcgctcacgtcccgcatgctccacagggagggcgcccgcgcccaggcggcgaccggggctgctcccgccccgcgcgcccgccccacccgggcctccactcctcccgacccgccgcctgccgaggggccccggaacgcgcaacatcggccacctggcctgtgccccgccaccctcccccacgcctcgacccccactccccctcccgcctcgacccccactccggcaccccgccccccgcgccgccctctcagagcccctgttcccgcgacagctttgctgacggtctggtttccgcgctctggcggctgttcagaaacccgatgcgttgcatttggacttgttttctgcagtgggagcacatgccagaggcgacaccctaaacgcccaggggagagtcccactccactcctgaaataagagtgggctgacccgaagagggaaacagcaggcagcgagcgcccgcgccaccgggacgagttcccgccctggggttcgcgggggtcggggagggctgtaggctgcgcgcggggagagcggctgcacccctgcaaagagcgcccgcggttcctggggaatgacggtgcacctgcgcgcccgctgcttgcccaccgattttgcacacgtacaggcgaggcaagcggaccagggggccttcttccacactccctacaagcttgcaaacactgctggtttcagctcacagggagagcagagagacggcgtctgccccagcagcggcacatcattcatctcttgacctagataacgcatctgac

SEQ ID NO: 913958 - DNA, 4001 bp, Homo sapiens
tccaaaatgaggacacgcctctcttgggatcatgtatttaggcttggagataagaagtgtaaagctcttagaatacaaaatgttttcaacaaatggtagctatgatcatcttaatatacggaattttaccataatttcacatctgacagaaaattcccctgaaattaatacgtgaatgtgaatatgttctctcatctctagctacaagcaatagtcttctatgtcagggaaaatcaagtactaacatagaatcagaataaaatggtaaaagaatggggacactgagatattctcgaggaataacctacttactgtaagggtttgtaaatctgtggcagctaagaccaggccctctgagtacatctggaggtgaacttccttaaaagaaatgcgtccaaatgctccaacaggttcaagatcgtatcaccgaagggtaaagctctttacagagtctacaaaaaaattgtgacttcagctctgccagggaaagagtgcccaggcgacccgccatggcgggcttccccagggacagcccaggtgtgacccatgtgggctcgaggccaccatatttgatgccacctgcagagctgagggcagctgtctcctattaacccgaggttgcagcaaccaagccgcgttccccacataatattggtttccaaagtatcattttccccagaaaagaagaggcgtggacttactaaccttcaatatgtctaactcctcccaggtggcaaaaccagggtaacagagaacaccgcgattctgccaatgtatcctaatctcacatgcctgtacacaaactcccgcgcattttagcaagcttttggacatggagctcaaaggaatgacccataaatattttccaatacatgcagtatcttaattttttttctttctttttttttgtagacacagagtctcactatgttgcccaggatgctctggaactcctcggctcaagcgagcctcctgcctcggcctcccaaagcactgggatgacaagcatgagccaccgtacaaggcccacagcacctaaattccaaaataaccttgaaaccctgactttccacccgccctggtggcttccagagatcagttcctcttcctgtgccaaaggtttcttgtctttcgcggcccaggtaaggtcactcaaggtgctccctctgcttctgaaggcctttgactgagaagccactctgggtcctatcccgaccccaaggcggctccattcgtacccgcacatctccgggccggtttaagtcacgcgggccaggctatttccacttcactctcctgtttcttcaatcccatcctctgctgcatcacgttttctttctctgagaacccagccctgcaggaagaacgttgatgctggggtccttttactggaatgctaacgccagagcacttcccgggggcgctgcagggcgggctgcggggcggggcctggcgctgccacccgggtctcccgcggggggcgctgggcctggggaggctgcgctgcgggcctggggagcgcgcggcgcacgggtgtcggggccggggctcgtggagacgacgggccgggcatcacgtaggcgctcgtggcgggcggggcggcgcccacagcgcctcaacctgcggcacccgcgcccgccccgcgcgctcaagggcgaagggaaggtcacccgcgcagtgggcagggggtgcatccccgctccaaccctgtgcagtgcgcggccccgaaacgggaggaaatccgccatccgggcctttccacgcatctgcggcaggaggaaccgggaaaacaaaaatcaaaacccagctcggggcgcgccgcgtctccagcctgcgcgatcgctaaggctcccaggttgcgttcgcctgggaagcgccgatctacccgccagggattgcacggatcgggacactccatcatccgggcaccggcgcccccacgtgcacccggggcctggggcgcgccgagtctccgccaccttccgctcttcaatgttaaatatcctcccggcgcgcccgcgtccgtgggcccagcctcgggcccctcctagagagcagcttccacattgcagggcagggaagcccggagcccgcgccgcggcgccgctgacatcccggagtccccgcttcctgatccttcccgtctgcggaggctggcggggagggcctgggacccattttggttttcgtttttgtcacgagccggaaggcgacagcacatgcgagcgcaggaaaccctttttaaaaatctcccagcggaaacgcgaggggctgccggaccgccctggagacgccaggcgggaaccccgcgcacccccgccgcgtcccgcattgcagcagccaggaccccgcccacgccgcgcagggcacgaggcgacaggaggcgcgcggggacccagccgtttcttcctcgacattctagggggtggcgtgcggcggagttggggggcgggggggcacttaggaagtgatcgcgctgtacccacgcttcggaggggacgcccggccccgtcctacagctcagaggcagaacgacccccgagggcgcttcaggcgactccctctgccaggttccatttaaaacaaaaccgaaggtggaaaactcactgatcttccggatggaggttcctaccgccatgtcccttcctcccccgccccaccgggcaaggaccccggggctgcctcgccggctcatgccgccccgcaggtacccctgccgcttccgggcgcgggcttcttcccggttctccccatcgcttccccgctcttctccccggttctccccatcgcttcgccacctttccccgggtcccccccatcgcttcccccctcttctctccggtcaccccatcgccttcgcccggttctccccagctccgtccgtccgtccctccctcgccgccgggaggggggcgcgcaccttgagcatccccgccgctggtcagcacgccgatggccttgccggccccggagaggtgctccaggaacttccgcaaggagcccttgggggcccgggagtcgtccgcgtccatggcgaggaggccgaggggagccgcacgtccgggtgcgcagcaggcaatggggaccctgcccgcgcgcgcctgactcggaaccgccgccccgcccgcgcccccgcccggccccagcgccaatgggcggtgacgggcggggcccgagcgtatgggaggggctgcgggggagggggcgcgggcgcggctaggggcaggggccggggctggggcgggtgtgggcaggagcatctacgcgggggtcgtcgtaggtgggggccgcgctagcggtgcgggaggcggcagaggcaggggtagcgccacaggtgggcgggtccctgctagtggggccgcatcgcaggtgcgcgagcctcgcgggtgggctggaggactctggttgggggctctagagatgacgggagcgccacaggtggggcaggggcagcgtccggaggaggggagaccgcagggggccggggtcacatcgtttgcggggcgcgccagggcggggcgggatagaacgccgggagcatctcccgggggggcgagggagaccgtgagtgggcgcgagcgccggggcgggtggaaaccccgcagttgcggggagcgccgatggcggggaggggtggaatgggggcgcggagaccccacctggacgcggaggctcgcggcaggcccggccgctcgggccgttgtgggggccgagcccggccgcgcgcacagcttctagtggcccgcaagattcctcctggggcggcgctgggagcctcggggctcggcttcctcgacccccgcccccaggtttcctctgcagcctgaggtcgggaaggacggacggagagtggatcctccaggtggtgggaaaaggtgagcgtggcgggctgggccatgacgaagctgccatttcccgggcccatgggggctgtggtgctcctgggcccccagccccgcccttggggggaagaagccgtggggtggaggaaggtatcgggg

SEQ ID NO: 913959 - DNA, 4001 bp, Homo sapiens
cctgtgccaaaggtttcttgtctttcgcggcccaggtaaggtcactcaaggtgctccctctgcttctgaaggcctttgactgagaagccactctgggtcctatcccgaccccaaggcggctccattcgtacccgcacatctccgggccggtttaagtcacgcgggccaggctatttccacttcactctcctgtttcttcaatcccatcctctgctgcatcacgttttctttctctgagaacccagccctgcaggaagaacgttgatgctggggtccttttactggaatgctaacgccagagcacttcccgggggcgctgcagggcgggctgcggggcggggcctggcgctgccacccgggtctcccgcggggggcgctgggcctggggaggctgcgctgcgggcctggggagcgcgcggcgcacgggtgtcggggccggggctcgtggagacgacgggccgggcatcacgtaggcgctcgtggcgggcggggcggcgcccacagcgcctcaacctgcggcacccgcgcccgccccgcgcgctcaagggcgaagggaaggtcacccgcgcagtgggcagggggtgcatccccgctccaaccctgtgcagtgcgcggccccgaaacgggaggaaatccgccatccgggcctttccacgcatctgcggcaggaggaaccgggaaaacaaaaatcaaaacccagctcggggcgcgccgcgtctccagcctgcgcgatcgctaaggctcccaggttgcgttcgcctgggaagcgccgatctacccgccagggattgcacggatcgggacactccatcatccgggcaccggcgcccccacgtgcacccggggcctggggcgcgccgagtctccgccaccttccgctcttcaatgttaaatatcctcccggcgcgcccgcgtccgtgggcccagcctcgggcccctcctagagagcagcttccacattgcagggcagggaagcccggagcccgcgccgcggcgccgctgacatcccggagtccccgcttcctgatccttcccgtctgcggaggctggcggggagggcctgggacccattttggttttcgtttttgtcacgagccggaaggcgacagcacatgcgagcgcaggaaaccctttttaaaaatctcccagcggaaacgcgaggggctgccggaccgccctggagacgccaggcgggaaccccgcgcacccccgccgcgtcccgcattgcagcagccaggaccccgcccacgccgcgcagggcacgaggcgacaggaggcgcgcggggacccagccgtttcttcctcgacattctagggggtggcgtgcggcggagttggggggcgggggggcacttaggaagtgatcgcgctgtacccacgcttcggaggggacgcccggccccgtcctacagctcagaggcagaacgacccccgagggcgcttcaggcgactccctctgccaggttccatttaaaacaaaaccgaaggtggaaaactcactgatcttccggatggaggttcctaccgccatgtcccttcctcccccgccccaccgggcaaggaccccggggctgcctcgccggctcatgccgccccgcaggtacccctgccgcttccgggcgcgggcttcttcccggttctccccatcgcttccccgctcttctccccggttctccccatcgcttcgccacctttccccgggtcccccccatcgcttcccccctcttctctccggtcaccccatcgccttcgcccggttctccccagctccgtccgtccgtccctccctcgccgccgggaggggggcgcgcaccttgagcatccccgccgctggtcagcacgccgatggccttgccggccccggagaggtgctccaggaacttccgcaaggagcccttgggggcccgggagtcgtccgcgtccatggcgaggaggccgaggggagccgcacgtccgggtgcgcagcaggcaatggggaccctgcccgcgcgcgcctgactcggaaccgccgccccgcccgcgcccccgcccggccccagcgccaatgggcggtgacgggcggggcccgagcgtatgggaggggctgcgggggagggggcgcgggcgcggctaggggcaggggccggggctggggcgggtgtgggcaggagcatctacgcgggggtcgtcgtaggtgggggccgcgctagcggtgcgggaggcggcagaggcaggggtagcgccacaggtgggcgggtccctgctagtggggccgcatcgcaggtgcgcgagcctcgcgggtgggctggaggactctggttgggggctctagagatgacgggagcgccacaggtggggcaggggcagcgtccggaggaggggagaccgcagggggccggggtcacatcgtttgcggggcgcgccagggcggggcgggatagaacgccgggagcatctcccgggggggcgagggagaccgtgagtgggcgcgagcgccggggcgggtggaaaccccgcagttgcggggagcgccgatggcggggaggggtggaatgggggcgcggagaccccacctggacgcggaggctcgcggcaggcccggccgctcgggccgttgtgggggccgagcccggccgcgcgcacagcttctagtggcccgcaagattcctcctggggcggcgctgggagcctcggggctcggcttcctcgacccccgcccccaggtttcctctgcagcctgaggtcgggaaggacggacggagagtggatcctccaggtggtgggaaaaggtgagcgtggcgggctgggccatgacgaagctgccatttcccgggcccatgggggctgtggtgctcctgggcccccagccccgcccttggggggaagaagccgtggggtggaggaaggtatcggggcgcgaccctcagagacgccctggcggcgccccggcctgggcgctggaaagtcagagtggggcaggaggaggcgcaacaggactggcctggcggggaggcggggaggcgggaggaccctccctccccacggacacgcgcgctgctgtacgctctgcctgacctcggccggctccactggccagctccacgtactgaaatactcacatccaatgcactgtgcggttgcccatccacagcttaacagcctggtgccagttaccctgcgatgggagagggggcagcccccatagaagcacgggcttatgggacccgggttccttcagtgctcacccacgaagaagggctcccaaacggccccactcgacggctcaccggaggatggtcctgcgcagtgggtgtttgttgaacagataagagacaacaaaacagactaagaagaggcctgttctatgaaccggggaaagtgaaggaatcacaaagagcggctcgccttagggcaatcctggggaaaagatggagaggcatggatttttcttggatgtgtgcctcatcctggggctcatccctctgagcatcaaatattcattgcaaaagagggggaaaaactctgctgcggacaatgctggatggtctgatctctcccttggccagaattaacggggcaattcctaacccctgttggtcctcagaatcacctggcctatgcacactcccgctaaaccactgaagtccaatttctgggagctcagccagggaatgtgtatttttaaacaagccccctaggttactctgataagtgcaaagtcagagagcgctgctctcatgcactgagcctgagcactcttctattaataaaaaaggagaggagaatcctgggttgggtgcccttcgccttctggcggcagaagagcagagccaggctctaagcacctgcacccaccgctgggctcaggagctgcgctggagaatagaagggctaatttagtcattcatgcctttttagagcaaattacatgtggagagggtggggcacactgaattttattttagccaaatgccccttatctccttatgcaattgatatttttatattgaacattagaggat

SEQ ID NO: 913960 - DNA, 4001 bp, Homo sapiens
ttcgaccttttaaaccgttaaatcttttaattttctatactgttaaatttttaatttaatgctaacatttattttaaaactgaaataggatctgttattttacagagattacaagtttaactatttgattagtctcaaacagagacaacatggtttaacgtggactagtcattgggaaactaccacggactgatacagttcttcctgccacagagctaaagaaaatggcctcctttaccagcactttccatttcccagcctctcctaaaagatgaggtcacaccaggccatctcaaacaatcactcccctgcccaccccaccccgcagaggtttacatttaccagactgtcctgcgttttgcttcatttgagaaggatggtacagtgaaggcaagaagctaggagagcaatctgaggccaaatacctgtgcctcatcaatgacccttgtgaatggctgcttctttgtccagaggttagaagggagcaaaggaggatctgcccctatcatcagcggaagcacctcttcagtccagggattcttggccgtgccggcagcagggaatgcttccttattagcattccaacaccacaaagagcagactggggcgggagcaagcctggataggcaagcattatctcacagccacttccacctttgcccagcgtccttagccaaaagcctaccagttcctcacacctacctgttacttcacccaggactagggcgaggacactggactaggaatcagatatgaccttggacaagtcatctttccaaatactcacttttcccaactataaaggggccttggaaagatgagaaagataaaatcttatctactttattgggtagaaggagcaactcgaatcattcattcattcactcaagttacatctacagatgcgttttggacacactatttgtggaatgctactgaacagcaaagacctgcacaaccacgcggatttcttggtgttctgaggcttgttaggcacccccagggcctccacctactgctggggacgaggctgtgtggcgtgtcgatccgctaggatccgtagccgcctcttgagaggccttggttacagctgctttaaggcacagggcgtcctccaggagcaccagactgtaccaaccgcttctggcgctaagggaacctgaaaaagacctggccgccatagatggttccattagggcaaactgtccacgacttattattattattttttttttctggacagagtttcgctcttgttgcccaggctggagtgcaatggcgcgatctcggctcattgcaacctccgcctcccgggttcaagcgattctcctgcttcagcctcccgagtagctgggattacaggcgtgcgccaccacggccggctaattttgtattttcaatagagacggggtttcaccacgttgataaggctggtctcgaacatcctgaccgcaagtgatccacccgcctcggcctccccacatgctgggattacaggcgtgagccaccacgcccggcctgtccccgacatattaaatgttcagactagaaagggaaaactgcgaagtggtgtcgtggggagcgcaaagggttgcggggcgaccgccctgggtcctccccctggcacagcccctcatgctccacggcgtgaccttgaacaagtagactctaccctctgcactcatcttctcaactacacactaaactgttaagagagatgctgcccaaggtgccggccctctccgagagggcgcagacgccagccaggcggcctccgaggccggacacccggcccttcgcagcccacacccggcccctccgcacctcgtagcgcctgcccgccgcgcttcgcctcctcgtggcccgccgggctcaggtcggcgtcgtaccagccgctgaagcggttctccaggttccatgcgctctcgccgtgccggatcagcaccagtttgtaggcggccatggcggcgggctggggatgcggcaccgactgggattagcagattccggagtagcagcccgccccgtcggccgcgcctgcgcgctcgcaccgctcagtccggctcccgcgcaagttctcgcccaaatctttccactcgctctggaccgctctccgccctccaggtgtgcgcatgcgctgcatcctggcgctgcggcccccgacaggagggggcgcgcttcggcacggcagagcgcatgcgtcctccctctccagtcccgcgtcggtcgccgcagtcacggagcgcacgtaagcacgcggagggcggagggcggagggcggagggcggagggcggagggcggagggcggagggcggagggcggagggcggagggcggagggcggcgggcggcgggcggcgggttgtgggggcggccccaattcgctggctgccgcgctgctccggagcagctcggccagattaagtggcccttatcactggaaccgctcccatccccacgcagagattgattcacggacctgtgttcgagtcttcactcgtacattctacttgctttgtgtctttgggcaggtcgggaaacctctcagcctcatctgtaaaatgtgatcataaataccgggtacctggaagtgctcggtaaatagtagtttttactattactctctcatttcagcaggacactgatctttttactcctagtttacacgtaaggaaactgcccgtgaccctgctggttccaaagcctgctctttttccagcgcggggctctttatcccgtctctgtctacaatctttcacacacgttaagtcagtgctttctgggcctccaacaagaaagcaaacgctaggacccttcaaatatttcaggaaggggcgagttctagtcactgcctgttcttctccgagccccaatcagcaatttattattacaattttttttttttttttgagacggagctatctcccagactggagtgcagtggtgcgatctcggctcaccgcaacctccgcctcccgggtttaagcaattctgctgcctcagcctcccgagtagctgggattacaggcagccgccaccacgcccggctgatttttgtacttttagtagagacggggtttcaccatgttgtccaggctggtatcgaactcctgaccacaagtgatacaccggcctcggcctcccaaagtgctgggattaccagcgtgagccacagtgcccggccttctttttcttttttaaacagagtttccccctgttcccaaagcagagtgcagtagcatgatcatagctcactgcagcagccttgaaatcctagactcaagtgatcctcctgcttcagcctcttgaatagctgggactacaggcatgccaccaggcctggctaattttttttttttttttttttttttctgtagagacagatctcactatgttgaccgggctggtctcaaactcctggcctcaagcagtcctcctgcagcaacttcacagcaacactggaatgacaggtgtgagccactgtggcaggccaatctcctggttgatttcaatctagacactttaatgagcaccaaacatgagccaggcagtggactagactcaaggatgggttgaatgtgtttcctgtccttcaagcaagcagagggcaaataagacccatgtattagtagccaacaataacattgggtggctcacgcctgtaatcccagcactttgggaggccaagactggcggatcatttgaggtcaggagttcgagaccagcctgaccaacatggtgaaacctccactctactaaaagtacaaaaaaattagccgggcatggtggagtgtgcctgtaatcaggaggctgaggcaggagaatcacttaaacctgagaggcagaggttgcagtgagcggcgatcatgtaccagtaaagcacctactgcatgccagttagtgttctgagtgctttgcaaatattaactcactcaatcctcgtatctccacaatgaccctctgaggcaggttctatcttttcccacttgcagatgaggaaa

SEQ ID NO: 913961 - DNA, 4001 bp, Homo sapiens
taatatgcttctcaatcctgagcattttattttctttcatcccccaaaccaaacagcaccaaaggagatgtaataacaaatatttcaatgtggatatctgcagtttaacagccttaataactgtagctataaaatgttaagagctatcgtattttggtggcaattaagagttattgatatttctgaaattcatttgagatttcactgtagctttagcaaaatattggctctggaaataataaattgttttacaatcttaacattattaagaaaaacttattgccatcaaattaactaaacccacatttaaaattcaatcaaaataaattgctcttgatcaaaatactgatatattttaaacatatttaatattgacccaatttaattggaaaaatatatattgctccatttataatcaatatgttgagattaacacttttattaattccttgcagtagttaagaaaaagtctgacaccgctcactgttcaagagtactgggcaacattcctcaaacaacttcacaggtaataaacgtgcacagaaacgaaagctgtgctgagggatgacaaatataagccagccctcatctgtgcattactacataaggtgctactagaatgtgagtgccgcaactctaaagaacaggatttaagtcacaggtcctcaaattactgtttaaaagaattgacacatctatttcggaaaggttatggaatgtctgtagtgtctggacgggggttaatgagcagttctaagtaacaagaaaaaacaccaggtcaaccttcactcacaaaggccaataaatacaacaaactaggtctcttcaccttgagaaataagaaaaaactgttgaggattgggaaaaagccatcccactatcaagtattttaaaagtaataaggttcctttttccctttgacttccttagagctaagtgagctctaagtcaaggagacttgaaatgcgcggcagtagcacagtgttcagtgggccaccatggggaggcctgcaatacagattatttttcctggctctcagaaaacgtgtggcaatatgcaattcagacttcatgtttcacatgttcaccttcccttttatggtgcttgctttatacaatgacaatgtcatggagctaaaagccaaagtcagtctctaacataaaaaacaacagtgaaaagaaaggtatgctgtgcatacaaagtacactttttgcatgatggtggcttataattatgcagatgactattttctcaagacaaaggaaggatttacaaaagcaagcttattctttctatgccaaagcttaagtttcagctcttttttgaagaaaagttctctaaaattactttcctgcttcaaaagggaaaacagaaacccctatccagtatgcattaattcacccttttctttttcctgatactcattctagggtgactgtcggtataaaggcgacacagctcacactcagccctctgtatgcctcttgccccagccttcccttaagtttttcatcttagacttgcctccaaatccaactaaagacctagaagtacatgcatttggggccagcatcattaaggactcaggggccccactgcttctagcaggttaaggctgcagaaatccaacctctgtataatcgggggggtctaatatattaagctggatctagaatgcttacatattaataaacctgtcacctaagataaagcaaacagtacaatgtatttataatccccacagaccgaccttaaccgctgcttataataatcttcatctccatcatctcggtatcttcccactttccgacctcctcctcctccttctcctacagaagcagcttcagcttcttccccagaacttgggaaaaagtcatcatcaatctcctgcactggcactttcttctgccgtttcccgcccttgggcagaggcttcagctcatagtcagtaccatctccagacaggtccgcctctgccccctccacctcgtcatcttcctcctcttcctcctcctctgtggggaaatactcagactcttcaccctcagagtctccctctgcctctggcctcatgtctgactcccaaggtctccttgcctttggcaatcccactttcccctggaactgcaaagccctcttctggagtttcttgatgtgctttttcaaacgctcctcttttttggacagaactctggctttcttgtttggtttgtttttattttgcactggggctggaggcgtgactggggctggagcttttctagctgctcttttattacaaccttgcttcttcctttcaaaagacagttttgcttgatctgccaaatacttttcgaagcctgatgcttcattaagcatgatttttctgggctttttctcctgtttctgagggatctgggtaccaaaaggtgtcatctggccagtgcggatgagctcttcccaggcagtctcctggacaggcatgagcatgctgccaagactggatggccccggctctgaaagaacaatagcaatgcgtttcgcactagcatgaaactttccgagggtacaaaagaaatgctcactctttcaagaaatattaggcagctacaaataactcatataaaaaaagaatcatccatgtactaaagcatgttacatatgaaggacagaataaaattatagcatcatgctatatttaatatattcctgttcaaaaagacaacttctcagtaacttttccccaaaatatttcactataaatatactctctgccatccaaagataggcttattactgtataaatacagttataaatagtcaagtttagctgtgtttccttatcagctgagtagtcgtccatgaggaagcaagctccgaagttctcacgtcattgctaaaaccaacattcagatggacttaaattcaagagacagtaaaaccaaaaacagggatcaccatgtacctaaaaaggaaaaacataaatgtcagctctatgctgcccagcatggcagttaccagtcacctgcagctatttaaatttaaattacattaagttaaaaactcagttccacagttgcatttgccctttttcaagtgctcaagagctacacgtgactaatggctactataatgggcaacacagagaacattttcatcactgcaaaaaggtctattggacagcagcactgtgttagatatgtgaagttaactgacttgaagacattacaccataagtgtaaagtcaccagaaagtatccctctttcattagttgaaattcatctctggcaaaattaccacataaccaaaataccaaaagacctaaggcttaataggaaggaatccatattctaaaatctacaattcttgcaggccaatgatacccagtttttcattaaacttgcactgaaataaaacatacatctgaaagtgcacaaatcattaagtgtagaactcagtgaatattcagaaaaaatgtactcataaactagcagccatatcaactaacagaattactagcaccaccagatgagcccttcaggctacctcccagcctctacgccccccaagataatgatggacctggactcctaacgtacagacaagttgtgcctgtctctgaacgctacgtaagtggaaatgtttgtgccctgtgtccaccttccttcacccaacattatgcttttgagctgcatccttactgttgaatgtagctgtagtttgttaactctcactgttaatgcacatttgagtggcttccaggttttggctactaggaataatgttgctatgaatattctgatgcacatcttttggttttatttatatttatatatttatatatttatatatttttatatatatatatatatatatatatatatatatatatatatatatctgggtatgctaagctttagtagacactgtcagttttccaaagtgttacgttccaaagtccccatcaactgtgtcagaaagttccaactggtgtatattcttgccattccatgttagcta

SEQ ID NO: 913962 - DNA, 4001 bp, Homo sapiens
ccacggtgcccggccacaagttaatttaaatgagatgtttaactgaatttttaaaagtcagattataaggctggtgtgatggctcaggctgcaatcccagcactttgggaggccaaggcaggaggattgctttagcccaggagttcaacaccagcctgggcaacataggaagggcccgtctctattaaaaataaataaataaatgtcggattatgtattttctggtatttttccttctttctgaatcttaaaatacatacagaaaattagtcggtctccaaaattttccacaagtgcactaattagaataagtcctggaaacagaggatttgtataataaaattctaatcaggtaacatattatgtggtatatcttcattaccactcaagaaacttttatatacataatatatttcaaaatcaaaactcaaactacttactggaattgttgaggatggaaactggcagaggaaatagtccctgaagtgggatgagctacctaggatgtgaattaaggcaaataaagtaaaatatagaaggccaggcacggtggctcatgcctgtaattccagcactttgggaggctgaggcaggaggattacttgagctcaggagttcgagaccagcctggccaacatggtgaaaccccatctctactaaaaatacaaattaggccgggggcggtggctcacgtttgtaatcctagcactttgggaggccgaggcggatggatcacctgaggtcgggatttcgagaccagcctgaccaatatggtgaaaccccatctctactaaaaatacaaaaattagccaggcgtggtggcgttcatttgtaatcccagctactggagaggctaagacaggagaattgcttgaacctgggaggtggagattgcagtgagctgagatcaggccactgcattccagcctgggcaacagagagagactccatctcagaaaaaaaactaccaccactactactactactactactactactactactactactactactgctactactactactactaataataataatacaaattacacttgggaggctgaggcaggggaatggcttgaacctgggaggcggaggttgcagtgggccgacattgcagagtgcggcactgcactccagcctgaccacagagcaagactccgtctcaaaaataataataataataataataataataataataataataataacaacaataacaacaacaacataaattcgcctggcatcgtggcgcaaccctgtagtcccaactacttaggaggctgaggtggaaggatctcttgagcccaggagtgagccgagatcgtaccactactgcactccagcctgggtgacagagtgaggccctgtttcaaaaaaaaaaaaaaaccaaaaaagcaaaaccctagaaattccttttaaagatctcctttctatccggtaactgcagagagttgacatagaattgcattgtttctttagcttaatcggttactttcggaatgtcactctcatcaattaacatgttatcctttctttctctctgtttctctcttttggaacgcactggccatcacggctcactgtaaccctggactcctggccttggcccccagaagagccgagacaacaggcaaggcgtgtgccgccgcgccagtcctcacccgctgtccttccccaaatagtgtctttatataactcagtggcaatgccgtagtccagcagggaggccgccctgggcagcgcctgcctggccagctcctgcccgggagggcaccgtcctctcccctccggagaggtcccggtcactgcctgcctgggccggttccaggcagccctgcgcgcctgtgcaccgtgcgcctgtgattggacatctctgggtctctggacagctgccggggtcacgcgccgccggtgaaacgacgtctccacaaagagaggagcagaggcccccagggatcccggagggcagggcaacgcggcaattgccccgaccccagggcggccgcgcgtgtcctcgggggacgcagcctcttccccgctccccggctcctggaagagacgcgacccaggcggggacgcggcgctgagcgaggaggcgctggggctgcgaagcgtgcgaccccgaggcctccacccggaccagggccaccactcaggcggcggcgccggcgccggatccagcccgagccccgcgcagcccaaaggatacgacagccccggccgaggggcggccgaggtggcccagaacaatctgcagacgggcggcggcgcgaagctgctccatggctgcggcgcggggaacccccacccctcccggcctctgccccatttagcccagcgggcggctccgcctccaggcgccgccccggactggacgtaagcgggattccgggcggtgccagctcgcgggccgggctgctggggagccctagtccgctagagtccgcgcgccgggcaaccgcccggggctgaagtcctccccacaccatgatccttccgtcctttattttctttctttttaaaaagaaacaagatcttgctctgtcgcccaggctggagtgcagtgcgcgatcatagctcactgcagccttgaactcttgggctaatttttattttttgtagagatggggtctcgctacgttgcccaggtgggtctcaaactccccccgcctcccgtctcgacctcccaaagtgctgggactacaggcgtgagtcattacccctgccccgcaccctgtttctgttccatcaccaggaccctccctgccgcaccgaagctcgggggcccagtgaccaggccgaggtcacacagtgacaagtggctgggctgggacctcactcactctcctaacgtcatggcttccatctgtttaaccctacgtgactgctccttccactgacagctgaaagaataaaatctccgatttaaacaaaaagtttgccgggcgcggtggctcacgcctgtaatcccagcactttgggaggccaaggcaggcggatcacggggtcaggagttcgagaccagcctggccaacttggtgaaaacccgtctctactaaagatacaaaaattagctgagtgttgtggcgcacgcctgtaatcccagctactggggaggctgaggcaagagaatcacttgcaaccgggaggcggaggatgcagtcagcgagatggcgccactgcattccagcctgggtgacagggcaagactccgtctctaaacaaacaaacaaacaaacaaacaggtttttagccgggtgcggtggctcacgcccgtaactccaacactttgggaggccgaggcaggaggatcgcttgagctcaggatcgctatagatcgaaagcagcctgggtaacatagtgagaacacctgatctacaaaaaaattagccgggcgtcgtggcgggcgcctgtagtcccagctactcaggaggctgaggcaggagaacggtgtaaacccaggaggcggaccttgcagtgagcgagatggcgccaccgcactccagcctgggcgacagagcaagactccgtctcaaaaaaaataaaaaataaatcaataaattaaataaataaaaattccagacattgtatgaggaagcattgcaaaactttctgttctgttagctgttgcctgtagcccccagtcatgttccccacgcttgctcgatctctcactaaactttcacgtagacccttagagttacaagcccttaaaagggccaagaatttctttttcagggacctcggttgcaagtctgccgaagttcccggcctaatacagcccttctttaatccggtgtctgagttttgtctgcggctcgtcctgctgcaggaggatcacctgagcccgggagtttgaagttgcagtgagcccagatcgtgcctctgcactccagcctgggcgacagagtgaggccatgtccaaaaaacacaaaaacaaaaaacaaacaaaactccaaaacatcaatgaagttttgaaaataaaaata

SEQ ID NO: 913963 - DNA, 4001 bp, Homo sapiens
ctcaagaaacttttatatacataatatatttcaaaatcaaaactcaaactacttactggaattgttgaggatggaaactggcagaggaaatagtccctgaagtgggatgagctacctaggatgtgaattaaggcaaataaagtaaaatatagaaggccaggcacggtggctcatgcctgtaattccagcactttgggaggctgaggcaggaggattacttgagctcaggagttcgagaccagcctggccaacatggtgaaaccccatctctactaaaaatacaaattaggccgggggcggtggctcacgtttgtaatcctagcactttgggaggccgaggcggatggatcacctgaggtcgggatttcgagaccagcctgaccaatatggtgaaaccccatctctactaaaaatacaaaaattagccaggcgtggtggcgttcatttgtaatcccagctactggagaggctaagacaggagaattgcttgaacctgggaggtggagattgcagtgagctgagatcaggccactgcattccagcctgggcaacagagagagactccatctcagaaaaaaaactaccaccactactactactactactactactactactactactactactactgctactactactactactaataataataatacaaattacacttgggaggctgaggcaggggaatggcttgaacctgggaggcggaggttgcagtgggccgacattgcagagtgcggcactgcactccagcctgaccacagagcaagactccgtctcaaaaataataataataataataataataataataataataataataacaacaataacaacaacaacataaattcgcctggcatcgtggcgcaaccctgtagtcccaactacttaggaggctgaggtggaaggatctcttgagcccaggagtgagccgagatcgtaccactactgcactccagcctgggtgacagagtgaggccctgtttcaaaaaaaaaaaaaaaccaaaaaagcaaaaccctagaaattccttttaaagatctcctttctatccggtaactgcagagagttgacatagaattgcattgtttctttagcttaatcggttactttcggaatgtcactctcatcaattaacatgttatcctttctttctctctgtttctctcttttggaacgcactggccatcacggctcactgtaaccctggactcctggccttggcccccagaagagccgagacaacaggcaaggcgtgtgccgccgcgccagtcctcacccgctgtccttccccaaatagtgtctttatataactcagtggcaatgccgtagtccagcagggaggccgccctgggcagcgcctgcctggccagctcctgcccgggagggcaccgtcctctcccctccggagaggtcccggtcactgcctgcctgggccggttccaggcagccctgcgcgcctgtgcaccgtgcgcctgtgattggacatctctgggtctctggacagctgccggggtcacgcgccgccggtgaaacgacgtctccacaaagagaggagcagaggcccccagggatcccggagggcagggcaacgcggcaattgccccgaccccagggcggccgcgcgtgtcctcgggggacgcagcctcttccccgctccccggctcctggaagagacgcgacccaggcggggacgcggcgctgagcgaggaggcgctggggctgcgaagcgtgcgaccccgaggcctccacccggaccagggccaccactcaggcggcggcgccggcgccggatccagcccgagccccgcgcagcccaaaggatacgacagccccggccgaggggcggccgaggtggcccagaacaatctgcagacgggcggcggcgcgaagctgctccatggctgcggcgcggggaacccccacccctcccggcctctgccccatttagcccagcgggcggctccgcctccaggcgccgccccggactggacgtaagcgggattccgggcggtgccagctcgcgggccgggctgctggggagccctagtccgctagagtccgcgcgccgggcaaccgcccggggctgaagtcctccccacaccatgatccttccgtcctttattttctttctttttaaaaagaaacaagatcttgctctgtcgcccaggctggagtgcagtgcgcgatcatagctcactgcagccttgaactcttgggctaatttttattttttgtagagatggggtctcgctacgttgcccaggtgggtctcaaactccccccgcctcccgtctcgacctcccaaagtgctgggactacaggcgtgagtcattacccctgccccgcaccctgtttctgttccatcaccaggaccctccctgccgcaccgaagctcgggggcccagtgaccaggccgaggtcacacagtgacaagtggctgggctgggacctcactcactctcctaacgtcatggcttccatctgtttaaccctacgtgactgctccttccactgacagctgaaagaataaaatctccgatttaaacaaaaagtttgccgggcgcggtggctcacgcctgtaatcccagcactttgggaggccaaggcaggcggatcacggggtcaggagttcgagaccagcctggccaacttggtgaaaacccgtctctactaaagatacaaaaattagctgagtgttgtggcgcacgcctgtaatcccagctactggggaggctgaggcaagagaatcacttgcaaccgggaggcggaggatgcagtcagcgagatggcgccactgcattccagcctgggtgacagggcaagactccgtctctaaacaaacaaacaaacaaacaaacaggtttttagccgggtgcggtggctcacgcccgtaactccaacactttgggaggccgaggcaggaggatcgcttgagctcaggatcgctatagatcgaaagcagcctgggtaacatagtgagaacacctgatctacaaaaaaattagccgggcgtcgtggcgggcgcctgtagtcccagctactcaggaggctgaggcaggagaacggtgtaaacccaggaggcggaccttgcagtgagcgagatggcgccaccgcactccagcctgggcgacagagcaagactccgtctcaaaaaaaataaaaaataaatcaataaattaaataaataaaaattccagacattgtatgaggaagcattgcaaaactttctgttctgttagctgttgcctgtagcccccagtcatgttccccacgcttgctcgatctctcactaaactttcacgtagacccttagagttacaagcccttaaaagggccaagaatttctttttcagggacctcggttgcaagtctgccgaagttcccggcctaatacagcccttctttaatccggtgtctgagttttgtctgcggctcgtcctgctgcaggaggatcacctgagcccgggagtttgaagttgcagtgagcccagatcgtgcctctgcactccagcctgggcgacagagtgaggccatgtccaaaaaacacaaaaacaaaaaacaaacaaaactccaaaacatcaatgaagttttgaaaataaaaataaaaaaataaaaatgctaagatgcatccctaaaagtcatatgtgccattcaaaaggggtatttcatttagtgggactccagcccaaaatattagaaagttcggttggtcataaaaaaaaaaaaagtgaataaaataaatgacctccagaaaagtctgatgcacacaggccagtatggtgtaaatttcttagataactccagcatctctttgtaagatttattttccattccataactacggatattgacatagcatctcattgtttctttagtttcattttttcattgattttttgttcttttttagcttcgagttacttccagaacgtcgcagcacacgttatcacttcctgcatgacgtctttatagaatttggtgacaatgt

SEQ ID NO: 913964 - DNA, 4001 bp, Homo sapiens
taaaagaaagtgagaaaagagcaaacaaaataaatgtattctatcataaattatgaaatatagctcttattaggtacttaaacacaaaatagatcttctgtcccatattctgccacatccttttctatgttacatagttacagaagtaaaataacgagacttgagtggaaagaaagtgaaaggagggaagcaaagggagtaaaaagcaactagctgaaaatctctcaatacaaaatgatgctaagtaaggtctgtttgacaaatttaatgcaacatttcatatgctgttctattaaaaacaaacgacattattccccctaaattatccctttgaagccaaccaagttaatatttttggaattgacatgtaagataggataacaaaataagttaagcatttaacaacatctctaaacaaagtatttccaaattttatacatcttctagtagaagagttagctctttgtatttgttggtgtatactattttataaaataaaaccctatttaattagtctatgtaaattacttggaagtctgcaaatagtaattttcatagatgttacttagtgccagcaccctccccaaaattaaatgttacataatttgttcattttgtgggattcctaatttgaaaagaaacaactaaaaaataataccagaataaaatagctactcctctaggggatcacagtaaatacagcattattttttgcactctcttaactctgtgaacttcattaaaaagtttaaattttccctaatatctttgaaacacgtggtaaatgcggttttaagtattgagattactgggttctgaagagcaacaatgaatgcctaattccattgagtacaagaatgagcttttgctttatcattgcaataaataaaaatgaagtctacttttattagtcttgtgtttctctcaaccctaagaaaataaaaatatttacaacttgcaatggttacattacaaaaagtcatttcataaaagtctaaactaaaatccaaatgacttcctatgcgttattaaaaataatctttacagtctataatcatgcaagcttacatatggaataccaaaatgataaatgtttttagataccataaatatgtgcacttactaccatggtgactaaaacagtctaagaataaaggaaatacaagctgtctttgcaaacgtatttatttattcatatactacacctgtatcagaaattaaagtggttttggtttcaaaaagtttgaattctggtttcaaaattattaaatataaatttatattaataaatataaaatttagtaataaacaaattcggtgcttgcttgatataaacgtgctgaatagcaatgcgtaaccaagtgattaccatttaaatgactttggaaacaagacctctgctccctatttggattaggctgataaattttatgaccttactgtgagcgtattagtatctgtacataactttggttaaagacatgttttacaatcattacctctatatacagttaaacattaatttcatttacagtcaaaagtatttggggccctcttaacaacatgtgaactgtgtttcctttgtcagatgtagaattttacaattattcggccaaccaattactaatcaaatgatttctttacaaatgaagttttgtaccacattactaaagtagcagactctaactagtccagctaacccagaagcactgtaactaaccacaccgcacacagcactagcttatgtcttcaacgctcagacctgtattcaatcaatttccttccacaggagcctgccaacttcaacaacagaataaacgatataatatcaacacgcaatggtacgtactcgccacaaagtctgaatcacagcacatatattaggccaatattttcgacagtctgactcagagcccaggaaccatgaagattgtgtctgtccttggtgctgaaatgcactgtttttctgcgccctcactgaaaaactgtcatcctaatcccaatccaagaggctaaaaagacttgttaatttggggagtctgaggatgggaggtttaaaaaagaaaatgataagtttctggaagagaatgccaactagtgtgtgtgtgttgggggaagggggttgctagaaacatcccgagggcatttccccttcagtgcccagagacccaggaaatccggactgcggcaaagatcggaaacgcctcgtcggggcaggagccgcgagcgggaacgtcgccctcgtccgggccaggcgggcgaaggcggcgaagggcgccacggttgtggacggctactttccgcgccaaggcgcgagccccggggtccttttgtttctggggtgaggggagggcggtgggcggagggtaacccacatctgcatttatttgcacagaggggacaacaaaagaccctgccgccctggcgagcggcgtcggcggagccagagtggccccggcgcctcggcgcgaactctgtccctttcctcgcggtcccggccgctcttaccgtcccggtcgcacagctgaatggcctccaggctgaggtttttgatcacctcctcacaggggctggtggggctgttgagggcatgatccaggcgcggcacctccatttttccaacccactctgaagcccgcctgcttcgtatccaggctctctctgccggccgggtgggcaagaagagcgggaaagggagggggagtggcagagggagggaaggaggcctgggacgcggtgatgcggcgccgaggctgaggcgcggggctggagagccgccgcgaaggcgacggctgtggcaggagctccgcggagtgtgcggctctgagagaccgagcaggacccggcgcgaggatgggaggcgcgcgctcccggcggggaggggacgctgctctcggggaacgtgatgtatagggcttcgacgcgcgcacgcgcgcgggagaacgcgcccacctgctggcgcgcggtggtccctcccccgcccttctgcgcgcacgcgcccccacctgccctccagccactgccaaggcaacctcgcgcgtgaggcgtcgggcgaccgagcgcgcgggaagggcgagcgctatacgccgcgcggctgcctcgccctctctcctggtgatagccatttggcgtcttctgtctgctctcggtgcctggcgaagcccgagttggccctgaggcgtctgcacggggaggcgagggcgagcatgtttgttgtttaccaagaattggaaaaataagggcccggactcttcggactctctgtacggtattggggtgtgggagccacctcctcccctgaaggtcccaggatactcgctgcccgcaccctgcgggctcggccggacattcctcggaaacagctgcgtctgtgtgagaaatgagcggattacctgaggcgtggaggggtttagagacagcattttgccagtccacgacactgaagcggggcaaacgtgggaactccttactgccagaaaggtgagggaatgaggagatgcagcaagcctgctgaaaaggcggcagacatgctgcggggccagcagccacgggaccagcagccacgcagtctgccttcgcagcgtagcttcattcattcatgcgcgtagcaaataagtattcaatgctcaccctatgccattgttctgggcgtcaatgaagggagtataaacagcacctgctcccatggatttggaaggaatctttgctacaatagctaatgaagattgacttgtgcttcctcaagctactctataacttgtatgcccattgattttaattgcatttaagattctgcagtgcacttagtggatgtgcaaacgttttaaacataaaatagaggtcacagcctattgacctctgttcccgtttgcttctttggaaaagtttttagttttgttgctatcttgggatcaaaaatagtgtcccctcttttcttaatgtgcttataaattaatataagttcccttttattgattttccatttcaaacataaatgttaa

SEQ ID NO: 913965 - DNA, 4001 bp, Homo sapiens
caataaataaaaatgaagtctacttttattagtcttgtgtttctctcaaccctaagaaaataaaaatatttacaacttgcaatggttacattacaaaaagtcatttcataaaagtctaaactaaaatccaaatgacttcctatgcgttattaaaaataatctttacagtctataatcatgcaagcttacatatggaataccaaaatgataaatgtttttagataccataaatatgtgcacttactaccatggtgactaaaacagtctaagaataaaggaaatacaagctgtctttgcaaacgtatttatttattcatatactacacctgtatcagaaattaaagtggttttggtttcaaaaagtttgaattctggtttcaaaattattaaatataaatttatattaataaatataaaatttagtaataaacaaattcggtgcttgcttgatataaacgtgctgaatagcaatgcgtaaccaagtgattaccatttaaatgactttggaaacaagacctctgctccctatttggattaggctgataaattttatgaccttactgtgagcgtattagtatctgtacataactttggttaaagacatgttttacaatcattacctctatatacagttaaacattaatttcatttacagtcaaaagtatttggggccctcttaacaacatgtgaactgtgtttcctttgtcagatgtagaattttacaattattcggccaaccaattactaatcaaatgatttctttacaaatgaagttttgtaccacattactaaagtagcagactctaactagtccagctaacccagaagcactgtaactaaccacaccgcacacagcactagcttatgtcttcaacgctcagacctgtattcaatcaatttccttccacaggagcctgccaacttcaacaacagaataaacgatataatatcaacacgcaatggtacgtactcgccacaaagtctgaatcacagcacatatattaggccaatattttcgacagtctgactcagagcccaggaaccatgaagattgtgtctgtccttggtgctgaaatgcactgtttttctgcgccctcactgaaaaactgtcatcctaatcccaatccaagaggctaaaaagacttgttaatttggggagtctgaggatgggaggtttaaaaaagaaaatgataagtttctggaagagaatgccaactagtgtgtgtgtgttgggggaagggggttgctagaaacatcccgagggcatttccccttcagtgcccagagacccaggaaatccggactgcggcaaagatcggaaacgcctcgtcggggcaggagccgcgagcgggaacgtcgccctcgtccgggccaggcgggcgaaggcggcgaagggcgccacggttgtggacggctactttccgcgccaaggcgcgagccccggggtccttttgtttctggggtgaggggagggcggtgggcggagggtaacccacatctgcatttatttgcacagaggggacaacaaaagaccctgccgccctggcgagcggcgtcggcggagccagagtggccccggcgcctcggcgcgaactctgtccctttcctcgcggtcccggccgctcttaccgtcccggtcgcacagctgaatggcctccaggctgaggtttttgatcacctcctcacaggggctggtggggctgttgagggcatgatccaggcgcggcacctccatttttccaacccactctgaagcccgcctgcttcgtatccaggctctctctgccggccgggtgggcaagaagagcgggaaagggagggggagtggcagagggagggaaggaggcctgggacgcggtgatgcggcgccgaggctgaggcgcggggctggagagccgccgcgaaggcgacggctgtggcaggagctccgcggagtgtgcggctctgagagaccgagcaggacccggcgcgaggatgggaggcgcgcgctcccggcggggaggggacgctgctctcggggaacgtgatgtatagggcttcgacgcgcgcacgcgcgcgggagaacgcgcccacctgctggcgcgcggtggtccctcccccgcccttctgcgcgcacgcgcccccacctgccctccagccactgccaaggcaacctcgcgcgtgaggcgtcgggcgaccgagcgcgcgggaagggcgagcgctatacgccgcgcggctgcctcgccctctctcctggtgatagccatttggcgtcttctgtctgctctcggtgcctggcgaagcccgagttggccctgaggcgtctgcacggggaggcgagggcgagcatgtttgttgtttaccaagaattggaaaaataagggcccggactcttcggactctctgtacggtattggggtgtgggagccacctcctcccctgaaggtcccaggatactcgctgcccgcaccctgcgggctcggccggacattcctcggaaacagctgcgtctgtgtgagaaatgagcggattacctgaggcgtggaggggtttagagacagcattttgccagtccacgacactgaagcggggcaaacgtgggaactccttactgccagaaaggtgagggaatgaggagatgcagcaagcctgctgaaaaggcggcagacatgctgcggggccagcagccacgggaccagcagccacgcagtctgccttcgcagcgtagcttcattcattcatgcgcgtagcaaataagtattcaatgctcaccctatgccattgttctgggcgtcaatgaagggagtataaacagcacctgctcccatggatttggaaggaatctttgctacaatagctaatgaagattgacttgtgcttcctcaagctactctataacttgtatgcccattgattttaattgcatttaagattctgcagtgcacttagtggatgtgcaaacgttttaaacataaaatagaggtcacagcctattgacctctgttcccgtttgcttctttggaaaagtttttagttttgttgctatcttgggatcaaaaatagtgtcccctcttttcttaatgtgcttataaattaatataagttcccttttattgattttccatttcaaacataaatgttaaccaacaagtaacagtttacacatagatgtctgtatgctgctctttctagtcacatccatttagctataacatgatgaagtctaattaattgaagcttcaataaatggaaggaccagcttaaagtaaaataagcctgtgaaaaatcttggcacaattgaaatttcataaatatctgtgaaagataattaggcatcttaaagtgaaaagtcttcattatgaacttattaatgaagatggatgtttttgaagtttgaaagaattcttgtcttaaggtaggggtgtccccaaggagagggtaaattattacctgtcaaaggatatgacaagaaagtacttactggtgaattttctgtgttcgaaagcctggctctgtagaactagaaattggtattgtaagcccaacagtgggttcattttttagagtagtctcaaatttataaatctcaaaaaaaaggaactgtgtaaactagaataacaatttactgattttcaagtaagaaatacgacatgcatttaattcaaactcatgcaaatatttatgaagcacctatgtccaggacactgtgctatgtgttgaaaatttggagttcaaatttatcaagaaagatatatattgaaaaagtaaaagtaggatgggtgttaagaaagaggaagtatgggagcttgtagaagcacgcacgaggtttataacctaggttagatggtcaggaagatctccaaaatgattttatcttaagggaatgagaaattattaaaaaggctttaaataggaaattagcatgatcagatttgtcggctagaatatttgtgtaatcggaaagggtaatgtttcaagaagtgtattaatgtcactttctgggtatacaacttaatcaatcc

SEQ ID NO: 913966 - DNA, 4001 bp, Homo sapiens
ggccgggcgcggtggcacgcctgtaatcccagcgctttgggaggccgaggtgggcagatcacaaggtcaagagatcgagaccatcctggccaacatggtctctactaaaaatacaaaaattagctgggtgtggtggtgcacgcctgtagtcccagccactcaggaggctgaggcaggataattgcttgaacctgggaggcggaggctgcagtgagctgagatcgcgccactgcactccagcctggcgacagagcaagactctgtctcaaaaaaaaaagaaaaaaaaaaagaaaaagaaacttcgaaagacttattactcgcaaagctttccccaactcagtttatgtaaactgagaaactgagttcatggcagaattgttctctaattcttgattaattcagggacgactcaaactctgagtgaataactagatcattcaatgagccgaaccaagagctacaagtaacagcccgtcctggccactcaggactcctattaaaacagcaccctggccatctaaagagttcacacaggagagatgtcagggaaaatctgaggaaactttgacacccataatttaaataacaatacatctttccaatgacccattgcagcacacctgaaaatttccctgaaacttccctgaaaacagggaagacttggtatttcttaaattctgcagttctcaaaaggataaaggtcacttctcagataccctggtcactccatgccccatcctataaccatccccctttatatacaggcaggggacaaaataaaggtcggcaaacgctctgccttagttgaaaagcaggctgttgatagccctgggagagaaatgaaagaaaaagtagctgatggccccatgtttctaaaactccaagttctatctaaactttggagtcgtcaaaaagtatttgaaccctttcccagaagtgagcaatacccagggcagatgaaactggtgagtccgcccattctttcttcaacgtctgttaataagagctgggacggtggcaggggacatcccccacaacatagaaggctggaactgaattctcagatcccctgataggtcacccatcctcctccgtgaacagcgacacactggttcggtcggtccaaaaagagagaacaggcctaaagccccaaatctgcaagtcggcggccgaatagctgtcccagtagtgtgaagctaagtaccctactagaaagcagtctctgtccagcggcggattgccccaccacaccgctgagcccccggcccgtatctggtcaatttcctcttttcattttccgctcactcctcccccaccaagtaggttctgatttatttctccattccgcagagcgtccccagctccagtcctcagtggcatccctaaatcctgccaggggctggtactgtgaagtttctcccttttccctctggctgtgcgaagcccccaactccccaggagcgccgccggccctcagcccgcggcggcggtccccacccccgcactcaccccctgagggtccttgacgaagtagcttccgctggagccctggtagatgcgctcgggaaagatgcagcgctcgatggccagctcggcctgccgcaccaccgcctcgaactcaggatcctccgggaactcgttccgctcgcggtgggcctgagcggcgtgggctgccgccgcggcctgagcggccagagcctgggcctgcgccgccacggtttgggtctggccctgggccgccgcgccccgggcccgatccaacagtggctgccgctcgcggtcgtggcccggcgagcccggcggagaggggcccgagccggccgccgccgccactcggaccgcgcccccgggcacctgcggaaagtgagcgcccgagcccgacgggaaggtgtagtccgggggttgggcccgctcgggggacactagtgggctcgtctcgtccatccctcagacagccggctccgggacccggcgcgctccacaccactgcgctcgcggccgcgaccaatccgtgacatcccccaggccccggccggccaaccaggtcgcgacgcctccttggccccgcctctaacctgccctgtttacttggctacgaataggcacggcccctcgcgcgcgaacagtagccaatcagaacctgctcctacgcaatcgctgcctccgcatttttctccccgtcaccttctgtgaagactgcgcatgctccaggacccaaccttgggtcaggcacgccccctgcccctactataccagcgccacgcttagcttccaattggcttactggacttgggcgctttcaaaacagcaactatcctgtcagtcactcattgagtgcctactctgaaccggctgtgagattggaggaatctcatctatgtatcctcattcattcagtcaggcactcattcatttattgagcacgtactatgttctaagtgctagggagacagcagtgaagcaaagaaacaaagctgctgctctacctcgatgaaacgttttttttggggcggggggtttgttttttgggtttgttttttttttttttttgagacagagtgatcagtctccaaaaaaaaaacgacagaggtcaagtgatctgcccacctcgacctcccaaagtgctgggattacaggtgtgagccactgcgcttggcctggaagtaggtttttaaaggaaaagaggcagttcctaacttgtttaccaagaatttacattaaaataacaagttatagattggctatacattgtactttgtatcccaaattcgtatctcagttgacctaacatacttccaatgtagatgtaacaatgtcaggttacacttcaagttcgcaggaacttgaaggtaatgggtgaagtagccagtcaggataaaatgtcttaacaattgcctccaggttttcctaggaagccctgaagatttctttttaaaatattattattatttttttagagttaggttatctctatgttgcctgggctggtcttgaactcctggcctcaggcgatcctcctccctcagtctcccagagtgctgggggattacaggtgtgaaccacccacagtgcagccaaaaaataaaaaatttttaaaagaaaaaaacccgccaggcacagtggctcacgcctgtaatcccagcactttgggaggctgaggcaggcggatcacctgaggtcgggagttcaagaccagcctgaccaacatgaagaaaccctgtctctactaaaaatacaaaattagccgggcatggtggcacatgcctataatctcagctactcgggaagctgaggcaggagaatcgcttgaacccaggaggcagaggttgcagtgagaaactctgtcaagaaagaaagaaaaagagagaaagagaaagaaagaaagggagagggagaggggcaggaagaaataaagaaaagaaagggaaggaaagaaaggaaagaaagaaagaaagaaaccattgccccagagtgtgggtgtggaaggcatgactgaagtcccatactcatgtctttgagccaatagactgtgcatacatcacacagagctcagactgctctaagctatctttccttctcaaccttataggaattcaaggccagcctgggcaacatagcaagactccatctattttttaaaaattaatttttttaaggagttcctaggaaaacccaggggcaattgttaagacattttattcctgactcgctgcctcacccattatcttcaagttcctgtgaagatacaaacttgtgatacaaagaataatacatagccaattaatatcttacactgtgcctggcccagctgctcaatgcttatttgttaattgaagaaaaatatggtcccatgagcctaagaagttcttaccacgaggtaagagtccattgcttttactcacactgttaaatctcagtgtctagacacagtaggtgctcagtacattattattcatgagaaagggaaggaagatagagtccctgccctcaagctgaaggca

SEQ ID NO: 913967 - DNA, 4001 bp, Homo sapiens
gcagacagcaagacagtttgacagctctaaccattacaaacacctgcagaagctgctacagagcccataaatagccccaggtttgcccaccggactagggtccccctctgaactggagctcgccttcctagctccttcggctgtgtccactggagagaggtacacaggacgctggaaaagaggaaaagagaggccattttctcagactcttccacccaaaggccctcccagtttgcggtttcctggactcagcagcccagggcctgttcctgaccatggaaggaggaggcggcttcactggtttattatctggcctcatctccctctcccccacagcccacctactccagccactctggcctactccctttcctttaacgcaccacatacactcattgcttggagcactcttccccaaagagcctcctccccctggaaatcttggctcaaatgtgcctttctccaccctggccacctcatttgaaaatcctaaccccagtctccctcacccttctttatcgttttcccataacacatgtcataccagagattttccttattaagtgtatattacctgctattactaggcctccttattcacaacacagcttcttttagcctccagagcccagctggagagccaggaggctgtgattaactaccttcccatcccctttaatgagcctgtagtacatggaacaatcactcctggccttttctacctctgcttccgaagcacccttaccagaccctcagaggatctggggagagctggctcttcattccagtgtttgctcacctcctgtaagaacagtgccttctcctggccacctagattttctttttcaaggggcacctgcaacctgttttcacaggttatccctactaaaacatcataaagtgggctgggaaaatacaagtaaacccatttgtaaacactgtaactctacctcctctcatctagtaattccttgtttacttattgctttcctctacaggaccataaactcctggagagcagagactaggtgtttcctgcccaccatggagaacatattaggtgcacagtatccattggagtgcaatagtaaggactcattaattgtctccgttatcatcattatgtggcttgtcctggatctccgtcagtgagcgacttgccaagtgtgtacacccatgaaccagaaggcaacccaagaccagccagaaaagacgcttggcaccctttgatgagtacatttacccagtgaccgccaactctccccattccccaaagttctgcaaaggacgcaggaaaagtaaagttcaaggaatagtgttcctagatccctagcaaagttctagacccaaaacacaaagcctgggaggggtggaggaacggggcttggggaactgtcccaagggcctccccggctgatctctccgcaccacctaggactgcctgagcgccccctgtgggtccacggagcccaggagacgcgtttggccctgtagaccatccacatcgcccgccctccgcttctctcaactcgcctctcgcttcagagtcggagggacaggggaagcgacgctcagacactcctagggccagaggtggagggagcgaaggagaccctgaagaagtgggagggggtcgggccaggcaggggctgaagagaatcgcgccacaggctgggacgggaaacgtgggaaagttggagtgggaagtttgcgacagggaacatagaaaagagcagaaagagggcaagatccccgcacagaggacgcaaacagaagcaagcgggggagcgcgcctcaagggatgcggggtacgagagaggggccgggagcccggggacccgcggcgcctgcctacccacctgaggctgccatgccgcggggcgccgctcacatccctggctcgctgcgtgcccggggccgggaccggggccggcggcgtcctggctcgggctggaggggcgccgggctccgcgcgggaccggccgccgctctggcgcttcctccctcagggcagcccggcctcgccacgagggcgtgtccacagagtccgccccgcctgcgggactcggcccgcggcacctgcacccgcggccgttggggaggggaagtgagaaccccatgccggccgccggccagctccccccacggccccctgctcaggggcagcgagaaggcgggggcttcgcgccacgtgcgccccactcctcgggaaaccagccctgatctgccaccaaagggcagcccgaggtggagggggtgtggggaggaggcggagggggagagtgtggggctgccaggcctctgggagacagggcgggggtgtgtgtgtgtgtgagcaccagctgtccaagccacctcctcatcgcctggggctttgtccctaagcccctgctgccccagcaggaaaggggaggggacaggaaggggaagaggaggagggctgggcacctggccctgggtgctcggcgttgcccttgagtgccctcctgtgatctttctgccgttccttggatctggtctcctgatggcacatgaacattaattataatgtcacatgataaatgtctaatagagtttctctgccattcatttcctgtgttcctgtctgctgggcgctgcgtttagcaccttacacacattatcgcattgcatcctcacagcaaccttctgaggtagcacctatcactgtctttacattggagccaaagaaacaagccaaataccttgctcaggcttccacagagaacaaaagctcccggaggttcagtaccaagccagtctgcttccagagctagaactcttgcttaacccttgccttcacctgccctcttcttggactcctccctttgcctgctgccgaaattcaactgaatagcacatccccttggagttctcaacaatccaggggccagaagatggacccagagagcagagatgaggcaaggttagggctgaagtccaggtggaaataaaatgaaatggatttaagaacgggaatatcaggatgaggccgtgcattcattttcttctgttgccataataaattactacaaatttagtggcttaaaacaacaccaacttatcattttacagttctgtagctcagaagtgtgacatgagtctccatcggctaaaatcaaggtggtggctgggctgggtttctttctgccaaatagaagggaatcaatttccttggctctttcagcttctagaagccatccacattccttggctcatggcctccttgttctatcttcaaagccagatggccctgcttctgtcatcatatccctttctctgactctcttctgtctccctcttccagttttaaggatcctagtggccgggcgcggtggctcacgcctgtaatcccagcactttgggaggccgaggcgggcggatcacgaggtcaggagatcgagaccatcccagctaaaacggtgaaaccccgtcgctactaaaaatacaaaaaattagccgggcgtagtggcgggcgcctgtagtcccagctacttgggaggctgaggcaggagaatggcgtgaacccgggaggcggagcttgcagtgagccgagatcccgccactgcactccagcctgggcgacagagcaagactccgtctcaaaaaaaaaaaaaaaaaaaaaaaaaaaaggatcctagtgattgcattcggccctcctagataagccaggaaaatctccctatttggagaaccttgcctgaacactggtcttcctgactccaccctcttccttctctccccaaagcctctctcgctcttcacaagtctctgggcctggccagtttgtgttctttgtcatagacatttctactgagcatgcatctgtctattcaaggtcaactcccctaacattcccactgttcaaacgcatgttcctcccttccagctccggatgttagggagagaaggctctttccttcctcctaaccaagtgcatctggacaacttttaacctaaaggatatttctaacttgttaaac

SEQ ID NO: 913968 - DNA, 4001 bp, Homo sapiens
tacataactctacattgtaaacttattacttaggaaaaattgcatttcattttccgtaataaaacttgagagaggagtttttggtgcagtaatgcatgctcttgtaacaacttacattcccaaatagctaaagaagttgccaggaagttaaaatgaacttcagtgagtcagtcattaagctggataaaaataatcatttctcaacttttccaaaaacactcactccatgcaaacacgatcgatcctgatactgttttgcccttccccctgctcagcttggggaagaaaaatacaaaaacgatgcttttaggcattttaaacaacttcactacattgagggtgtgtgtgtgtgtgtgtgtgtgtgtgtctgtgtgtgtgttttccgaaaaaccagcatggttttctgtcatttccattacgctgaaaaggacatacagacatccatcgaaatcaaaagcagggaaagcgaacttacacttttccccagatgctaagtgactgcagtggctaaggtcatggtcaaaattcacagctcgtttaaactttcctggctgagccaacagctccgatcatgtttcctgatcctatcgaagtggattaaaactgcaggagtttctcgctgtcagatcagcaggaggctatttcagaccctcgaaccgcagtccgcatagcccgcagcggcgcatcctccaatccccgactgtgcgtgacgctaacctttccacgcgttctccagcctttcccacaccccccacagcgggtgcggccaactcgggaccccctccgcccgcgcccgccgggacccccgcctgctgtccccgccccggccgcccttccgcagtcggtgacttctgcctgactccccaaagtggggggaggcgacgaagggaggaagactccccgccaagggctctccagcccgcacagcggcagggcgatgcgggagaagcgcagggatgccgcccgacgccagagccatatttacatcggctgctgctttgccaaaaagccgacttgtgcccagtaatattgcctttaaaggaaaaagaaaggacctaagcactaaagctgctgccccaaatctgctcgcgctccggtatcctcgccccagtgccccagtgggaggctcgcacgcgcccagcccgggacaggtacacctgcccgcaagcggaagacgcgggcgccgcgcggcccccacaccgggtagcggtcgcccggacccggcccccagcagctcccgccggggctgacagccgaggcgccgtgccccgcacaaacttcctacctcccaggctgcggggaccgacctgcgggcgggcgggcggaccgggggcggcactggcacccaccgtgagactcacatgcacacgggacccccgacccgcaccgggccatagatctaaaggggacgcaagtggtggtgcctgggcggcccagagggctgggggcacgcgccgcggggctgggggcttcgaggcgggcgagcagccggaggtccagggctgactccggctccccgccccgcagcagctgcagccggaggaggaggggaacgaggaggaagaggaggaggaggaaggggaccgcgcgccgcagctgagcccttaccgagtggtttaccccccacatgaggacgctgagcagcgggtcgctggcccgaaacagcttcactttctgcgctacgaagtgcttcttcttggtcttggtcttgctcgccaggacagaggaccctaggttgccgggggtcgccatggccgcctcctatgtcccctccaccgccgtgctcccgaggccggggacccgccctctctacaccccggcccggggaggcagccgcatccccccggcggcggccccggcgcgccgcgctccgctccgcccgccgccgccggcgcgctcagccccactcggctcgctccgcccgctcggcccggcagactgcgctcggctcgcgccccggcccgtatcctgcgcccgccgcggatccgcgctcagcccgcggctggacccggcgcgcggcgagcggcttccgcgttgggcgccggcgtcatgacgcagggggcgggcgggcaggcgggaggcggctgcggcgccgcgggcggggcactgggtgcggggcgcggggcgcggcagctggaccgttaggctgcgccttcccgccccggctccgctgcagccgggccgccccctgtgcgcgggcgacctccgggcgttcgctccctgcccgcggaggaggccgtgggttgcgagcgggagcctggggaccccggctaggcgtcccctgccgctccccaaggagggagaggacagagtgggcagagtgaggaggttggggagaggagcccccaggcgtcgatcaggcgaaggagggaggctcatgcactcacccacgccacgagtcaggagacccagccaggtgtgaaatgctgcagggagaccagggcttcccagcaccgaggggaaggacccgggcacattgccgggtcagtccctgaaatgaacttaatacttttgtgcggataaccgtctggcctttcagaccctcgatatgggcctcctggagccattcaagagggagactcccacgtaataggctgggctgtcactgccaacccactccgtgcccggggcaggaacctcggacctcatcgagagcccttggcttaaccagtagaatcatgccccaaagtgcaccttcttccaatccatcactatggtacttgccatccctgcctgttttccagtgcactcaccgtccgtggaaatctgttcaccgtcttcctccagatacacctaaatgtagcccttattatgctgagaatacttggcctacctcaggaagctgccattccaagtatgtctaaaaccctgctgcccccatatcgtccttgcagtcgtcatcctgtgctatttactctgacccagctcaccagtcctcacggagtaggttcttggaaactgtcaccttaagcaaaacaacatataacaaaaccaaatttgccataggctgacatataaaaaaagagttaagttcctacagcattatttccggttacaaaaacatcaccgaacttcaaagtaaaaattcaaaacacttctaatattaaacattaaaataaatgtgagctatacctcttttttatttttattttttcccttgagatagggtctcgctgtgtcaaccaggctgggggtgcagtggtgcaatcacagctcactgcaggctctacttccccagactcaggtgattctcccacttcagactccccagtagttgagactacaggcgcgcaccaccaagcctggataaacttcttgtatttttggtagagatggggtttcaccatgctgcccaggttggtctcgaactcctgggcttaaggaatctgcccaccttggcctcctaaagtgctgggaatacaggcaccagccactgcacctggcctacctacattttttaaagattgataaaaacaagataatggtttgccaaatttctagtgattaagtgagcgatggttgctgtggtgctgggttaagtcaaggaataagtgtttgcaaagcaaaagttgcctgtaggacctgctgctaccatgaaattcaaaaacaatcacaaatatggtagctgagtgcactcctatctcatttattgtcgtgcatttttatgattaatgtacacttacatatttttattttacagtcatttgtttcacggatttattcatttttccaactcatttattccagttcaaggtcacagatagtgggagccttatcccagctgctcagcttgggcaaaaggtgggaaccatccctggataggatgccattctgttgcaagacacacacacacacacacacacacacacacacaccacacacacacacacacacccctacactcacttaaactgggaccatttaggaagggggcagtgattcatgcctgtagtcccagcactttgggaggcatgaggcaggtggactgcttgagcccagga

SEQ ID NO: 913969 - DNA, 4001 bp, Homo sapiens
agtcccagatacttgggaggctgaggcaggagaatcgcttgaacccgggaagtggaggctgcagtgggccgagatcacgccactgcactccagcctgggtgacagagcaagactgtcggaaaaaaaagaaaaaaatgctgaagattggaaatccattcacctcttggtctctatcgtccacaccttacactgcggccccagcactcacagacaaaaatgtcagcacgaaccctgacagtcccaaactcaactcacccggaggtgtatcgacagagaatggataaagtgcggactaatcgttcaattaaaaaaaaaaaaaaaaaaaaaaaaaaaaaaaaaaaaaccttaccaatataagggcctacagtggcatgtaacaaagatatgggtcacataacgtgaaacaaaagatacacatgatacagtattatcctaaacaggtattattcaaataggtaacaagacattgtcagaacgcataaaaatggtaaaatattaaaaaaaaaaaaagcaaggacatttctgtatgttatgaccgtgataatctaagagggagggagagagttacgagcagttaggggaatcttcaacttggtcacagggacactaattttcttttttgagacagatctcactctgttgcccaggctggagtgcagcggtgcaatctcgactcactgcaacctccacctcccgggttcaagcaattctgtctcagcctcctgagtggctgggactacaagtgctcactactacgcccagctaatttttgtatttttagtagagacagtttcaccatgtcggccaggctggtcttgaactcctgacctcaagtggtctgcccgccttggcctcccaacatgctgggattacaggtgtgagccaccgcgcccaacctatttctaataattattctcacctgaatgagatggctcacacctgtaaccccgcaatgcgagaggctgaggagggggatcaaaccagcctgggaaacagagcaagatccctgctcttaaaaaacacgtaattattattctctccaattgtattatatgtcgtatgggattttctacattaatgtatcccaccgaaatatttattttaaagataatatgtacaggaagaaaaaacctattcagtcactggcaatattatgaagatatgctataaccaacatttgcttactgatttagcaaatttcagaattatgggacagaagcgttttaagaagttacttatcaaggacatgataggaaactcctgagcggtaaggccaggccgaactcatgccacggacgccccgtgcctcccggcctgggccggcagcgctgaactattaccttatattaaacacgggctcgtggattaccatgaacactaaactgcttcgtcatttttttccccataaattgagtcattaaaaaaacaaaacagttcaattccgggaggcgtcagttctctgaacacagcgagactttaagtatgggctgtgggcgcctcgggtctcttaaggactcggcctcccaacaaaaatgaactaggagcaaagctgtcagcgagaaccgcaaatgccgaccccatttactacccccgttaaagcccacgctaatggagggccccgccgggagcgccgcgggcaggcccggcccccagcccggggcatcgcccctgggagtaggaaggagctccgaggtcctccggcctcggagcctcggatgcgggagctccaggaagggctcggggtgcgggacgcccacagcttggggagctgccagccccgggcgcagggacgaggacccctacgcctccggcctgccctggaccctcccctcccgggtaccagcgcgccgagcgcctcccgtcgcagcgtctcacccgccgctcagccgcctcagcacacacaggccctgccgcccgccgcagcgccacattgcgcatgacgagcacctggctggcgaggaaccccctcttaacccgacgcagggcgcggggcggggcttgccgtgacagctaccactcctattggtcaacgcgaacagcgacgtcctctgcgataggctgtaggtgaaaagggtaggcctccactgctctgggacgggcgggagggcggtgcggacggagatgggcgggaggggcggggccgacgtgccgaaggaggcgggcaaggcgaggggcgtggtacgggtagaaaggggcggggccgtcttgccgaaaggggcggggttcggccagcagcaggatgtggacagatgataggagggggaagtgggcaggcgagaagtggggcgtggcgagaggcgtgtgtatgcagatgaagtggggcctggtgaagggcggggctgcgctggtgaaaagaggggctcctggaatggcgtgctgtgttgggtggggctgtgcaagtgatgggaggggcttagcgaggggtggctctttgcaggtgaggagtggagaccagtgggagaggggattgcaagtgagctgagccttgggggcggggcttgcaggtgacagggtggagcctagtgggcggggatgcaagtgagctgggccttggggatggggcttgcaggcgatggggtggagcctggtggggcggggctgcaggtgagctgggccttgggggcggggcttgcatgcgagaggtgggtccttgtgggggcagggctggcagaagtgggtggggcttggtgatggaccgcggtgttcaggtgagggtagtggcctggttgggggctgccggaagctgggccaggtgaaacttggtagccctctctggccttggtgtgggcgttggtcctgtttgtagggctgagctgagctccaaaggcgttctgctgccccgccaggcctgaaccttggggtctgggggcttcttggatgagatctcaaggctgcatggcaggtcccagggccagggccccacggtgtcacacgtatcacggatggccgccagcgaagcacagcacagctccgagctgctgcatgggagcctgtggcccccgctgctgcctccgctttcctcttcgtttcgtgtctaggaagatgcacctgagccccctgacattgcccaagtgcccaagggcccttctgggaacccccagagaggctgaaggaggcccccgtaggagtgggtggttctgcactgtgggccagaaggggccctgggattagccacgcttggagagggtggggtagcccttggaggaagtccgcaccaagtctgaccttccgggtttctcagagcctctcttccttcctcccttcaccttctccctctttttttccccttgtatcacgaatacaaacaggctcaaatctccctctgtctcctaatgggctctgaaaaaaaaaattaaaaattaaatggtaagtagatggctgcagtcggcttgaacaagctaaaactttggaagcaatgtggaaggtaatactgtgggaaaaagtcccaacgtgtctaccctaaactctccatagggcagccagttctgggctgcaggtaaacacgtacctccttattgaagagcccaaaggaaccagaacacaggcaataataggagcgacagacacaaacacgctctgcgcatcacccgtcttctagggagaatttgggtgtgtgcacacaaaatatccgatctaggtctcaatcaatttagaaagttaattttgccaaggttaagggcatgcccatgacacagccccaggaggtccagatgacatgtggccaacatggtcgtggcacaacttttttttttttttttttttaataccgtgtctcactctgtcgccctggctggattgcagtggcgcaatcttggctcagtgcaacctcagcctcccgggctcaagcgagtctcctgcttcagcttcccgagtagctgggattacaggcacccaccactatgcccagctaattttttttttttttgtatttttagtagagacggggtttcaccatattggtcaggctggtctcgaactcctgacctcgtgatttgcccgcc

SEQ ID NO: 913970 - DNA, 4001 bp, Homo sapiens
agaatgtgatggggataattgtggtgtgtctttatattgatcaaaatagggcaaatgaaaaacaaaagttgagaatcctagccagtaataagcaaactttagaactgaggaatggacatgggagtatggggaatacgtattgtatgtcactcacaggtgaagggtaagaaaggttgaaaccactgtttagattactcattgctaaatacaatgccttgcacttgtccttgtgaaaactcagtccccagctgggctatcttgctcacttatatggactcgttctccctgttctgtcctcttcagcataattgagctgtggttagaattggggtcagggtggatggtcactgtatgggcccagcagagtcagggctgtatcccagctgcagggaaagtaaacccggctgttaggtagggccaagatatccttcccaaccagactgagagggccagatagccccctgttggactccagagtctggattccatgagcctccttcccacctccgctcagccaccagggtggtgttgggactggtagggctgaggaagaaaaagggaaacaggaccacaggatttgctttgctaatggggctgtagttttctcttctggcctgggctcctgcccactgtagggaaggagccattggtcgcctgatactccagcaaggagtctggggggtgtctggttaattgtattggaattagggggcaactgaggctgccaggggcttgtacccagctccttcctgttttcccattgccttttgtcacctattccttcctttcctggtcttgattcccactagcaggctcctcattggccttctgtcctcaaatttggattctggaagtacagagtgatgctctgatctattctgaattgaagggggcatgtgtcccagcccacctcaccccaaggccaggttgtagcctttactctcgctccctgctcacagcttcgcagcccgaaggagctgaaacaagtttgcaaagtgtgagctgggatttgaggtgacccaccgcagccgaccccatcgcacacgcagcagctgggcaggcgctgctgggtagacggacatgccacccagccagggacattctgtccgccactgccagacacaactcccgctccggagagacccacttcgctacccggacattctgtccgctccgagccccatgcaccgcggacattctgtccgattctgaggcggcctcaagtcaggacccttctgggcccagacaccccaagccagatccactatacccgccgcctggtcactctgatccgcacagcggccatctgactcagtcgcggccgggctctcacaacacagctcctattccaactgcggagcagctgggaagagaagcgtgtgcgaccaggcgcaccccggctcccagccccaggagtctgagcctaggccgaggggcatcgggcgccgtcaactgcccccacactgggggccgccccgccagctcccccgctggccagggcctctgtaacccctttcgctccctggccgcctgccccgtgccctgggattccagggcgctttctggtaatggtttccagactccctactccctgcctcgcgaagcccctatcctggtttcaagtctccggcttcgttccggatcctctgagtctcccccttccctatcccctggttcttaccctgagtttcccttttcccaagtcctggccccaggtctgcagtccgccctcccattctcgacctgttcccaaggcaccggagttcagctgccccaggtctcgttttagggattccaaggtccagcaatagctcctcggccccatgagcccctgtccttagaatggtcaaacactcacagtgcgtcctgcaacaggcagactcccagtagcggcggctgcggcggcgatctagagggcaggcaggggccaggggccgggcacccggccggagtgggggccgcccccctgctcccgggccgcctctccgctcgggcgctcctggactctcggagggagtgagcctcaccgcgtactgccacccccagccggcgcccattcactttatggcagaccagggcgcccccagcccgccgcggcgagccgcgcgcgtcaggccccgcccctttccagctgccctgctggggctccgccctttccagctgtggatctccaggccccgcctttgagggaggggtctggccggcgagacgccaagaaccccgccctctggccaatcagaagcgctcttcagcaactcggccgcgcccctccccacgtggcagagaccgcgctccggctaggacgcttaggcagagccaagtgggcgagagtagagtggtcccggtagccacgggtaaaagggatcggctggcagcgaagtgggttgggccgctaccccgaggaaagtggatcggcgccaggtgggaaggcgcacggggccgccgggtctcagcgctcagacttctctgccactcaagtttcgccgattttctccacttgtcgctgtccgtctctcctcccttttgtctctgttccaatcctcccacgtctcgcctttctttcctcttctttctcctcagccgcttcgctcctgctgtttaccattctccttcctctgccactttaaaagactcatttctctttctctctgctcctctttcctcatatctttcctcttcttcatttcccccttcttctccaaggaaggtgacttcgtggagacagcagggtttggaatgatacaaaccaaagtagtattccaacgctgccacgaactgcaccatcactgagtgaacttggacgagtaactatcatctccctccccgcgcaaaacaattaagaggaggttcctgctggatctcagggcttgggctgggcactccaaaggcattgcctttcagtctgtacccttgtcttgcttaggctgtgctctccctccttcagcagggctggtttcccgctggtggtaccaggttaagtcctgtgggcaaggtgtggccttggtgcctgctggttaggaatttgcaagggacaggacagatgaccaaggaacatcctggcagactgtgacttcggccctctctgacttaggcctcaatttccaggaaacaggctccttctcttctcccagttaggctatgttgcttgggtgctccgaagagcctaagcccaggccaaacactgtggctcatgcctgtaatcccagcactttgggaggccgaggcgggcggatcacaaggtcaggagattgagaccaccctggctaacacggtgaaaccccatctctactaaaaaatacaaaaaattagccgggcttggtggcgggtgcctgtagtctcagctactggggaggctgaggaagaagaatggcgtgaacccaggaggcagagcttgcagtgagctgagatcgcgccactgcactccagactgggcgacagagcaagactctgtctcaaaaaaaaaaaaaaaaaagagcctaagcccagtcacacaatatgcccctaaggcaaatctgagcagtcatgtcttgactgttcagtgactcccattgcccttaggataaaggtcaagctccctagcctggcatacaagaccttcaggacctgaccttgtcttcatctccaatttcctagtagtgtcctgcacacctctggcccttcctgtgaaagtaacccatctttatattgtcaattcctactcctccaatgttccactcaagtcttattttctctgggaagccttttctgaactctcagtttagccccttgctctcatgaccctcagtgtataccttctattacaccacccaccatattgaagggatcagcttatgtgttgtctgctatgataataaaatttaggagggtaaggaccatgtctgttattcccaggcataatgtagaatctcaataaatgtcacactgaaatctatgaggaagatgttctgcctggtaagatgatgattagtggttaggagggactagggaattgtcatctctct

SEQ ID NO: 913971 - DNA, 4001 bp, Homo sapiens
catctttttctctgcctctaaagaaacatgcatcggatatagtataataactacgtgaagcccaccaaactatctttccaaacagaagggagtggttttccactcttttttttttttggagacagagagacagagtcttgctctgtcccccaggctggagtgtagtggcacgatcttggctcactgcaacctctgctcctgggtttaagcgattctcctgcctcagcctcctgagtagctgggattacaggcacctgccacccagctaatttttgtatttttagtagagacagggtttcgccatgttggccaagctggtctcaaaactcctgacctcaggtgatgtgcccacttcggcctcccaaagtgctgggattacaggcgtgagccaccgtgccagcccactctctacagaagggtaaaatattttcacctttcaccttttcagccaatagaaaacaatggctgccaaaaactggtttccccttgtaattcttgaccaaactgccttcctctactgacaaattccttttaaacaaaatatcttaagctgcaaaggtaaatagatgggattggaatattgttatctaaagttcccggatatagcctgcttacacagatagatgctcgctccacagatgttgcccacaggaatgtttatacatatagtgcacacatagatgtttctcacagacagatgtacacaaacacagatgctactcacgtagacagatgtccaccaggaacacaatatataccaacagctccctcagggtggtcttgatataaagttcccggttctcagctgtgttctcagtcagggttgttccccaaagtcctaaggggcatgggagagatgcctgggatgctcagtggcagtgttcctcccagtcatccccacccatctgtctctggactttagcccctttccacccctgcccttccttgcccatcaccttcatccttggctgaatctggctactgtacccacacccatgcttgctcttcccatcagctccctgaggtcgacaggggtgaaggccctggcttgtagagaatgaaggcatggaaaggaggcacctgttccaggtggggtagtctagggcatcatcacatccatgtcctccctcaaaccagctcccacatacctctctggatccccaggtgatgaccatgccaggctcccacaaccggtagaccgctcagctggcctctgtgttctgggtcatgcagcactaccatgggcaattcatacaccccaaagtgacaccgaaaggtcacctcttcttcagatcacattccacccccaccccctgcccaaaagcttttggtgactcctcctgattctaatatcccaggagaactgtccccctatctggtacctctgatgccttgacagatatggaggcagcagctggacacctgggtcctgtatgccgtctcctggggttcatcttcaggcttcttgggttggggctggagaggccccgtgctggagatggtgcagactctcagcgtcccgtgtggggaagggggaccactgtaggcggggttgtcccaggctccactccccagcttttgcagctcctgcccctcaggacttcccacagcattcatggggaatgaggtgggggggcccggtaccccaggtgcccactctcagctagaggaagagggagcagaggcacagcccagcctagccagcagagagcaaatggaaaggcgtctgagagcagctgtttccacacagcctgggctcctgccttttgtagggggatgtctgtgcctgctggggagggagcggatgagaggacagggtggggaaggaccatcaatcctgtcaggagctctctctccctcttgctgcaagccccaggggaccagccgaaaggggaggtgagggaactggaaggtgggggtttgaagaggggagaggggagaataggaggaggatgtggagctgggagtggaaggagaaacgggaggaaaaggcgatgctggggatgaagggggctgctcgcagatgtgcctggtggagagatggcccagaggtcggacagaagagacgatcaaagagcaatgggaggagctgagacaggaggggagccgggggcctgtgctgcgggtctgagctcatttccactaaaagctcctaaaagggccgacatggattggggtggggaccaaggctgggaggaaagctgaagagcgctgtccccctcccaggctctgcccacctcccaggttcagtcaatgggtctgaggctcctgtcctgtctcaccttcagctgtcccctggtggagcagagatgggcagctcccttccctcacttcaccctctcagccgtggggaaaggacagtggcaggaggaaccccagtctcacatacttcagggcactgagggggcaggggagaggaccacagagtcctaggttgtctatattccttgttctgaagcttgcctttccatggcttacaggtgagatacaccaagagagggggttccttaagggtgtggggctcagtatgggaaaaaggctaagacctggttgggaggctggatcggagaacaaaggacaaggacagtatgatgtgggactaaaggggagtggatatctggacccagctgagctgggaaccttttcccatggctctgcttagtcctgggcctagaatcgtaaacttgagcacaaagtggaactatccatgatatcaggattaatctgctttctttataactgcaggtctctgaattaaaactgtgtcatgggcccccaagcacatccctgcctatgccctgctccagcttctgatcacctgctccagctcccctataggcatgcatgatgccccagaatggggctgatcccacaggttgtggtggtcaccctgcagtttctcctccttgaggctagagcagagactttcctctcctaactcctggctccccacccagggctactcactggcctgaagcccaccttcacattcagcaaaacatcagccttgtcaaaataatcagtcttgagtgtccctataaagagatcttggctgggtgtggttgcccacacctgtaattccagcactttgggaggccagggcaggaggatcacttgagctcaggagttcaagaccagcccgggcaacatggtgaaacaccgcctctacaaaacaacaacaaaacaacaaaaattagccaggcatggggtgcgtgcatgtagtcccagctgctactcaggtggctggggtgggagaaccacttgagctggggaggctgaggcgttgaggctgcagtcagctgaaatcacaccactgcactccagcctgagcaacagagcaagaccctgtctcaagaaaaaagaaagaaagaaagataacaagtgttggcaaggctgtggagaaaaggggccccttgtatgcttggctgtattgtaaattagtacggacatcttggaaaacagtatggaggttcctcaaaaaactaaaaatagaattaccatatgttccaagaatctcaaaggaattgaaatcagtgtgttgaatagatgtctcctctcccatgttcattgcaggattattaataatagccaagatatggaaacaatctaagtatccatcaactgacgaaaggatttaaaagatgtggtatatatgcacaatataatatattcagccttgaaaaaaaaaacacagaaaattctgtcatttacgacaacatagataaacctagagaacattatgttaagtgaaataagccaggcataatgagacagatgccctatgctctcacttatatgtggaaactaaaaaaattgaactcgtagaagtagagagtagaatggtggttaccagaggctgggggtgaggggtgtgtgagaggggaagagagtggtcgatggataaaagctttcaatcaggcaagagaaatatgttctgttgttctgttgcacagtgtggtgactacagttgataatgaggtactgtgtacttcaaaatagct

SEQ ID NO: 913972 - DNA, 4001 bp, Homo sapiens
ttgttttacacaaagtgagaagagttatttgcctttctcttctatttactcttcccatcccccaccagttgctgctggcttccaccctgcccagccagaggctccgcaactaaaatttgcttaagtcttttaatgctgttttgctagagaaggaagaataggatttggttcttgatttcctaataaaaattcctgctgttgcctatttgctgaactacagatactagtcctgtgttgcctttaggaaggaaaacacctgtgttgattccaatgtctgaagtgagtcaaccccttccctgtcccatccgtgcaaacagtgtgagcataatccagtggcaaggcctctgcgttggtccaactgccttggacaaatacatggttttagggccaggtgggtcctaacagaccaggcatttttctctgtgaaactttcacaaagaagctgcagcatagatggttaaaacatagatggttaaaacatagattttaaccatagattgttaaaacatctatgctgcaaaactttgggtcctgatgcaatgattaaccattacctcctagtcactcttagtgtataaggaagcgattttccccactcaaaaaggaatagagagacttaagggtgagtccgggaagtatgtagtttttttgtgcatctcttcaaagctgactttttctctgttgagtatttggagaaaatatttctcaaatgtgttttcctgttaggctaaattgactcaccattttcatttctaatcccttgatgagatagttgataaattaaaccataaaactaatgctacctgagacctgagactgtgcatgctttggaaaacgttttcatgcgcattggcaattacacgatgccacccagcttcaaggcctggggctccacattttgctccccttacattaacttccagggcccctgggaccaggggctctgtgccggcagccaggtgtgcaccttatatctgtgtacccccagccatattcaggcaaggtaggggaagtgctcctgccagctcacaaatctgcatctggcgccaagtccaggggacagccccgggatccctggtgagccacgaacccttcctctccacagcatgcctgtcgttgccgaggctgcaggcagggacagctcccttgagaaagtccagcaaattgatgccagtcagggactgagagctgggaggacggtgtgaactgcagcagggggaagggagaatttgtttccaagctgagcacagagcagctgaggaggtggttttgccccatggcagatttttctctgaatgttcggcttcagttttcatccctgggaactcctcacagaggcctctcatacccaccctccttcttcccaccccaggtacccttttttcctaagaactgcctcacaacaaactcattaaaatggcccagggaaggtttcccagatacaatacaggaagctcagtgaaatgtgagtttgagataaacaacgaagaatttgtcaggataagtatgtcccagatatttcactggacatacttatactaatgacttatttgttgtttatttggatttcacatttcactgggtgtcctacatttttatctgctaaatctggcagctctaagtggataacaggaaaaagtgcaagacagatcgtgacctctctggggctgtccatgggtccaccagcaacagtttttacagaaagagaaaccgcacactcaccatatcggcacctgtactgacagactccattcttccctcccagcagctccagaaaagaatcgaagtagctattgacggattcaaagcttccccggaggtgccgaaggccccagtctgaataggactcctccgtgtcagggctcgtgtcgctctgagccaggccacccccaaggctgagccacaaaaccaagaagccactggccagcttcatcctgcagccaggtaggtactggcttctctcctcaaaccccagccagtgtcccagaattccagggacaaaccccctacccagatgtcaggcaggactgggaaagggattatctggaacattcaatctgtctgttccccagaggtggactttaaacatagctatggaggttgggatgagatcagggcaattagaaagagggcaaaggttagggagtgggagggccagggagagagaacatttcaaagtggattctaccaccctggagggagggagatgttagccagcttctgagacgcaggaacggtgaaggattcggagttctaccccgaccagcttgttaagctgttgatcagttacaagtgtggctcttcagggccagcctcttgatagaagagcttgaccgaaggtcctagccacacccctcagccagctacctacatagtctccaaggagagtcaggaggatgtgtacagggcccaggaaagccccagcggtaggaattaatagtcactttaccaagggtcacgatagtgtcagagtaggtaccaagtgtgtgttaagcagaagttcagatttgagaccccagcttctgctgtggaacccacctggctctgacgcataaatcctctaatttggcagagctcccagatgtagccatctgagtgcagggacattttggcttctatttacagcagtatctctgtttacactcagcataagtggatcataagacaagatctacagatggtccaaggacaattctgggggcactcggctctcctggtggtgtttttcctttgagtttcttagaagtcagagggtttatcaaatagtctatttgggagtgtaggcttttaagactgttgactgaagtctagtgttttggcatcgttttcagtttagactgcttttagtcgtgtgaagaaatgccatctataaaatcactagtctaggaccgggcatggtggtgcatgcctgtaatcccagcattttgggaggccgaggcgtttggatcacctgaggtcaggagtttgaggccagcctgaccaacatagcgaaaccccgtctccactaaaaatacaaaaattagccaggcaaggtagcagccgcctgtaatcccagctactaggaaggctaaggcaggagaatcacttgaacccaggaggcggaggttgcagtgagccgagagcacgccattgcactccagcatgggcgacaagagcgaaactctgtctcaaaaaaatagtaataataaaataatcaccagtctataaaaatgatacctttatggaccacatgaatcatttagctcctttctcaaatgtttgtctggaaagccccatggaaaataatgaattaaatgaattaatttcttcattttcagtaaatgtgtttggctgaagactcagactccaggaagggcagtggttaaaaattattcatagtcacaacaatgccacccaatattttaaagcatctatactttttcaaaccactttcatgcatatgcacatacacagaggcacacacatacacatgcacatatgcacaaatgttcatgccagtttcatgaagcagattaaatagtcccatttgggggtgagaaaactgatgcagagggtaagtgacttgatcaaagctggacaggctatcaatgggaaagctggcaccagggccagctacataatttgtagggcttcaccaaaacaaaactgcaaatgcagagctccttttccaaaagcaggggaacttgccattaaaatactaactataggctgggcgcggtggctcacacctgtaatcccaggactttggggggccgaggcaggtggattgcctgaggtcaggggttcaagaccagtctggccaatatggtgaaaccccgtctctactaaaaatacaaaaagattagcccggcgtggtggcgtgcacctataatcccagctactcaggaggctgaggcaggagaattgcttgaaccagggaagtggaggttgcagtgagccaagatcgtgccactgcactccagcctgggtgacagagtgagactctgcctcaaaaaaaaaaa

SEQ ID NO: 913973 - DNA, 4001 bp, Homo sapiens
cacttgagcccaggagttcgagaccagcctggccaacatggtgaaaccctatctctactaaaaataccaaaattagtcaggtgtggtggtgcgtgcctgtagtcccagctactcaggaggctgaggcaggagaatcagttgaacccgggagacggaggttgcagtgagctgagattgtgccactgcattctagcatgggtgacagaatgaaatcctgtctcaaaaaaaaaaaaaaaagaaagaaagaaagaaagaaaatatacaatgcctggatttcctttaaaataatccagggaggggagagagggtggaggctatagatgagataaaactgcccatgaactgatacttcttgaagcagcgttgataagtatattacatgattctttcacatactattactttgtatttttttgtatccaaaagttttcataatcaaaagttaagatatatcatctaaaatctgaaagattatgcacaaaaatatatgaaatcagtgtgaaattacactaatacatgaatactttcctcctttccttcttcttttttttttttttttgaaactgagtcttgctctgtcacccaggctggattgcggtggcttgatctcggctcactgcaacctccgcctcccaggttcaagtgattctcctgcctcagcctgccgagtagctgggactacaggcatgtgccaccacgcccgattaattttttgtatttttaatagagacagcatttcaccatgttagcgaggctggtcttgatctcctgagcttgtgatccgcccgcctgaggggtaggtgaggggaagaaagcggacagtgaaaagcaaggaacccagctaatggagtacccagacagcctctctcctccgcacagctctccacctccacccagtcccccatctccacccaacatagctcagtttcccagagaagctccctggaaaccgggaggctgacttcttcactgactgcagatccacctgaggccacctggcaggtgaatcggtggcctttctcctgggcccgactgcctggttccttaaggctgtgctgggctagcctgggtcactcatcctttggagtgtggcttcttatgcaatgtcctataaagccaggcctgagcctccacaggccctctgagatggagctggcctccggggctgccccacccagcagctgtgacctcccactccagatcctggctccttctctcttgccagctctactccgggcatcgagcttccctctctctcctttttggtctctctcaaatctttctcttttcttcaatatcctctctccctccaccccttgccattttaatcactttttctctttccttcttctcttttgtctctcaaactcctttttctttctatcttagttcatatctgttcaggggaagcctctttctgtctcagcctctcctttttccttttcactgtgtattcttccctatctcctttatctctccgttgctctacttctctgcctttttctgagtctgtttcctctcaatctttctctccatccctccctccctgcatctgcctctctgtccatctcgctgctgtgtccagctctctctccgtctctctcgctcattccttcctcgccatctgcgggtctccccggctccaggtcccctgccgcgccctgcgccccactcaccggccaaagagcccgcggcgcggagcagggccagtccggtcagcgcgcagagcaggggccgcatggtgccggcctggccgagcgcagcgccgcgtctgcccgcagccgcccttcccggatcgcacccggccggcccgagaggaaatgcactcagttcgagccaaaattcctgggcggctccggactttctggctcgagagaacccgccccctccagaggcccctcggcaccccgtgggcagcgcggagcccagagaccccgggagctgaggcaccgacgtgccacctgggcgcctcccgaggaaggggccgccccccgagtccccgcacctcctgggagcccgggagggaaggcggggcggggggcattgggtgaggtcttgggctcaaggcgaccgagcctggggtcaggggtttgttacgagccagtttcacaggcgggcagactaagactcggagggaagtgtcttcctcggcatcactctcagccatagcacaggatctgaacccctgtctcctgggagtttggcagcttttctctgtctacctacgaacaagaaattaattctaattacatggaacagtgtctgcccctaagagggagacccagaaactcactgctctggtaagggagtgatagaaatatgaaaaggtaattttaaaaagaaaaggtaaaatcgtaactctcgcaaagatatgaaattagcatatactaaagattttattcaattcattattaatgaggggataagtaagatggtacaagcagcccaaagtttagagcacagtagtggaaacttcccctatgggacatgcccatccaacaagtgcaacaacaaattaagttttagtaaaaacacaaagcaaaaaagctgtagctctaacttctctgctgcagagccctgagtgagtgtctcgtctggctgtaagtggaacacattcatcaccaagcctgggagaatgcctttgtccatcaagggtccccgttgggattacctggagctcttgcagatcaaggctgcctctctgccttctgtgttcctggctgtggctatgcaattgtccaaaacagttaccacgctaaccagtgatccagttctcactccctcctccagagcaagatagtagcctcagacggagaaattctggttctgagcccgagaatctgagacagactcagatctaaatcttttaaaagccttcaaggagattatgatgcccacatgagctggctcagaagaagaatttatttcaggaatgccaaaaatttctcacgcttggtggtaggacattccttgatagtttcgccaggtgggaaaaaaagttgtcaaagaactgcccaactcataaggattcttgtagcttagagccagtgggctaccttatattttgaatttaagactaagaaaacacacacacacacaaaaacatatacaatacattattgttgcggtagagcataaagtaattaagtatacagagtaaaacatgaaagtcttttctgttacgaattccctccgtccaatgattcaggtccagtcccctcaacttggtaggctctgcctgttccacgtctatgcattccccatctacctaatgtatattcagacacaaatgtatatacatgagatcaagtcatagatattttgaagatttgctttcattcatgtttatctcagtcataacattaaatcttggctgggtgcagtggctcacgcctgtaatcccagcactttggtaggccgaggtgggtggatcacctgaggccaggagtttgagaccaacctggccaacgtggtgaaactccgtctctgctaaaaatacaaaaaattagcagggcgtggtgttgggcgcctgtagtcccagctactcaggaggctgaggcaggagaatcagaacccaggaggcggaagtggcagtgagccaagattgcaccactgcactccagcctgggcaacagagcaagactccatcttaaaataaaagaaaataatcttggagatcagtctatgtgggtacagataaatccacttcattccttttaagagttaaaatatcccatgaatggatacaaggagcattatttatccaaacagtcccctattgacagacatgtagattgcttcctttttctctccaatataaaataagctttaataaacattcctttgcatatatcttcatgtacgtagtacatattcctgtatgtacatatttctgaaaggctggaagaggaatcattgcgtcaaaggccttttacattttgccagataggccaaaaactgttccccaaattgttactaagcccacaggaggggcaaggggt

SEQ ID NO: 913974 - DNA, 4001 bp, Homo sapiens
cctcacctgcagtaattatgtttccccaggcccagctgaagagcatcagatctgtgggcatggtacgtttgctgaaggacagtggcagagttccagggcaggcagggccggcccatggtgtcagtgctggcctttcctcggtaaaagtgaccattcccctcatagcaggtttttgacttatctacaaggggacaggaggatgagagaatatgagaaagagaagaacattccaactaacttttattttttttttttgagatggagtcttgctctgtcgcccagttggagtgcagtggtgtgatctcagctcactgagatctctgcctcccaggttcaagcaattctcctgcctcagcctcccaagtagctgggactacaggcatccactaccatgccaggctgatttttgcatttttagtagaggcagggttacaccatgttgtccaggctggtcttgaactcctgacctcaaatgatccactcaccttgacctctcaaaatgctgggattacaagcgtgagccaccatgcccggctgccaacggacattttaaagatgtcgtttcagacctgccagaagactggacagggtctccttccaaccccacctcacatttgtgtggccactgtttcgtgagcgtgtgtgtgtgtttatgcttgtcacatagggatgaagatgtcacccaccctacctccagctcctaactcctgcctgctcttgcctcccacccatccctccctgtccccaaatttctctcccagttgcagtggagatccccatacctatttcacagtgctgccctccgaatttctttgggcagttgcaccagtgaatgttggagaagtacttgttggacacacatgttcctccatttagacagtcacagttcgctggagagaacaaaggtggggtaagcgagggggagtggaagtggtaaggggtggcgcagccctgcagcagagggcagggaggggatgtcccctgaagccttcccaacttgtctgtgcagccaactgttgtaggggtggatactcacatggaacttgatgaagttcattgctgccctggaagagattcgggaggaggcttcatcaaaggtcccatgctccagggactccagggtgagggtaaactggccccaatcccaaaacccactcttccctctccctctcgcctcaccctgttcgtatctagttctcaaatggaagaccatgggtttccagccaggagaaatggattgacccaagcaagcttcatctaccagatgcccgcaggctggggcagtcccggcggcctcttcctcccttgccagccagtgccaacccccgtggttctcaagcctccgctgccaccctgtcccatttcctggggagagtctggccctgctgtggatggaatccggaggaccccagctccctgagcagcccctcctctcccctggtgctgatcagaggtccttgggcagcatcagtcaaagcaagagcgcactcactttggagtcgctcacgaccaggacgcagagaagcaggcgcgccagcagggctctcatggtggcgaggtcggggcgctagacggcggctctgcaaaggaaggagaagtcagggcaagaggcggaggaacgggaaggcaggccaggcgggcgactgcagcgcaggggagatgcccgcggtgaccaggctccccagctgtctctctcctctctgggctccggactccgggcagcctggatcggcacccgcgggggacgcccgggacggggcgccttgactccgtgcagccgccggggagcccagggagcccgggcagcccagggcgggggaggcagacgctcgggagctggggccgccgcgcatccggcccggggatctcaggaccgcggcactcaccggtggctgcggcaggagggcgcgagccggcgctgcggggacaggtggaccctggcccgggctccggggctgcggtctccgcactgtgctgcgacccgcggcgcctgctctatatcagggcccgccccggcgccgcccctccctctcccgcccggctccctcccctgtcttgcagcgctcagcgacccggaccccgcgtgcttccgcaacgctcacaaagatttgggggaagcgcgatctccagcggaggggacccaacagcgtctggactgaggaatcgagaggcttgtaaattctccgtgcttcctcccatgcacctggccgggggcctgccccagtgcaaggagtccccgaattgcagagaggagagaaggcgcacaggagactctctacctcgcccagctctgaagcctcctggggtcctctaatcagttcttctgcaacttctccccgctgggccccaacttgcctaagactgcctcagacccccttgcccgcagctgatggagctgtgaagtcttcatcaacgcgacaaatgtacgagacatactctcccagaagcacagacagaaaaacccctgcctgtaggggctccctctgtgcgtctgttcagtggcagtccccagatatcaccaacacaaccagtggatggaacaaagccgggcttattgctttcggcagtaagggggtttgtttgatggtgctatcagagggggaaaggcaaggccagattactgaaaatttgcagcttggtttaaagtccgtttttgacagggcttgataaggattgggttaggtgtcgtgatatgatgttacaggattgtgggaacaaagtcctagggcataaactgttggtgcttcctattgaagtgttaacgggtcttttgggaagtttccataatgagcaattcatttatttgtgcaggcaagaataaaagtaaagacaatggaaacatgtagacagttctaactgtggaggttctggagggtgtggaagttctgttctcacctctgagtagaggaattgggagactggaggacaaaataagaggaagatttatttttcactgtttgtccttttacactcttaacattttaaaaagcacatctctgtatagcccattccaaaaagataattatgcattttttaatgcatgtgtatttagtgttttacttcatcatagagccttgtttattctattcagatagaaacaattgtttatcaaataaaattgtcctccagaaaaacagaccatgtgtaaatgactgcatccacccttcctgcctgaggataagcagacatttgtgtatacacacacacacacacacgcatctctgggcacacttggaggaacatagcagggattctgtgattctgtcacccccatctctttcccctagtgtcaggaaccagggcttggggtcattttgaacccagtaggactcgctctcttagtgggaaggaggaggctgagtcccagcaatccactagcggctttgggccctttcccagcctaggcctgcagcattttcctgccttgcaaatctggaccttgggtctgggtccacctgagagtgacagaaggaaggcagggagagtgccaggaaggtaggaaggaggaaggctcctttgctctgccccagccgagggctcagggtgccagctgcctgctggggaaagtacaagttagcctttcagcttttgggaggcaggtgacccactgtcttctggagagacttctgtgcttgctgagctgccagccttccaggggacagactgagtcagcgatgctataggcttcagagccaaccttgctacttcctctagaagactgtggtcagttttgtttggatttgagaacccattaattgtaaataaacgtgaccagaacataaacagagatgctgcagcctgaggacttaccccgaaactcccaggttagttatcaggaaattcccagggaccgtcatgattcatgttgctcccctagcagctctcatgactccagattacttggctggaggctgtcatgctgattgctgagagcagatgacttcatttcctcctggacaaagaggtttggagaccgttatgaagcgtgacaccctttctcc

SEQ ID NO: 913975 - DNA, 4001 bp, Homo sapiens
catttgaggaaaagcatttgtaacaatagcttgtctagattcctctaaaatagaatggacacagcacaattaagagtctgcatgttttaactcttggaatgattttcttttcctaaagattacagctattctcacaccttctcaaattgaggctcaagccaaccttactattagccatcccactaaaagaaaatacaatggttaaaatgctagattaaagtaacacaaaacgcaagagactgctgccagtctgtttccaaaaagaaaaacaggacgacataggctgaaagggctcaccgaacaaaaacaagaagaaccactgagtgcatagacctcgtcccactcaaccaaagctggagagtcacagtcccctacatctaatgaaaacatttgatttccaataaattaaagtgatcaggagtccctgcatctatccatctaccacaaagaccacagacattcacttctaccaagacaccccgcaccttccataaggaaggagagatgccaaatgccccctttccacacaactttggacaggaaaaatgagcctgcgtcaggacacggacacaatttctcatgttatttttctgagggttgttatccatctctcagggttgtagaaggaatgaacacttaattgaaatttttaaccctaacactcataaaacatcatatgctcttgaaaaggattatggaaattcgcagatagaattatgtgagccatttcaagagtagtcttcatagcttgaattccttaaacacagtactttgggatgaagttagccaaatacagagaaacaaaacagttttcaagttttattctgggttatttttaactcctttttttttttaagaaaagcaacagaatttggaaatgagttggtggtgagcagaaaactactcctttcaatgacctcttcttcagctaatcttatcaaaggtctaatatccttttaatgtttataagtaaatgaccactcagataaactgcattacctttcccaaaactatggacatttacactgaaaattttttaaaaagcatatttgaaacaccaaaaaacatgtagctcattttaatcagggatgctatcaaatgtttgcatttaactcctgagtatagttttttcctcttagaaaaaaaactataactacttcaggatattccttactagtattataatcacaaaagccaaaaggtaaaaaagaaagcaacaaaccaaatctgcaaaaagaagagcaatttattcaaaagcgagtatcctgaagaatataagtgagacgttttcatcacattaaatgttgatacataatataccataggccattgcaaaaggaatgaaaacaaacatctaataaactctcaggatacctatcgagatcttgtagattaacatgcaaaaaaaatctcaaagctgaattgcacagcaagaaaaataatttgtatctctatagttaaacattttaggttaaaacattttagaaactttcttaacaaggaaagaaacttctctgatcttctttgtaaaatgtctcagaggaattgtattttggctaacactgcacaatggtgctagtaaagaaacagtccccaggattccatgcattaagaacactgggggatttcttagacaacaagaacccttacctggtcttctttaagcctccagcatccacatccatcctttaacaaggtaaaattgggtacctcagagagcgggaagagccaaccaaccttcaagacagctgagagcgtgcaaagccacagctgacagcctgcttccctctcctggggctctctgcctaagaggctgcacagaaaccaagcctggtgccaaatcttaatccctttgcagaatctcacgtggagctgcctcacctcttccattcctgcaaagtctcttcctgctgcacttccttctgaaaccattaatcaccacgacccactgaatgaagcccaatctcaaatcacagtgaaaaatcctgcaacgtgcagggtgatgagtgtttacattagctgaaatgaaatgatgtaatacccagaatcgagggagggctgcgatccagagtcagggcattgcaaaaacctctgtgaaacataacttttctacattacaaaaaaatgtccttgcgttttagtaatctggcttctgtaaatttaggattacttggatttttctgatctcatcaatttgttttccaaatagaaattcagaacttcccaattactcactgttttagtcaagtttaaaaaaaagggtagcaaatagaacccaaagtgtatacatgtgcaaagaacccagtatcaagggaataataatagaaggcagccatccaggtatgtgggcacctgccatgctgcagaatagcagagcctcccaagggtctaagtgccttcaaagtaaagacaactcctaagaaagacagtatttgtttaagccagtggccaatttttcttcctataactgatgatgaacaagaaaacccaggagttcctagccctattattgatgggcaactgctattgattactttaggatcttgtggtccatggttggggtgaaacaggagatgtgagaggtcatgtttgtgaagggaggggtaaaagtctgtcaacagcacctgcttggaagagagacctggtaaggcttcattgcagattagaggttagcttgagactagtggagatgccagaggcagaatatttggtttggatgtattactgatcataatagtaaattttaagaagtgtttatcctgtgccaggcaatgtgtaagcactttcatgcattatctcatttaaccttcacaacaaccctatagggtggattccattattgttcctatgctacaggtgaagaaggtgaagctcagagagatcaagtagtggtaagctattaggtaatggtaccaggtttgtcagcatgcttcctaaccaccagtttgtattgcttatgccagctttgtgagctacacaaccacagcagcatgctcaacaccctgcagagggacaaagtgttgctgcaaaagggtgtgcaaagcatgtgctgtggctccccaagtgcatatcctaaattcttggctaccattgtccagaagtgccagtatccgagctcctggcctaaatgcaaggcccttgcaaggaaggtggcacctccaaatgtaggggtaagtatcaaacgtcacatgaaaagagctctggcctggcccagttctgtcatgaaccaatgactttagtcagtccacttccctttttgaatctcattaatattaggaggttggggacaggcatggtggctcatgcctgtaatcccaacactttgggaggacgaagtgggaggatggcttgaggtcaggagttcaaggccttcctgggcaacatggtaagacccctcccccaccacctctacaaacattaaaattagctgggcatggtggtgtgcgcctgtagtctccgctacttgacaggctgaggtaggaggataacttgagcccaggagtttgaggttacagctgtgatcacaccactgcactccagcctggatgtcagagcaagaccctctctctacaaaagaaaaagaaaattaggaggttggacttagatgggctctagggttccttgcagaatacattttctatgataaatgatttttctttttttttttttttttttttgagacagggtctcgctctgtcatccaagctggagtgcagtggcgtgatcacagctcactgcagcctcgatctcccaggctcaagtgattttcccacctcagcctcctgagtagctaggaccacaggtgcaagccaccacacctggctaattttttaaaaaactttatagcaacagggtctcactatgtttcccaggctggtctcgaactcctgggctcaagtaatcctcatgccttggcctcccaaagggctgggattacaggcatgagccactgtgtttggccagcaaatgattttaaataatgtgacttctgggtgagttat

SEQ ID NO: 913976 - DNA, 4001 bp, Homo sapiens
agaaagttacaggtaacaaattgcacatcaaacagtttttttaaagtatacaacaaaagcccagagaagaatgtgactaagaatggttgtaaatagaaaaacaaaaccaaccgccttcattggaatctagcttctaacccactggagtatggaatttttaatgacaggtcaaacttggaccacatcccaggagtttatgttactaagaggactggaagaatgtccctccagttcaatctggcttcttacctggtaagacatggctcctgggtataaagggaatttcccccatggggctgtaaataaaggatagtgttaatggtaaacattatacattcctctagctcctttcaattatattatctccttctccaaagtagatatttatgttgtaaaaccaaagtcttaagatttaatactggcccacaattatctctagagtcttctaggtgcaagcattttgccatgaaagccacagcaaatgccttcagtagggaaaatgagacatctacataaataactcccagaaggtagagagcagaaagggccctggagaaaaaatgctgcagaaatcagagcagggggaggttggctgtttcaggaaaagcctcacaccaccagcaaaacacagtttgaaggatggttagactttagagtggtggatgtgggggaagatgtgccatcagatggtctagatgacaacaccatcagacattcttcagaaaagtatttatgaagacatcgatgcatacaataacctagagatagtccacctctctcctcaatgacaactgggcacctgtacaagcacctatggggtcacctgcttccacctcccaagtcaggctctcaaaaattctccctagtggggtcaagcattcttggcctcagtagtgcccattctgtggcagcggccctgccctacctctacggggggtataagaaacatgaaaacataccaatcctgcagagatctaaaagacctacgggcaaattttgcataatgcaactgaaattatgaccttcgtgcaaataaaacttttcgaagacgtgaatcctacttaacaggtattcagggaactcactatttaaaatgacactgattaatcactaaatgagtcttacactgaataattggttaagtcggctgaactcagtgtctgatggcttaaatacagagcgaggggcgaaagcttccacaaatttacgctgtgcacctaacattcgccacgacagaagacttcttgctctagtgtatttattactgtagcattaaaggacttgaaggcaaagctagctattctagttatcagttagagcgggacctggtccaatattgtattttctaggacttgatgtacacaaatctctccaggaacaatctcttgagcactttccttgaaataccgctgctaagtaccgccacaaaaagagcttacgtttttctttgcactggccacctccacaccgtattcacaacacgaaggggcgacctgaggcaggcgtctggagtgaaggcactggcagggtgtcctttagcccctgcgagggcggcctgcatgccctggaggaccgcccgcctcgggtcccccgggagcgcgaggacacttttccgccaggtacgcggagtcgggctgctcccttaggcgggtcgactgccttgggagagaaccagcccatccttccctttctccagtcctcaggaaccgagctacagagtcgcttcctcacctcttggctcctggcgagtctcgccggcgtccccaagcgcagcgtccctctgggaccagccgtccgcgcgcctgtcgctagcggcgtcgggtgtccccgctactgtgtgtcagctgcagagccgatgcccaggaacgcgcaggagccaggcaagtgcccgagaggcagagcccgggaggcagagcccgggaggtagagcccgggcgcgccgccgctgcccctcccgccgcgcgagcccgccgcccgccgcgttgcccacgttgcccagcgttaccgtgtggacccgcgccgttcacagtccgctcccgccgagatgtgcgcgctgcccggacagcggcggctgcgcgggcggcagcggggcccccgccctgggccgggctttcccagaactcgcccgccccgggtgagaggccgctagcgccaccgcgggcggccgggcgggggagcggcctgtgccgggcccgcccccggctcctgccgcgcggggaaggcgggcgcggagcgaggacccggccgcctcccccggagctggctgctggcggcgcgaccccttcccagacccctggccctgacccctaggagccatcctttctggcgggagccagagagagcgctcctggggcgcccggctccgggaagggcgggaactctgcacacctcaggcggcgggaatttactctcacactaccccagggaaccacccctggttgacagatatggaaactgaggttcacggcagataaaggacacgatcaaggtctctgtagtagatggcagcaccaagtctcgaatctgttctgtcactcgttcatttaatacatattcattgagccccatcaatgtgcccagcgttgtgccaggctccggaaatactccttttgctggtaatggtggccatccaggactgcggactccaaatccagtactctttcattgctcaagcaaacctgaagatcttcacaactagaaactacaggctttgcacagaacttccttagccgctggagcggcttttatgagtcttaggagagccaaggacctggaaaaaaaaatcaaatcatcatcctcctccctttcgcctaaacctgtgcctcctccctctacctgttctaatggaagaccgttccctaggcctgacctcttctcctacatccgatcaggacccattcctgtggcccatatcgcctcccactgtcctctcccttggaccaaatcaatccttcaaaccaccgctgtattattcttccttttttacaactttaatctatgcagaaaacttcactggctccctattgccctccaaactaactctccatggctgtgtaacccagcatgccctggctaataaggatcacccaacagaatgtctctcccactctagctctgtacctgaacttaagctgagccttctacctggagcatctcctcccacacactttcctcctgctcatgtttgaccctttctttcgggtccctcttaaaagtgatctctccttcttggaggctccagaacacaggagaggttggagcaagaaagcacaggaggcccaaagaatcctgctgttaagaaaaatctgccagtctggtccttaaactgtcttgctgttttctcaccactaggactttaatgaaaactaacatgattgcctccctggagagctgatttcagaaaggtctctgcagagggctctaaagaaattctttgttccttaagatcttggcattttagcactaggacagtgagaagtggtaatttactcaatccctgaggctatgttatcctgaacaagtaaataaagggctgaggaaagaggtagcatcactgacaataaacaaggtaggctatttatttaatatacagtattatattatggttttataattcatttaatgatcaaataatatcaaacttcatccatcacctggcacccccaaagactttttttttttaatttggcacatgggaatagatagctacaaactggtagatgcacaagcagttaacattgaatcctccaaatgagtcattgcatgattagtaagcaaggcaaatctaggtccgttgagcaggaaagttatccaagtgtgataatcactgtggccccatccctagaaaggggcgccttcctcaaatctttgcaaagagagcaggtccagatcagtgtcctttgctcgccccatggctccctctctaaacgagattggagggaagtcgtgtccccgaggctgcctcaccacattggaatgtctgagctaacagtacttccaga

SEQ ID NO: 913977 - DNA, 4001 bp, Homo sapiens
gctctgcgcgcgcccgcgcggtgtgtatacacatatatttatattatatatatatatatatatatatatatatatatcttcttaatgtcactaaattcacagccatatatcttgatacaggtatacgctacaagagaaaactgtcagtagatacagtgtaaggtttacggcagtataaaataaattaactactttattaattcaaattctgtcaaacttaaatactcttttttaaatgtatcagtactctaaaatgcaattttccttgggaaaattggccaagataaaaaatactttaactccactaggggaaatatttcttttgccacaagtgtgtcaacaggaaaaattaagagcatgaaaagtaaacaggtattttgatcagaataaatcttattattttaatataacgggtcttcaagttcttcagattgtgaagaaaaacacagtttcacaaaacaatcacataactcttacccaaactttgctgtaaatggtttcagtggcatcaaattaacatagaaagtatgcaagctgagtacttgggaaaataaagcagattgatcaggagttctaagatgaaagacaatggtgtaaacctcatagtgcactatttgttccagtcattaaacacacaggaaataagattttctatttagaaaactaactcacaaggggcaatgacttcattaaaacaaagaaaatcttattaaaacaacgatcaattgtaaaataagaaaaccagtactgcagaattggaaggtgaaacaaacagacgaggaaaacgcagaaactgcctggatatttatttgttccttgaacctcttcttgtactgcccccagagagcaaaggagtttcattatttatacgcccagaccacggtagatgctctgcgcgggggcacagcctcaccagaattctaccaaaggcggtaaacactataagcaacaggaccgctttcattatgacacactttcccctctttccaggaggtcaatagaaagcatctgaaacaaaccacaaaccactcaagacggccccaaagctctgcggttggcagctggcctcggcgtcgaaagacctgggtctggtcgcctccccggtgccacctgcgtgaccttgggcaagtcgctttcaacgctgcctctggccacctgccccgaaggtgcggaggtaaatcgcggacaccgcccgacttcagggcccagggcggagccggcttcggcctcggcaagtcctgaagccaaaatgcattaaacaccaggaaaggatgcccggggacgcgcgccccgcgggcacagccctggagggaggcgctccgaccggcgccaccgggaatccccgggcagctgcgcgcaccgcgccccgagcgggatttctcggggggcggagacgccgaggagctcgtcggccccgcgaccgccgcgggcctcccgccctcccccgccgggcgccgctgagggctgacgtcgggaaaacaatcggggacccacgggaagaagacgccgccccctcccgctgccccaagccagggcaggtgagccggcccggcggcctccaggtgctgtggcgcgtggcgcggacgtgcgcagagggggcgccggctccgcactcaccagcacccaccgcccctctgcggacgcctccccgctcgccacagcgggaaccgcgctccagcagcccggcagccccgcagccgccgccacctcgcgcctggccccgtccaccacccctgctccagcgcggccgcgttcttcaagctaaactttaccgcggcctcggcccggagcacccgcgccgccgcggccccggctcccacagaggctcggctgcccggagcggcgtccgcgacggccagcccgcgcactgcgcacgcgtccccacgctgcctcagccctcagacggcggctgagattccggagcgggcgctcccagcccgcagagactacgagtcccggcaggccccgcgcgggtccctgcggcgtggcgggccgagtttctggcgtcttcctggttccagcggcggcggcctcggcgcgccggggaggcctgcgcgcggagctctgggccgccgcgccgcggtgcttcctggtattcgtagtttttgaccaccactgggcttggctcggaggtagaactccgggttctctgatgtcatcgcctagagctgcgaggaacagggatctttaaaaataggcttcgttagtttgcagataatttgtttgcaagctgtcccataatcggtccaagtgtcacaaatttacaggctgcggtgtgacctggagaaaaacgctttacagctctgcgcgccaatttttcgctcttctctctccctgcaaatgtagctccactgcctacttacaatggtgttaatagtacaggagggtaagagagacttaaagaagggttagtcgaaattctttcagcaacggtggagcataaatatgtattctggtaaatattcgttgagtgtttagcaatttctcgagcacttaactgtgtgccaagtacgcgataggcaacccggcattcatctgagaaagagacactgtcactgcccttatggagcctgcagcttgggggaaactcgtccgcaaactagcaaaatcgttccagattttaatagaatggccagactgagaaagttcaagagacagtagcggtggcggggacggggggaggctcttcagagagagtggcaaggcaagttctctgaggatgtgatatctgagctgaaacctgaagaatgagaaatattcagacaggcaaagaactgggaaagaattacatgccacgcctttcacagcgcatgccactctaggctcttaataaatatttgttctttttgtgtgcttcttcctttcctctccttgcacaaccttagatcacatcctatccccttcaaaccctttaaaaaatctttatcaacatcttttagaatatccttcctatgtgaaaatgtacatgaaacaaatgtccagtggtaagacaagctgtacagctgctaggacagaagacacaaccctggtgacaggctggaatctatctactttgccactttctttatttgcgaactgggttagaagtctgggggctcagcctggcctcctgacttgtttctcttcatggggcatcatacaggattttgagtttgtctttattaaaatcttagaggaagcctacctgttatctgaatcagaggtgtagtgaagaacagccctagattttcctgtgtagacttacctatgtgactttatgcagagagtgacactttgcccttctgaccctcagtgacctcgactgtaaatgagtgtcatccaccctgcctgccttgcagaatgttctcagagtctgataaattgatggaggtgaaaacatcttgcaaactgcatagaacggctctctgactgcctctttgagacttagcattttcaattgcctttcatccaacgtgatattttggttatcttttgagaaaccttagctatgcagccttgctgacatctgtcccttttggggtcctcatctgtataatggttgaaagggtttggcctcactatagtttataaagtagccagagcagattgtttcctttggtccacacagtgggtttttgttgatttaactgaatgtgtggttaacatttaaaaataaaaatctaggtgtcacctgtcttatccctgtaggcatttgagtttgccttccctggctagaaggtctggaaggagtctctagcttgtcagtgctagaatcctagaagattccagatgggaaatttgtttatttgaaattcaaagtcaaattcacatcttttatttgatctgaaaatactggtcctgagaatagaacacttaggccaagagcctctcaccctctccaggctggacccgccggatctctctcctaaatgttgtttgacatcattgatgagtggtttgaaattgttcctttggccaatgtgatggctcctgcttgtaatcccagcactttgggaggccaa

SEQ ID NO: 913978 - DNA, 4001 bp, Homo sapiens
cattgggttgtacgcactaaaatgggtaatctcatgctaatttcacctcgactaaaaaaataaaaggatgctgtaacgttacttaccaggcagtttctacaatgactggccccatacatttatcttacttcttagtttgaaagagtagagcaaataaattatctacttgaaaaaactcaatgtcttagaatgctcactctagaagtcagctgtcatgtaggaaatctgactgccttcagactgccccgttgtgtgaaagccaactagtcccatgaagaagctgtgcggagagaggtgaccagcccacacccagctgtcccagtcattctagcagagtgagtgaagaggctatcttgaccatccagcccagtcaagccttcagatgactctcattccagctgccatctgactgcaactacaagagagagacccccaagatggagctgcccaaatgagctccttcaacccagagaacagtgaaaaataatgaactgttcttttatgctacagaaaagccctcaggtatataccatataaatacaatatacagagcattcaaggaattttataaacaaatatatgtcagaattttcattggtttttagtgctatagatgaaattatcacctgaatagctatttgaaaattaaaatacacttttaaataaaatatgggtaaaagaagaaatcaaaagggaaatcagaaaacattcttaactaaatgaaaaattttaaaagtcaaaatttgtagtatgcagctaaaggtgattttgaaagaaaatttatagtcttaagatatttttattagaaaaggtctaatatgaatggcataaactccaccctaaaaagctagaaaaaggtaaagtaaacccaaaatagaaagggaataataaatatcagaaaagaaactaataaaattgaaaacaaacaatacaaattaaaaccaaaagctgtttcttgaaaagatcaaattgataaatctatagctatgtgaaccaagtgaaagagagaaagcaaatcaccaatattaggaagtacacactacacaccctatagacattaagtgggtaataagaattcatgcaaacaaatttgacaatttagaagtaaacaaattctttgaaaaaacacaactttgaaaaaactgacacaagacaaaaaagaaaatctgaagtacctatttctactaaagcaaatgaattcactactaaaaccccaaaaagaaaagtcaaagcctagaaatagttcatatgtgaattctaccaatcccttaaggaaaaaaataacaccggtcttttaaaaattcttctagtaaacaggaagagagaacagttaattttcaaccaaggtgccaaggcaattttgtagagaaaggacagtcttttcaacaaacaagactggaataatcgactgtctatgaggaaaaaaactaactcaaatggatcactgactcaatgtaaaatgtcaaagcttccagaacaaaatataggacaaagtcttcaggaccttaggggtagacaaatatttcttagataagacacaaaaagcctgaaccatataatagttgatatatctgaaacgtaatcaaactttaaaattgctcttcaaaagacaccataaagaaatgaaaagacaagccataaaaatgaagaaaatattcaatatatatgtatccagacagcaaatgataccctagaacaggcaggtaattattacaattcaataataagacaaccaaatacgaaaatggtaaaaaaaaaaaacttggaacacacaagctgactaagaacatataaaaatagtaaataagcacacgaatagatgcctactataattagtcaggaaagtgaatgcaaataaaaaccacaagatactataacatacctactaaaatgtctaaaacaaacaaaaaaaaccctgacaacactaaatgctgtcaaagatgtgaaataaacgaactatcatatattgctggtggaaatgcaaaatgacatagcaactttggaaaacagtttggcagtttttacagttaaacagatccttagcgaacaacccggcaatcccactcctaggtatttatccaaatgaattgaaggcttatgttcacaccaaatattggatacaaatgtttatagcagtattagtcataactggcaaaaaaacacgaacaacccaaatgtccttcaactggtgtacgaataaacaaaatgtggtgcatccaatacaataaaatattacttggcaaaataaaggaacaaactattgatacatgcgcaactaataaatgtcaaatgtattttggtatgtgaaagaagccagaccaaaaaggatatgggacatagaacaaatcagtagagatggaatactgctctaccgtaaaaaggaactactgacagatgcaacaacatgaataaatctcaaaatcgtaatattaagtacaaaaaaggccagaaataggctgggcacagtggctcacgcctataatcccaacactttgggaggccaaagcaggcagatcacctgaggttgggagttcaagaccagcctgaccaacacggagaagccccgtctctactaaaaattcaaaattagccgggcatggtggtgcatgctctaatcccagctactcaggaggctgaggcaggagaattgcttgaacccgggaggcggaggttgcagtgggcctagatcacgccactgcactccagcctgagcagcaagagcgaaactccgcctcaaaaaaaaaaaaaaaaaaaaaaagccagacacaaaaggatacagcctttgataataattctgcttcctaacatttcaactagtggttttagtgttatttatttatagaaataattatatttctataaaattctgaaaactgcaaaccaatctatagggatggaatgcagatcagtagttgcttggagctgagggtgaagggaaggactgtaagtggcatgaggatacttctcagagttatggaaatgttctgtatcttaatgtgctgcagacatggtcaaaactcatcaaattatacattttaaacagatagagtttattgaatgtaacttcaaaaggttaaaaatccagtaccaatttaaaaaaaaattctttttttgaggtagagtctcactctgttgcccagactgcagtgcagtcgcgtgatactcggctcactgcaacctccacctcacaggctcaagcaattctcatgcctcagcctcctgagtagctaagattacaggcactgagccactaccacccggctaatttctgtattttcagtagagacagggtttcaccatgtttggccaggctggtctcaaagtcctgaccacaaatgatccacctgcattggcctcccaaagtgctgggattacaggtgtgagccaccacacctggagcagtaacaattttaaaaactcatttataaatgactacaagtcatttttttttttttttttttgagacagagtctcgctctgtcacccaggctggagtgcagtggcacgatctcggcgcactgcaggctctgccccctggggttcacaccattctcctgcctcagcctcccgagcagctgggactacaggcgcccaccacctcacccggctaattttttgtatttttagtagagacggggtttcaccgtgttagccaggatggtctcaatctcctgaccacgtgatccgcccatctcggcctcccaaagtgctgggattacaggcgtgagccaccgcgcccagccaaataaagttttttaaaagctttccatggcaaaaacctgataagcaaagtcaaagccagtagaaaatatttgcaacttatatcataaacaaagggctaatctccctagcatttaaagagcttgcaaaaaatgttaagggaaatatatcaaacgttcaatagaaaaatgagtaaaagacatgaacattgtaccaagagagatataaaaatggcctttaaatatatgatgagatattcagtatcactcataacaggacaa

SEQ ID NO: 913979 - DNA, 4001 bp, Homo sapiens
aggagttcaacaccagcctggccaagacggaaaaaccctgtctctactaaaaatacaaaaaattagccaggtgtggtggcacacccctgtagtcccagctactcgggaggctgaggcatgagaatcacttgaacccaggaggcagaggctgcagtgagtcaaaatcataccgctgcattccagcctgggtgataagagactccatctcaaaaaaaaaaaaaaaaaaaaaaaaaagtagagaaagttgaaagtttaaaactacttcacagatgatatctaatctcaggcctcttaaggctgggattccaattttttaaattgtagcatttacccctgtgttttgcaaggcaacaataaaatcaaactgcatttcagttcatggatggcattacaatgactgactcaaatctgacactacaaaataaaaggactacatatgtgcaagagtatcatgtggttaagtcatttatttatttaaaaataatagtctctatcctagatgcagcatcttaaacctaaatttaatctcactaaagggaccctggtattaagcctccttaatgcaagaaaatcatctatccctggtctttattttagctgttgtttgaaatacatgttacaaaaaaagtatttcttatttttgggacagcttcaattgttatttttttctgtgactcaagttctaattttctaaaacctaatttgccaccagagagagtatttctctctcgagggaaaaatatatacagaagcattaatttttatcaaataaacttagtttcaccttctgaaattcaaacaaaacagtagaggtcaggggtgcagggcagagaggacagccagtagaaataaatctaaaaatatactgcttaagaagacaaatctaaagcctgtatagtatgttaaatacttaaatacaactttctgtgcttttaaaagataatccttgggattttacaaacctgtggattatccatgtaccacacgaaactatcttctctggtatccagtatgaagtaccttcgaagaaatttcccactgttttcattttcttcaatgtctagaaaaccacaaatgcgattctgacgatccacataaggcatttctgagcttgaacattacactgtaaaataaaaatattaacagtaagctccctatgaaacaggaaagtatttctcatggactgcaaatctgttcaatgagggggcaacttgccaacattaggtaaggtcaattaaaatgaacacacaccaacatctgaggcattgacaaaaatcacttttgaaattcagtttgtgaagagtggttactaaatgtaactatttattcactgtgatggggacaacagagagctactcacctcagctgaataatttacttactttttccctaaaaaaaccccaggtgagccaaaaaaaatagttatccaaattttaatttcctcacaaatcaagataatctatcctttagattattttagaatatttttaaattcacaaaacaacaaaagttaaaatttagtgaccacttgctacatgctaggctctgtacaaggttcttttccatatgttaactcttttaatcttctaaacaatcctaggagtaggcataatcatccccagcagataaggaacttaatacacaggggaagtgattttccaaaattccaaaactagtaggccaagagtcaaagcctgaatccagattaccgcactctagatctcctatcttatgctctacaccatcctctctaaaaaacccttgaattgttaaaactaaagtgaatcaaaataaactagttaatgtactggaaagagagataagcaggtatgatgtgcctcctgatggaagacacaaacatcacctatcatgtgaacataaagcaacaagaaaaaatgttttttagatcccctctatatccaaataccaacctacaggagatgcagaacacagaggaacatgctaaactgcaccaaaggaattcaatcagcaagagccagactataagaaacaaaggaaaaaaaaaagtttctttagcaagtaaattattacaagaaaaaaaagaaaaagagagacattatagattaaaatagacttaaaaggtgtatcatattctggtcctaaagtactgcaacttttattgtactgattaaagttaaaaaaccattaggtgccaagaactgtttctctagagactacagacatgtgattccttcttgatgtgatgcttagcccaaatctgcaccagacagctgttactattctggtacttctatagctggcaccatcacatcttttggcaggatgaatttacataactatttatttagaggctcaaggtaaatttaacttacagtgaaaattcaattacaatgcacactgatatactatgtatctgcatcactattccatatgcagtcagagaaatgataaaatacaccaaaaagttttaaataaaaccatccaataagtttgtgtgttgttgctgttattgttcttataaatctgatactttaaaggaaataatttctttaataaatttaccatgtttgtaaaaaaaaaaaagtttacaatgtaatcaaagcttgaaaaatcaatactctatactaccatataccacaggtaaaagctatcaacttgccatgagaatagacatagatcagtggaaaagaattaagagcacagaaataaacctatacatctatagtcaactgatttcaacctatacatctatagtcaactgatttcaacaagggtgctaataccattcaatgtgggggaaaaaagcctcttcaacaactggtgctggtacaactggatatccacatagaatgaagctggaccccctacctcacaccatttataaaaattaactcaaaatggattaacaatttaagagctaaaaccagaaaactttcagaagaaaatatagggtaaatcttactttggaattggcaatgaattcttagatataataccaaaagcatgagcaacaacaaaaattatattggacttcatcaaattttaaaactttttttgcatcaaacaacttcaagaaagtcaaaagaaaatctatagaaggaaagaaaatatttgcaaactatatatctgacaaggatctagtatccagaatacataagtaactttcagaactcaaaaactttagtccaagtttaaaatgggcaaatgacttgaagagacatttatccaaagaagataaacaaatggtcaacgagaactttgatactcaatatcatcagtcattagggaaatccaaataaaaaccacaatgagataaaacttcacccccactaggatggctataattaaaagagaggaaaataacaagtgttggcaaggacatggagaaactggaaccctcctacgttgctggtgggaatgtaaaatggtacaacagctgtgtaaaacaatttggcagctcttcaagagttaaacatagaattaccatatgatccagccattctactcctaggtacacacacacctcgttttactgtgcttcattttattgcacttcacagatattggagtttttacaaattgaaggtttgtggcaaccctgcagcctcaaactactgggctcaagaaatcctcctgtctcagcctcccaaataggtgggagaactacatgcatgtaccaccatgcccagctaacttttttattttttgtaaagacaggatctcactatgctgcccaggctagtcttgagctcctggcctcaagcaatcctcttgcctcggcctctcaaagtgctgggattacaggcatgagccaccatgcccagccaagtgtctcgctttaaaccaaaagccagaaatgtctaagcttagtaagtgaagcatgtcaaaagctgagacagaccaaaaatgaggtttcttgcaccaaacagccaagttatgaatgcaaaggtaaagttcctgaaggaaattaaaagtgctacttcagtgaacacaagaatggtaagtgaaacagctttatt

SEQ ID NO: 913980 - DNA, 4001 bp, Homo sapiens
gctgttgtttcctggaagagcaattctgtgtgagaaagagaacgtaacctcttcaaaaccttgcccactccccaaaatgcatggataatatttaaaaaattatccctgagatttcttatcaaatccatgaggttctttccagtttcaaggatttcactgcctgaagagctggggacaagcggttttcaacccatcacctttccctctgtccatgtttataggacttggccacgccccctatgcagctgttagcctaatgagtgatggccctcaaggatccaatcggagaaatgtgcaggagagattagctgtgggtggcatattttaaagcagtgtttactgcaagctgtttttgagctgctgtttgtcaaaaagccaaaaaatcattttaaaaaatatttctaaagcctttaaagtttataaaatgcatttgcatacattatttttttgtgttcagaatggcttcattctgagatagctcattttacaaatgaaaagctgcatttgagagaagactgagatgacttggacctaggtcccctggcagaactccacacagcaccacattcatgctcatggacactcccaaataacatttgccctccctgtgccctgtggatgtcaaagtgtgctttggaggacatctctgtccttccagtgtctgcaaagggctccagagtcatgtgctgcaaccattcctccttcatctccccacccaccgtaaaatgagaggacagataaggcagtagggtgtggtggtttagagtgttagctctggcatctgggtttaaatttcatctccatgaattatgaggaatgtgatcttggatactttataatacttctctacacctccatttcttcatctgtaacatgaaggttattactaccctcatcagattgctgggagtatcacttgagataccctgttgatgagcactcctcagtacataatagaagctcaataaatgctagttgttaggtcctttccagctcagatattctatgattctatggttgtttaataatgggtagcattttttgagtacttaatacattccaggcacttctaagcaatatgtatatgaaagattttatgtatatgtatacatataatttcacatatacatataaaatctcatcctaacctcataaccgtactctaaagcttgcactgttttcacaatgatacaatgcccatttacagacgaggaaatggttatcggagagattaaacaactttactttgatcatgtaattaaaaagaagcagaaccagaattctagcttgagagctggccttaactactttgcttttcctcctatctaagaaagtagaattaagtcttttcatagttctgcttgtttttcttgtcattgcccccaaacaaaaaagaaagcctttctgatttagctgtttgatctcattcaggagaatctccccacagtcactgcctgacccatttattataacattattttggatttggtgaatacagtataccaagaggtcagtcctatttccctctgactatagtatagcctaggaagcttatgaagaaagtgcccataacagaaatacagcatatctgcaaaattttccatttccaattttgcaattgttcaattgcaaaaaagcttctagatcatcccagccttggaagtccaaaccagatacaccaagcagtacttactggaagccaagaggtcgctggtccagtgctcaggaaagtgccttgtcccgaggattcctgaactcactcctgctgactctgagccttggtgcctgggtgaggattaagcacaaactctgcttgaaatctgaaccaccaggaagttcccaaactaatatccttgagcagattttattcttgccccaaactgaaatggaagctatgccctcaggggaagttctgggccttcatacttgtggcttgccacagaactctccttggtgtcccagctgcctagcaccaaaaatgaaagcaaacacattaataataaaaaaaaattcctgccagactttggaccatggtcacaataacccttattgagaacaacgccaatttaccctcaaccgtctgtggtgactaccattgaaaaaaaatccctatgcctccctcagccatatcttaaccaatgtcttcctgggaagggtagaaagggttcctttgtaccagatgaggaaacaaaagcctggcttctctaaacacttgtacatgccaatggtttccaggaagagttgctcattcagccatgacagagtgttaccatcaacagggtggcgctaggcatgttcccctgcacagccaccaacagcaattgagcaaaccatcattcttagacctggtgagtggtatccagccaccaaagggtcttaggtatattttcatgtgtattacagatttctaggggagaggaagaagtgatgatgaattttatcctgttctactgcctttagaagtaaaagtacatcatttgaatcctcatcctcacgagggtagctggtctggaatcagctctgccatggatccattgtgtggtcttggcaagttaactggagttctctgagtctgtttcctcatctgcaaaatggaacagataatactgacttcacaggatttttttttaaagttaagtaaaatttcacatataaaaagcatctagcacagtgctttatccacagttagcattcaacagagggtatttctttgtttttctcttttgcatcctatggagggtagatgttattggtttcttcatttagcaaacctagctggacttcaggcatacagaaattattgatatattgtttgcttcctgcacaggaccagttttgcttgatttaggaaaaacaatttcttaattttgatatagtttggatgtcccctccaaatctcatgttgagatgtaatccccagtgatggaggtggagtctggctggaggtgttgggtcctgggggtggatccctcatggcttggttctgtgtctgagatagtgagttgtactgaggtctttatttaaaagtgtgtggcatctcccccaactctactgctcccactcccaccaggtgacatggctactcccgcctcaccttccaccatgcgtaaaagaaagccccctgaggtcttctcagaagctgagagatgccaggactatgcttcctgtacagcttgcagaaccatgggccaattaaacctcttttctttataaattatcaaatctcaggtatttctttataacaagacagagatagacctaacagaatttcctggatgttcttttgggctaacttttgataattctggagatagtcttaatgtctttacattagaattttaatcagataccagttgtagctctaagtagttcataaaaagcttgtgctgatttccacttacttgggaactataaagtccagacagcctattgttataatatagagacctaaccaaaaaggggaagagggaaaattactgtaagacttgtgttcctttggaaaggataccgatgaaacagttagatgtgctttccatcagcaacctgttcatctgtctgtccctccacctacccacccatccaacccaccctattctaggcttttttgtattatttttccaatagtattacaaaactctttggaggaagaagcctaacaaagctatttgtactgtagataaacccatgaaatataaactgaaaagcaaacaaaaactggcacagacaccaaatactaaacttgcaaaacaaacatacctatgaaacacaagcataggttttttttttttttttttttttttgagacggagtctagctctgtcgcccaggctggagtgcagtggcgcgatctcggctcactgcaagctccgcctcccgggttcacgccattctcctgcctcagcctcccgagtagctgggactacaggcgcccgctaccacgcccggctaattttttgtatttttagcagagacggggtttcaccgtgttagccaggatggtc

SEQ ID NO: 913981 - DNA, 4001 bp, Homo sapiens
ttcctttggtcaattatgtaaatttcaatttgcatgcaacttgttactgtttgactttatagtatttgttgttataaaagttttcctgcttggatacacactgatcaatttcaatggaacctcggtgatgatggtctttataataggaaagactaaagctcttttccccagcctttgacaggatgaaaaaccgctttttccaagaggtctgaaaaataaaaagattttatgtcttagttaaatctcagaggaaaagaaatgatttttaaaaatgctcatgaggctggtgggaggcttgttaaatcacagcaaatacttaccacagaggagaacagctgagaaggtggtgatttaataaagtaatcttgtttgcagacttcattttcataagaaaatgtaaattgtttgcctaataaaagtgaacagaactcagtttgttcctcataaatttctgaaaagaactgcctcaattggaaaacactgtttatctctggaaagaccttcagattattcagtagttatggaaaaggacacctataataacccaagaaaacaaaggaccaaatgtatgattcttattcctccacagccgagaccttcattcaaacaacatttgaaaccatgttaattcagctcacacctgtctggctttctgtttctagagtatgtcgttggctctctacgtgtgagcaaagatttggctgtatttccattgcagaagcatgataattctgcattgccctttggcttagcaaacaagagcaaaagcacctgctattaaaaatgaagtggcaaaaactatctggggaagggggacaggtagagttgctgcagaagttggaaaaggagtgaaggtaaacacagccacctccccagaattactggatactatcctaatagccccagctattaccaaatactgtattaccaaatcttaagtctgttttcacttaataaagaagctctaatttttttagtaaagactgccctttccaaaactgaggacaaactaaacctatagcctggatgtgaaagcaaatccaagctaaaacaaaaacaaaaacaaacccaaaatgaaaacaaaaataacaacactgtgtttaacaacattgtgtttttctaaatagtgaatatgatacatatttattgtagacattttagaaaatatagaaaatattaaaactgcctataatttcatcacttatagagaagcagttaacattttagaaacttctttatttaatcacttctgccaccccgttttcaatagtgagtggttttgcttttgtctgctaagccaaagggcaatatatactgtctccctcaagtattcaagagtgtcgattaacacatgtgtgtgctgaaactacctgaggccagagaaagaaccattaaaatacatcagagattcagaaaaagtgcttgttacctccagccatactggaaaaacttataatttacagggcattgggtagagtactcaggaatgtcttgcctcagtgtgaggaataattagctctacactaattactagttctacactgagcactgctccaaacccacctaaaaaatcatgaaagacttagaagaaagttgttcccaaaaaatttaactgtatcccagaacaaagctcaagattcataggaatacaaagatattcaggaaacaacaaggtaaaatttgcgatgtttggcagtcaatcaaagtttaccaggcatacaaagaggaaggaaaacatgatcaataatgagaagaaagtcaatcaatcaaaacaggcctagaactgacacagatgttagaattggcagagaaagtaattaaagcagttattatcactatattttcaaaaagttagggagagatataaaagatataaagaagacctaaagtgaaattttaaagatgaaaactacaatgtctcaaaaaaacagcaacaacactggatgggagtaagagcagattaaatattgtacaagaaaagattagtgcacttaaaggcatggcaactgtaactaacaacataaacaaagagttagaacataatttaaaactcagaaagagcaccagtacactgtggacaatttcaagtagcctagtatataagtaataggagtccctgaagtgagagagggagaaataaaaaatatctgaagtaataatgctaacaattttataaacctaaaactataatcccagagatccaagcagttcaatgaatctcggcacaagatacacaaagaaaagtacaccaaggcatgtcataactcaattgttcaaaaccagcaataaagaaaacaaatcttaaaagtagccagaggaagaaaagacctattgcatacagaaaaaagacaagaaacagagatattgatttctcatcagaaaaaaaatgcaagcaagaaaaagtaaaacaatatatttaagggttgggtgtggtggctcacaactgtaatcccagcactttgggaggctgaggtggtggatttcctgagatcaggggtttgagaccagcttgcccaacatggtgaaaccctgtctctacaaaaatacaaaaattagccgggcatggtggtgcaagcctgtagtcccagctacttgggaggctgaggcaggagaatggcttgaacctgggaggcagaggttgcagtgagccgagatagcgccactgcactccagcctgggcgatagagtgagactccatctcaaaacaaacaaacaaacaagcaaactatatttaaagtactgaaaaaatactctcattcaaaattctatattcagcaaaaatgtcttttaaaaatgaaggcaatttaaagactttttagatatataaaggctgaaataattcatcattaggaggcttgcagtataaaaaatgtgaagggaagtccaggaagaagggaaatgataacataaaaatctgaatttaaacaaattgaaagcactgaaatggtaactactggggtaaatgtatgaaattattttcttattattgaaaacattaaaacattaactgaacaaaaataaagacaatgtattgtgcagattataacatatgtacaagtaaaatgcattccaacagtagcataaaggccaatagggaaaaatggaaatacgcttttgtaaagttcttttattatatgtgaattggtatactatcacttgaagttagactgtgatgtgtataaaccctaaagcaatcactaaaataacaaaacagaaagtaatgactaataagccaacaaaggagataaaatggattcataaaaaattcgattattccaaaagaaggcagaaaagggggaaagggagaacaaacaacaaataggacaaacagaaaataaataacaatatgatacatttaaacctgactatatcagtaattatgttaaacgtaaatggtctaaacacctcaattaaaaaacagagatgaccagattggataaaaaagcaagactcaactctatgctgcctgtaagaaacacactttaaagatgaagatacaagtgggttacaaggaaataactggaaaaaaagatatgctatgccaacgctagtcaaagaaagctggagtgcctatattaacatcaatgtagattttaaagcaaataatattaccaaggacaaagaatatcatttcataataaagggatgaattaatcctaagaggacataaaaatttaaacatatatgcccttataacatagcttcaaaatacatgaagcaaaaactgatagaactgcatgaataaatggacacatccgcaattatagagatttcaatatccctctctcaagaactgatagaacaaatagtgctaaaattgattttttaaattttggatgcatttttaatgttttaaataataagtttgctaagagttttcattcaagaagagtaatgctggcctcatagaatgagtagagaaatattcccttctcttcaattttgtagaaaatcagcaagaatacagtaggcttgaacaacactaccaaccaactttaact

SEQ ID NO: 913982 - DNA, 4001 bp, Homo sapiens
ttgtgactgtcttctaagtcgcggcttggtaaatttcactcaagggtttccttcaagatcttcaagattcaccttgcctggaatccccaggtgtcccccaaccttccatctgtgactctctagttgactgttgaggacgcatgcatactttccgggcaatcatttaaattacacacacacacacacacacacacacacacacacacacacacacaccagaaaagaacaaattgacaaattgattatcctagggagaaagttttcgttttcttttcttttccctccaagttttttcttttttctttttctctcgtttcacctcctctcgaagtccaccctagttcaccaatttctgccaagatctctttctgcctgtgtcttcactttcttcactgaaaggcagaaatggggagtaggcacccagttcgcggtgggcagggttccaggaggcagctcccgctcggcgatagcccccggggcgcaactccccgcaggacgcgcacctgccaggacagccactaagaggatgcggaggttgggggccctctcggggacaaaatcagggcactccaaggaactctctgcgcgttcaggcctgtctgtgaagctggcaggcggaggacaatgggagcaggggtaggtctccagaggcgagcccgcctccacctttcccacctgctccccacctctgcgccggccgcatttaccccgccccccttccagcgcccgcttggcccaggtcactagacggagctagtggggatcgccaggggaaggaaggtgctgccacagggaattttctcgtgcagaggggagacctgcaatccctggctttcacaacgtcccccacccaccccataccacacacgcttagtttaaccagcagcgaggaaggaggaggagccggagagcacacagcctggagatgccaggtcctaggagatgtatccacggaagaagctttgctctcacactgaagccctccctgggctactttggggagacagtaccaccccctgccgcccaggtgaagtaagcccgaaagcctcaagaaaacccctagtccccggcgtccttctcttgataaccctctttccccatttgggaagcctaagtttagccgaaaagcaactgcaataagtttcccaagggcagataggtgatgttggggggagagggtagggagcacgagagtgccagagaggtcttcagctgcgcacaaaatcagcaagctaaagtgcatcttacttaccaaggatttggtctccgggtttcccatcggcgaactgaaactggtccgtgaagaagtggcaaagtaacataactcctgcagcggccaggtcggccttcgggaacctcgccatgccgccgccgccacctccctaccccacccgccagtccttcgccggtgctcgggggctcccgatgcaataggcacgaccgggccaaacgctgcggatcggtctcggtaggacccggaggcctttgtaaatgtcgctgcgatttcacagtagggaaccgagaagaggaagaagcgaacgcgagtaggagcgcagcgctcttcggacctctgaggctctctttgcaacttgccacactcgcagccctcacccgacactgaacaacaaccgcggggaggagaggccacttgcagccgaggctcgcaaactgtcggttccactcgggcagcgccaacccggtgcccgcggacggtgacttccgagccccagcgatgcgctccactgggttcaaaacagatctaattccacagccagcgccgctgcctgccccagatccactagggctggtcggctctgcaggaactttcctctgtctagggatggccccggcaggaggtttaggtttgcgggaaggaggttgatgacgaaaccctcccgacaagttttgcttcttttcttcgcccgacgcagggcgcgcgtcctttctcgcagccggaggaatgggcagctccaaagagctgagccctgggaaggttagggctgcagcagtctgaggtccgaagccaggaaaaaaatgtgtttaaaaaaaaaaaaaaaaaagaggaagaagaaaggaaaagggtggagtgggagggagtcacgctggaacctatcgggagagggttcctccgggctcaggaggaggtggccccaagcccccgcggagccccaggagtttggtggcggaggaggcgctgccgtcgccacgctcccccgcgctccttctccacactttgaggagggaaggcagctcgcaatttgccagatctgccgccgcaccctcctccctcctccctccgccctccccttcgctcctccaggcttctcccaccttcctccctgaaaccggcagcccgcacagacctgtccaatggctgcactttcctcggggctggctgaggagtcgcggccaacagattaagccgggggagcctagcgaaggggagggagagggccactccagccccgtgcgccccaggcagccggctgccccagagcgcggggagaggggacaggccggggagctatcgggggagcgcggggcggtacctccgcgccgccggggcgccatcctcgcagcctgctcgcacgccctgggcagctccgccaactgcgccccacacccacctggctcccgggccgccttcgcgcccgactgcggggggcgatcgcgccccgccccgaccctggcggggtctccctgggcacgaaagggttaaccacagctcgccccttcgcggaggctggttctggtagtggctagggagtggagaaagcaaaccagagccggttcggttaccgactctgcgaagccccctcgaccccagcccagcgcgggagggtggcggaaggtggtgcaccgcagcgtggtccccgccgctgccgccgcggctttgcaaagtgtcagcgggggcgaaagcgagagtttaaaggaacaggaggcccattgaatttcctaccggagctttcaggggctctggctccccagtttgtttttgttttttcagctcggggatctgtttccgcgttaacccttgccggccctctcgttagttgatatcttattttgcatacagttaatcatttttgaaagggataaatacaaggaaaagaagcaaagcgctattggttaaaagtacaggatctagagcccggacagcctgggctggaatttcacctcccccgcaatgagcagtttatctcctagcctcagttatccatccatcaaatggagagaattagagtaacgcccttataaggtggttgcaatggattggatgagttaactgtatatttaataaatatagaacattgcctaccgcaaagtacatggctttgtttaagtgtttactgaagcaaaagtgagagaagacgacttcaatcacataataaatgtgcatgtgttctaagttcaaggtcctttccactccaagctctgaagagtctatggatgctgtcaatagatgtctcggcttgccacaaaacccactggaagtggatccggataatcaatctacctttgcaaatgtgatgctcaaaggacggctctctcatgggaaacaagaaaggtttcccttaatccaatactcaatttgctctttatttccaaacaacagatatacacgtataaacacaaacatatatcatgcctatactctttattatgccaggaccctggctctttcctgagctttcctcccataggttgatttctacttaggtaactgggtttttctatttctgcttaactaggagtgtttaagttctatgtaatattacatccgaatttgagtacccggatatatacctgcttaaaatcaagtttgaaaactgagtcttctcatcaaaacctgattgtgcggttgacccttgaacaacaggggtttgaactgcgaggatccgcttttgcatggattttcttcctcctctgccacccctaacagagcaagactaacccctcctcttcctccgcttcagcccactcaatgtgaagacgatgag

SEQ ID NO: 913983 - DNA, 4001 bp, Homo sapiens
aatatgaagttaatgaatcttttataaacaatttacattaagtaatacctaagctcagtgccctgaatatctacaaagatgcaaatttcacggctgatttttttctcttaagaacttgaatattcagtatccttattacagaaaacaggtggaacttggttcttcttctttttttttttttttttttttttgagatggagtctcactgtgtcgcccaggctggagtgcagtggcgcgatctcggcttactgcaagctctgcctcccgggttcacgccatcctcctgcttcagtttcccgagtagctgggactacaggcgcctgccaccacgcctggctaattgtttgtatttttagtagagatggggtttcaccatgttagccagcatggtctcgatctcctgacctcgtgaaccgcccgcctcggcctcccaaagaacttagttctaaacacagtgatagttcttacttgaaagttgtttgggttctcattagtatataggaggaagcgggtgttgacatcttttggagaccaaggcaatatatggaggggtctttccgtaattcctgaccatggggagtcatcactgaagcagccgagtctttcgtagcaaacttcttttcctgcaatcccccagaaggatattagttttacaaacatgctctttttaatgatctgtctgccaatatatgagttcaattacactgtgtggtagactttcctcctctgctactctcaacaccctcctagccacacactcacaaaacagcttcaaaagacaacacaactattccagacaggctgttgttcttgttcctcaattctaccacatggatcacttcactccccttgtgtctctgcccaatcccaacgtgggactccttttagcctctaaactcagatatcttccttgggctataggtgctcaagaaagggacagccctgtgtccctaagccttaacttcttgtagccactgtttagctgtgggctttgaaaggagagctaaaattttatggaaaggccaaaaccgtatatccccatccttgctgtactgcaggacatcttcattcctgtgatgaagaagctgttcacaaacaaccaaaccaaaaatccatggtttaacacaactctaggcttgaatgtcactccataaaaaaataacccaaagaagggttctcttctctaaggaggataaatctagattaatggtaggagtaagagtagcagctgttgtgggggctgcgtttctcaacatcttaccatgtgtcaggtgctgggttggatggtttactaatctgacctaattctcacaataatcctaggagatggggaatccgactctccccattttgcagacaaagattctgaagcacagaagagttaagaattttgctcagggtaatacagttgtaggtggtggtggagccaaggttcaaactcttaacttgacttgatgtcagggttgctagatttagcaaatcaaaatacaagtaaatttgaatttcagataaatgataatgttttagtatagatatgtcacatatttgttgtttgtgggaaatatttgctgtttatctgaaattcaaatttaactgggcatcttagatgttttctgacaaccctactccatgtacctgtgctcttatgcgtctcctgtgctttactccttgaagtaaatcttcatgttattactgcggcctgaattcagctgccctagccctcctgaccgtgttgaaaagtgaatctctcccagctcaacatttatttgttttcttacctgctactgctcccagcagcagtgaaagagtccaaagtggcagcatctacacgaaattaaaaacatgattgagtctggctaagtttttaaaagatcggcaagttttagttcatttagacctctgggggaaaatggatacattctgatcaattaggcctggaaaacatgttcccgactcaccgtggcagttccgtcaggttccacacgcaaccagatagcaacaaaaactccttttataggcgaagcttatctttttgaaaccgtggaaaaatggcatgcaaagaaaggcccaaggatgtgtttctaattttaatcatagataaactaaggttgacagagtaaagttttccatagtagttgtgggatgatgagaaagggggtagatatgtgattatgtaaagctcaaaaccactttaatttcattatagtaaaggttctatatagtaaaggttctagtctttctgtctctttttaagttcacaattctctgtgcctgtctgtgggcatgtgtgaaattaaattgttttcacagatttgataacagcagtcttaaaaacaaataccagcagcctaccagctcttgccatttttgtataaccttgccttaccctcaaaaacagtgaaatagaagcaatccttcaagagagctcataccttctggaaaagcatttgattaattttgatagtccatagaactgatttatttctcaacaatgtcatggaggaaagaataaacaagctaagaaaaggaattggaggtacagccgaaagcatagaggcagaatcactgaccccactatcagatgaaatgatgaataagcagaaaaaatatgactcaacttggaagaaaatggtttagaaaaaataatctgaaagagaattgtttgatggaaaataactgggatgttttcagttaatgatggattgcttacaataaatgttaaaaagagtacaatgtgataccataattttaagagaccagaaccttttagcctgaaagtgtcacagctatacactgagttgttgaaattgtcacattcgtaggtcaaaagtggtcaaaaataattcaatcccctggaaaagtttataggtatagagaaaagcaacagaattatcgtgtacaagggaagttcaaggaagtttggcaagggaattgttaagataaagacagaaggcacaaggaaggatccatggatggacaccatggcaaattcctacctaatctttcaaatatcagcctttcatcccctcctcaggcaatcttccccagccatggttaagctggttcccttgttccctctaaggaaggttctttttagaacttctctcacttaagactgatcatttgtatattataaactcagagaaggctggaatgctcagggccttgttgtcacatcctagcacctagcccagtgcttgatacacagcaggccttcaaaacatctctgatggatgattgaacaaatggaatgaatatgaaaagcaaagcaatttattttgcataatggctgcaataataattgtctccacagtctcataagtaaaaagctgttgaaatttcttttattcaaaacatgtggaaaaaaaaatccagaagcctctaaaaacagaagtcttgcatctctctagtatttagtgatggtaatgctacattgatctcagagtcatatcctatgacagtcattgtttcctctggttttaccatgaagttatttacattttgtgtgagttaccaagtaattcacacaaagtttctaagttgtcattttagatggcacaaaatgtaatccataattagggggacatttgtttaatatagtataaagaattaggatcaatagtcaccaaattctgaaatagtgaaatctgtggggatattttgtaaactaaaataagttcaaattttataatatctcaagaagattcaacttctcaaatttataaaagctaagaacggaatggtacataatcagccgtctattacatctgctctggatgaataacttcctctatacataatcctgttgaactcttaagctgggttgtgaaatgttataaactacattgtttcattcagacaacaatgtactatctagaagcgtctattttcatagtatgtgtggcaaagttgctagcatctttttttttttttttttttgagatggattctccatctgtcccccaggctggagtgcagtggcgcgatctcagctcactgca

SEQ ID NO: 913984 - DNA, 4001 bp, Homo sapiens
ccaggctggtctcgaactcctgacctcaggtgatccatccaccttggcctcccaaagtgctgggatcaattaagtggtcacagcaacacatgtcagcctctcagggatgtgggaaaaatttgaacaaagaaacccctatagtccctcgcttataggatacaaagtaccctcactacaaatggaagcagaaaacatcaggccttggtttaaccagaaattaggtagtaggagtacttttctaacagcaaatgtggttgcttcagtgtgcagatgtagtgcggaaacatggaaaggcattttaatttttgtgaagagaagcattttaattgcataaagttacctaatatgtaaagatttcttgagtgcataaagtgatgcagagatgttagcagaagtgttggcctcagctggccacagggatcagagctggctcctaccttgcacatgtctgtcacccagctctcatctcctttgtctatgaagccatggatgatgaaccgggtctttctgtccatttgaaaatttgatgcctcaattgttgatggatcagagaggaggagaatctgtgacagacgcagaagtgcttcatgttttcgcagcccagcctcacaggcctttttccttcctcatctccgcctgcgccaatgcctctacttttcaaagcttagcaaaaagccacttcttccatgaagcccaccctgatctcccttttcttgccccatctctccaggtgagtaatcactgcttccactaggcctggattgtggtttgaggttttaccttccctgtggtttttgttagacagtaagctgtttgccccagaccagaatcacacagtagctagaggttctggcaaatgtgaaccattcattcattcaagccaacattactaaagacctgctctgtctaggtctagctaggtctggggggcagcttgagggatggggtggggcatggtggaggaagagggcacagagataaggtattcatggtctgcagggtgggcatagccccgtgccagttacagtgacatttaaatgacagaggtctcacttgaaagttgtttgggttttcattggtgtacagcaggaagcgggtgccgatcttctcagggctccaggggagaattttcaggggcctgattgctgtcccgccccagggctcagtgtcagaaaagcacccgaggtcctcatagcaaacttcttttcctacagagaaaggttgaatctgctcaaggatttgctctcaaggtgtgctctggggtgtcactgctgttcgggcctggtcactcttctattcagggacagtctgaagacaatggatgaacctactgcaacccctcccactctcttcttgaccccagtgcccacctactactggccggtagtagtatcagtcccattgaatcccacagggacaccactggagcctttgtttagaactaccctcaaaactggaaagttctaagtcccattcctagctcttctgatacatttatttgaccaatgtgatcatgggcattgataagtcaatatgttaactcaggcagatgtttcatgctttacctagaaatgtctggccttgggcaccccgagcatgaaggtaggccactggggggatccccagaaacaggtctcccttaaactgcccagcctactctcccaggcagagtgtcagcccacatcttctctctggtaccctggagctgctgggagccctgccacagttaaagctttctctggccagggctgagagcttaagtttaagcccttcctacggggcaggagtggtgtttcttacctttggctgctcccagcaggaaaagtgtgattgtccagaagatcagcatctacaataaatttaaacataattcagtctcaccgggcattgccagagcagtgagcaccgacgccctggacttcagtactgtttacctcacctgtacgtcacagcagggggaaaggagttgcaaaggtggcttaccctgtctaatgttccagatgttccctcccaccggatcgagtgtccagccctttctaaaaatatatattccagccttatcatttggacactacttcaagaaaacagcaggtgattatagcccatgctgtgcgcacttaatactttaatctgcccaaatacacaaaacaagattaataatagctgtcaagtcttcccacaagtctggaaatatgacagaatgcttggttaaagcagggagtgaagtcaccaaccttgtacctatgtaactatgcatgtacttgtgagctgaatgggccctcacttttcagttttctatttcatcaccaaatagtttacaagtctcaatagggacacagcagcaaaccctaatgatagaggatagtatttctcatttagaatagatgaaaatacctgcaattagttgaaagtaaagagaaatctctgattaagaaaacttcttctctctctctctctctctctctctctctcaatcttcctctctctctttcgaagactaggaatactgggcatctgagctttggagaaaaattcaacagccctcacagtagcttctgaccacaatcctcccattaactgcctattccagttatatattgctatgcaatgaaccaatccaaaagacaacactttaaaacaatagcaatgattgcattatgccactgtaatctcaatagttgggttcaggagcccccagaggcccatgtcatgtctgttgagtttccccaggtcctctgaaggttgcacacctgcagataattcttggaccctgtaaagccatcatgatataaccagagacctctgcatctgtgaacagcccagccagttcacacagcaaggcagataagccttcacaaagcaaacaccatgagtgcctccccttgccaagttaaatatgcctcggtgtcaaagttctcaatcttaaataaccaaaacacaagggtgcaggcctaagggccttcctcttaagaaaatggaaaggactcctggaatcataaagaatagctgccaactgttacgaagccttaccaagtacagtcagaattccaagcaccttacgtgtattacctaataagttttaaaacaatcccataagcctctctttataaatgtgggaactgaggcacagagagataagtaaattgcctaaaaagtcacacgactaacgagtgatgaggtaagatttgaattcaggctgtacagagttgttgaatattcagttgtgttgagctagtaatcagcaagcttcactggatgtcaaccatgtagaacaagagggatacacagaatgagtcaaaagagaaaatgtgaaaaccctcttggcccttgacctgtttcctccctacttccaggcatccccaggatggagaaacaggctagacttggtgatggactgggaaggtggtcagagttcttcatcccttcctcctgtacacacaccctttgcaatgtgatcttgcagctccttccatcaagaagtggagtttatttctccacctcttgaatctgagctagacatggtatgacttgatttggtcattaagtgtggtaacagcaacatctttgaacaactcaaagccagctgtcccccaagtatgtaaaggacccagccaagattagtggcactgcctactcaacccactgtaaccacagaggcatgagtaaatccagccaagaccagaagaaccacccagcaaactcagatttttgagcatggataaatgctttaattcagtgctttaagccactgaattggtgattgtttgttatgcagcagtagctaaccaatacaggaacccaagccaggcctggaattcagagacagcagcacctgttgcactcactgttactattctttagcacacagcaccaggttcgagcataccctttcctaagacaatgaggaaactccgtgcatcagtcaatatacactgtgctccaatgcactggctcctgtttaaatgctctaggggatttaattagactaagcctctagcaag

SEQ ID NO: 913985 - DNA, 4001 bp, Homo sapiens
tgttagtactttactggtatagtatcatttaagcctgaaaacacaaatatggaattagtattatctccattttactgctgaggaaaccaaggcacagagagacaaggtaagctacctgaggtcacagctagtggtggaggcaggatttgaacccaagaagtttaactgggaataaagctagaacttgaggggacacaaagataaatgagatatgaaccctgtcctgaaagggaggagctctaatagggaagcaatactgatggcgttgaattcattccaggaagagggtgcacccttggaggtggactctaggaggcttaagcaatgtttgccccaggggaaaggtagctggttaaatgaaggggctcgaatgcaagacacctgggctctcttaagtggagagcaggaaagtgttggaaggtgtgagttggtgaggttgaggggaggtggtggtggcagtggcaatgctgtgcttccacaggcagtcctgtgtttttgggactcgagtacagggggctgaaaagcagaaaagcctgagaaggctgggggcagggaagtgagagtgaggcttgaggcttgaggcttggccctgatagggcttcttgcaactcgggaagaccaggaagctgggcaagaaggaaggccctaggaggagagagatgaggagagagcctggcgtgagccttggggaatgtccacatttggggcaggaggaggctgcaggtcagcaaaggagatgaagaggggttgtatggccggaggagcagtcgcacccaccccggtctctgccgtcaggagcctggccttaattcatggccaggatggaaggagaggccaagagtgggctggcggggttgagaagacaagggggaagagtcacaaggcagaagaaagcccccacagggacccaaggagaccatgtctcctacagcaggacttgggggaccaaattgggcagtgaggtattctggcaggagaggaggtgaggcagcccccacggagagggaaagactcccggaggaagcacgcctgtgaaggcgtaggcagatgggaagtcagcaggctggggctcagggggctccaaaagaaacggaggtgatttgtgttttaggataagtagaacttgaatatctgtatctcctctggacagaaccaggtcgggggaacaaactggagagacagaaacggtgactctgagaagaggacacgtgggcttgatggcagaaaggcaggcttgcctggcaggactgggctttcttgggagagggcacatccacatgactttggtctgcaggcaaggacaagggcattgggatcaggtgggaacaccacaccctccacttgtctcccagccgtgagagtctttgcaggaagaaggtggccaagtaggagggttacgggagatactctgtgtccggcacgttgccctgtgtctgcctgagagtcaacactctctgagtggcacaattgttttctccaagtaacgataatgctcttcataatcattataataattattaatatacctctagctgcctcaccaaaggccagcccaggcatgtcactttctccctaaaggaatggtgacagcatcctcacctctgactgtggccagcaggagaaggccgagggtccaagggggcagcatctacatggatggaaacacagacacacacagacccatgcgcacagtgaggctggcaggggcaggacccagctgggtcaggagcccgggtcacaaggacagtgagtagaacagacgccccgcaacccgggccccacagggctctcccttgaggtggggaccctgaggctgagtcctcccagtgcacagggagttagacagcagcacactaggaccctggactcaggggctccactgtggtggcttccccgcctctgggccacgtccctcttgtagcctgggctgcccccgccctgccaaatcccctgctcacatggggccctgacttaccatgctgcaccagagcttccactcacagcccagcaggttggctgtggccttttataaccaggctttatcctttggactccttagaggaaaggccggggcaggatagataaggcactgcacgtgggcgctttgaacctaacttatcgtaaacacataaaaccaactcaaccctgggagcagcaatgtttattaagtaagattcaaggaaaggaaaaccaactttgggaagggaaagagctctgttaatctgagtttacaggtttagttgccaagagattgtgttcccaaagtggtaacagggaaacatcatgccgcgcatagcatctctggaacaaaatccctttggacacatgatcccccaaacccatcgtgtcgtcctgttgctcttgacagattgtgcgggcctaggaagtcaggagacttgttgctcagtggaactgactgtttttgaagacagacaccttacttactttgggggtggggtaggtggagggctaccttccctattagagagtctagacagaggacaaaaatgaacgcaacctcacagacgaagctccaaagaataaaatgaggccaggcgcggtggctcacgcctgtaatcccagcactttgggaggctgaggcgggcagatgatgaggtcaggagatcgagaccaacctggttaacacggtgaaaccccatctctactaaaaatacaaaaaattagccgggtgtggtggtgggcccctgtagtcccagcttcttgggaggctgaggcaggagaatggcgtgaactggggaggtagagtttgcagtgagctgagattgcgtcactgcactccagcctaggtgacaaagcgagattctgtctcaaaaaaaaaaagaataaaatgaacatgaacactgttcaaatacaactttgtttagaaataatatagcttgttttaaaagtgtttctgagctgcacagactgtaccttgacctggagataagaaggggaggtattttcttttcttcactgctacagaagaacctaggtgaataaccaggtgccatcctgccatgttttaaatgggtgtgtaatttagatacaccaaactgcatacatcttaagttgaaaatgtaagtacaggccaggcgcggtggctcacgcctgtaatcccagcactttgggaggcctgggtgcgtggatcacaaggtcaggagatcgagaccatcctggctaacatggtgaaaccccgtctctactaaaaatgcaaaaaaaaaattagccgggtgtggtggtgggtacctatagtcccagctactcgggaggctgaggcaggagaatggcatgaacctgggaggcggagcttgcagtcaaccgagatcccgccactgcactccagcctgggcaacagagcaagactccatctcaaaaaaaaaaaaaaaagaaaacctaagtatagttttatctcacgcctgtgatcccagcactttgggaggctgaggcgggtggatcacaaggtcaggagatcaagaccagcctggctaacacggtgaaaccccgtctctactaaagacacaaaaaaattagccgggtgcggtgacaagcacctgtattcccagttactcaggaggctgaggcaggagagtggcgtgaacccaggaagcggagcttgtagtaagctgtgatcgcgccactgcactccagcctgggtgacagagacactccatctcaaaaaaaaaaaaaaaaccatttccagcagccagatctttctaccaccatcaccacccttgtaacaatactctgatttccatcatcataggttcgttttgtctgctctagaatgtcatataaatgtaataatacagtatgtactctttagcgtcttgcttttctccccctcaagacatttttgagattcgttcacattgttacgtgtatcagtaattattttttattgctgtatggtattgatatagttctgtaagaatacagcacaatttgtttatccattctgctgttggtggacatctgaattctccagtttggggctatta

SEQ ID NO: 913986 - DNA, 4001 bp, Homo sapiens
actgagtacttcttggcagtcttgtttgctagtttgccttcatcttcctgatttcttaatgaggaagtgtcctaggactcagtagttccatcttccttctctacctgcagtcactcccttgatgatcctgtctgtagtcatggctttaaatatcatctcagcagatcagggcaaactgcctatttcttaattctgccttcaccagtctaactgctttcagcactcaattaggactgtcctggggcaggagaatcatgcaaaatagaatatagttcttgaaatatgaaaactaatgatagtcctatctccttcattttttatccaatagagaagagctggaggccagggactgaaaaacactgaactgaaagtcaagattggccaattccacaagctagcgccaagatgttacacaacgaatctctctgtgttttgttttcttcatctgtgtaaataagagcgaacatttattgattgctcactactaatatgtcccaaatcccatgccaagcattttacatgaattgcagattgagtatcccttatccaaaacgcttgggaccagaagtgtttcagattttgtgttttggaatgtttgcatatacacaataagatatcttggggacagggtccaagtcttaacacaaaattcatttatgtttcatatataccttatacacataggctaaaggtaattttatacagtattttaataattttatgcatgaaacaaagtttgttttaagtatttgtatgtgaaatattctgcttgtggcatcatgttagtgcttaaaatgtttcagattttggagaagtttagattttagatttttggattcgagatggtcaacttgcatcttatttaattggcacaaccctataattttattttggttactgtcctgtttctacagatcaatcatctgggcttagaaaggttaagtacttgtttaaagttaagcaactaccaagcagcagaacgaggactaaaacccaagaagattcagaattcaaaccggtggttgaactgaatgttagatgtgacgactgtcttcttaccaccatactatctcaaccaactacgtgatactttacaacaaaggggttgatctctttcaacattaaaattatttgattctagtttggttaaaataaatcaactaattttaatgtttgcttataggcacaatattaaacatggatggtaaaagtagccaaaatcactaactccttacattgtaatgtctaaggagtccatagtataaagagcaaacatgtcaatgaatactgagttaatgtttaagaaatgtccacagactaacagccctccagaaaactgtgactgaagtggaaaaaaaatggacattccaactgacattaataattagttaattcattcaattattgagtatctactatgagtcagctacagaatttggaaatttgtatatattttctcatttattactatgtacccttcttagaaatgaagaaattgagacttcaatgtctaagcccataagactagtaagtggcagagctagcagcccaacacaagactgtccggcaactcttttatattgttggaaatagatgcttctttatgttcataagactcattcagtattaagtgatgcattttccattgataattttatgttaagtgaaaaaataaataaatacaaagaaatataagcagccaatattttaaacatattcataaaaacaataaactacttaagaatgaaattagcaatagtaatttctaaagaataagttcatgtcaattacattttagatgtaagtatactcattatttttaaagaacttattataaattatgaatcttacctcttgatgtgccaaagaacaagaatgcaacaatccaaattccaagcatctaagctgattttttaaatcacataaaaatcttcttgaagatctttacttgtaaagtcacctcactataaaatactaagtggttttcctcacaatgatgcaactcaatgtttaaactctacgtttaaaagaacatgttattccaccttatgctctgcaaagtaaataaaattatcggggtgtgccttacatcttatgattggcaatggaaacttccaaggttttgctgtttcattattagtaatattttggttaagcacaaactgagtcactcttgaaagttactttaaggttacaaggtgttagataataagcatttaaaaggtaattttttttttccaaaccaggattaggcactttcagaatatttttccctaactcatttctgtgtgtaagcatcccaattaatacaaacagaccctgctataagatgttccgagttcaataacaaacatagctaatcttttcctcttatctgtgtggcagtataatatgggagttatcattattgttttcagagcccgaatgctgggtccaaattctgcctctgccacttattagcagtgtgaccttgggctagtaagcctcactattcctttccttacctgtaaaatggggatgatcgtggttcctagctcatatgctaaataagatgattgaattatttattgtctgaatagcacctggacatagtaagtactatattacctgttaattttttggtgctgtcattgttcaactatgttaatgggtgtatgggcaaattgatgttcacatatagctaaatataaccttacatgattgtacataggcttcatgatatactttaacgtaatagaaacttgccattttggctactatgttaacttaaagtgatgagcaattcaatctacagatattcttagtcagtttctcaatttttaaacgctcatagaaaatagctaacattatttcttagtttttcctaactttttgtttctgactattataatattaaaatttccaacatttatgaggcacagccttttcataaaaactttgttacattatgcaagaattagacaaagaagagattatgaacaagagtacttccaagtcctggatgttttatttggttgaaacctttcctggtattcatggcagccagtccacactggcatgcagacctgcagtaattagagaattaactattcaacagcaccaagcagtgtgctggacacgctgtgagtgcccacactatagaaaaatcaccctctgaaagcttcactagttacaactggctgtttttttttccaagcaacacctcaagaatcaatgttttcagccatacctgtaagataagtatgaataacatttaatacattcatcagtaggagctctcagaagactacatgttatttatatctgcatcccaagtgacaagcacaatgtctgggacttagtaggtacttaataagcatttttaaattaaaaagtacaaagacctacaatgataatataggatatttttaaaaaccacatccttttctgtgtttttacagcaatttataatgactctcttataacacttaggatattatagaattgttaggtatttacattttactctcctcctccagatcgaactattctgagacaagctgggttttgttcatctctgggcccccagcacatagcaataggtctatcatcacaggcacttggtcaatatttgttgaaagaaaaagatagcattagatttcattgatctcatagcatccaaggaaattcttaccctagagagattatcattctgagagatgaagacccatactttaacaattgtatttaatgagtgtcagatactagtgaatccataaatgcttgctgcaatcgttgtagttctgcctgaaaaatgtcccatacaggagttaacaatagcttttaaaagttcatcacaaaatccattctctttccaaaactcccagcccagcattgccaatacattctgggcctttcagatactttatctgaagcataaagtcatcatatccaaatcttaagaaatgcttttctctccaaagagctcttcttcatgccttccctgttcctgttattagaac

SEQ ID NO: 913987 - DNA, 4001 bp, Homo sapiens
ccctgaaaataagcatttcccttccatccagacagctttccttctacatatagcaaattttctcacaggccagcacttgaatgtaagggacaaggattttcatacgtcctgttccttggtgcaatctagaagtgtctggcacattgtaagtaacctgtaaatatttgtttaatgaatgcctcctcccttcttactttgttttttgtttgtttgttttgttttcttttgttttgtttttgtttggagacagtctcactctgtcgcccaggctggagtacagtggcatcgtcttggctcactgcaacctccatctcccgagttcaagcgattctcatgcctcagcctcccgagtagctgggattaccggcgtgtgccaccatgcctggctaattttttgtatttttagtagagacagggtttcgccatgttgcccaagctggtctcgaactcctgagcacaggtgatctgcctgcctcggcctcccaaagtgctgagattacaggcaagagccaccgcgcccagcctctctccatactttgaatcctttatcatttattctttcaacaaagcgcgtttcttgcccttacagtctgacagacccgacaaccctgcctccaaagcctctgccatttatttgccaatttggctgcaaaacaactaacaacaagcctgggtaatggaggggggtttctgtcccagtcctcagggcaaaaattatactggtcattccctgagggcccagggagtcttttctgatggatagaggtcttcgggtagaaaagaaggtaacacagcaaatagcctgtccaagacccaggaccaagcttagcacaaggtagatacaaacagacctgcaggccctggacaggcagagtcagctccaatatctgattctggacataaacaacgtagggctgaagcacatgaaggctgtgggttcaagcacacgagggttctgagactgggtcagctcaccttctgcttcttctccctcttccctcctaggaatctttgcaagtacttttgatgatgcatcagcatgaattttctgccgcttgggaaatgccttcaagatacccctgggatccattgaagtatggctggatcccggcctattggagcgttggtcagggctgctgcacgtggaaatccagaattgaggccctccaacccctttgcctatggaggtagggtctttcctgaccaggctttgggggtagcagcccagtttggggaagcgggtcgggggagggggtctcttcaaacccggttaaacttcagtggtttagcctagcttcacactccccagcctttcgaagttggagtattacgggaaatgaggggaaggctggtgccatcgggggtacttttgaggagtaggaaacgacaccattcctcagaggggttgcgctaaagattcagcacagccctgctgcggcccacttcgaagggctttaccaaatgggatgctgggctaggaaatggagctttaggggatggagcggagcctggggaggacctgcacataaaccccacatactatttctctacctccaacacagactcgcagaggaaggaggaggactttcgggggtgagtgggaacgccctgcacctgtcctggtctcagcctctcgacatgggggtgctcagcgccgcagctgcggggagatggggcacggccgcagcaggtgtggggagccctccgggaatggaggagtctcgcagctgcgggtgaagtcccgggcaggtgcggtgtactcgccgtgtacgcagctggcgcaggccagggaatcccagctcggggctagaagaaagctggagtgcccgaccccggccccaagagtctctccaacccccagagtcggtccccgggtggggtcgactactggccaagctagtcacccgggggtgggcaggaatagaccacttaccagcagagccaatgagagcggacgaaggggggaaggagggcaaatggccagaatagcttccgagtcagccggaagtgaccctctggaacggttgccatggcagcggctgggcgtgctgcttagcaggggaaagatggcggtgacgggctggttggagagtctgcggacagcccagaagactgcgctgctgcaggacggtaactcgagggtccccacgggctccttcgtttttttccctcagggtccggccctccgggaagggcctcagggcctgggtcggcagagctggaagggtctcggcggtcagccgggccaggtcctgcatttgcagatgaggagactgaggttcacagagatgacatgactggaacacatgtctccggacaccccttagattcctctacaccatctcgctccgctctgatttctgttgctaatatagtaatttcttttacattcattatctcatttgctcctcaccactgtcctgagaggctaattttcaccccgttttacagaagaggaaactgaaatccaagaatgttttagactttagagaggagagaggcctgggctctagttccgactgtgccattaattcaccacgggcgcttcagtcggctcctttacttgtttgggcctcactttcctcatctataaaatgaagtggatggactaccattgttatctctgaggtcctttccagctgtaatatttttgttaagtgaacttctaaatattttctgtgtctttaggggagctagagcaagaaccaagggctgtgcctggaagaagtgggcacaggggcatggatacctaacttttccccaccctaggattggccgatgccggcccctttgtgcacttgggtcctttctggacccactgggtagccaggatgaattgcgtctgaagttcctgaggctttcaagataacaactggtgactcatgttcacaggcaggggccaatcagggaagcctggagtttgtggaaattaaaatcatttactcgttcgtgcaacatttaggaagacttttactatgtgccaagctctaaactagaacagaaagaaaaagatatgttgtcccaggactcagagtggttgggaaaaacatgtacttaaataataagaagcgttaaatagaggttgtagtcttgtataaaatggtaggaaagagtgaaggtgtaagtgacatctctttggaggaagacccaacagaagtgatgatgtttctgggtcctaaagaattaataaggtcaggcacagtggctcacgcccgtaattccagcactctgggaggccaaagtgggcggatcatttgagctcaggagttcgagaccagcttgggcaacatggccaaacctcatctctacaaaaaatacggaaattatggccggatgtggtggttcacgcctgtaatcccagcatgttgggaggccgagtgggcggatcccttgaggccaggagttcgagaccagcctagccaacatgatgaaaccaccccatcgctactaaaaatacaaaaaaattagccaggtgtggtggtgcgcacccgtaattccagctactctggaggctgaggcaggagaatcgcttgaacccgggagatggaggttgcagtgaactgagatcacaccactgcattccagcctgggtgacagagtgagtgagactgtgtctcagacaaaaaaataaataagccgtgcatcatggcacatgcctgtagtcccagctacttgtggtggctgaggccagaggatcgcttgagccagcgaggtagacgcagcagtgagccgagatcatgccagtgcactccagcttgggcgacagagcgagaccctgtctcaaaaaaactggaaaaaaaaaaaaaaaaaagaattaataggcgtttgctgagtgaagaagaggggatagctattcaaagaacaactcacatataaggaccctatgtgaaggtgtgaaggtacgtgcctgattactagaggaataacaaaatgtttagtaatgttaaagcagtcactcagtcagaacaaaccacctataactatgtcaggtactattctag

SEQ ID NO: 913988 - DNA, 4001 bp, Homo sapiens
agctgctagaggatttttttttttccctgagacagagtcttgctctgtcacccaggctggagtgcagtggtgcgatctcagctcactgcaacctctgcctcctgggttcaagcgattctcctgcctcagactcccaagtagctggggttacaggcatacaggcatgcgccaccgcacccagctaatttttgtatttttagtagagatgaggttttaccatattggccagtctggtcttgaacttctgacctcatgatctgcctgccatggcctcccaaagtgctgggattacagacgtgagccaccactcctggcctctgctagaggattttaattgacaatacccttaatttgcactttgacagaagcactttctctgttttgtgagaatgtattatatctgactgggcgcaggtgtacaggtgggtgtgaagggccagtgtcgatgtagagctaccacatgggagaatgctgcattcacctaggtaagacacctgttctagtgaatggcaaccatccacacagctgcccaagcaaggcattctgtatatccgtctcaaggtctctcgacctctaattctttccaccatgaatcaagagattttccagaaggagaactcttatcaagatactctcctgttgaaaatccttcaaaggttcctcactgcctacaagatgacttcttaacacagcttcaagtcttctgcttccttctgatcacctgtgttctctccctcaggtctgctccttgaaaaaagcagtttggtctgctttcttttgcctggacccattatgtgctctcaaaaccccctggacctacccttgtcattgcacttgtcgtacccagtgttgacttgtgtaccttctccaactagattaggcagtaaaagttttattcagaccgtatctttaacgtccaacactgggaataacgcgcagtatcctcctcagtgtctgctgtaagaatgatgaattcacttttttttttgagacaccgtctcactctgtcactcagggtggaatgcaggaggttgcccactgcaacctctgcctcccaggctcaagtgatttttcggcctcagcctcccgagtagctgggaccacaagggcgcgccaccacgcctgctaatttttgtatttttgatagagacggggtttcgccacgttgcccaggctagtctcaaactcctgagctcaggagattcacccgcttcggcctcctaaagtgctgggattacaggagtaagccaccgcgcccggctggattcactttcttaccgagaactctaagaaggagccaccgcctaataacgtatttctgaaggcaaaagtccggatagcagctttatttctgacactgccatccgtcggcctgtggtacagctttctagtgggcaaccccatccttttggtaagcaactactgcctccgtgtcagacgctctgcggctgacagaattagagacagtccccgccccagattgctcccctcgctgcagcaggggatagttcgctgaagaacagggatcattgtatgacttcaggagaatgcgagctttggcccagggtgcacaaatcattaaggctcaggccactccgacttctccgcccaagtccagggacctctcgaggtgctgaaatcccctcagcctgaccaatgctctttgaccaacgctggtagttctgggcgctggtcacacctatggactactggccctccccttcccattgcaccccatctctgaccctgcaagacccgggaccgctgacctcggaccccttgccctatttctcagccctttggccactcttactccgtcttacattttcttggccacatccgtctcccggaactgctccttcaccatgatgaccgctgccgggacgcctccttggcactcgggaggccagattagagaaacgatgcccccagcacctcctggggctgcttctggactcgccgctaacacatctgcggcatcctctcggccaccgtagagtgtcccacgtgtccgcttcctcttccgctactcgcccgcgcgtctgtctgtcaagagagacttccggcatgccttttttttttttttttttccctttccccgcaccgtcacctggtggcgcttactggaagccgcaccgaggcgtgtgctgtattttaaaaatcccatttctggtcaatttctccacgtaatcagacacccgcagagaaactgcatataactctttgcctcaaggcttttagacaagcagagggccaaaacttgcataaaatggaaaatcatcatcattaacatcagtaccatctaaattaagagcttctaattgttttaagggaaggtggaagctaaaatgaaccggcccatccaacagagggcactatctgtggaggaccaacaaaggaaaacagagcggaaaatatgggcgcacatgtgcctccagttcatgaagttatttggagggaggggggaagaattaaacttacattattgattacaaaaacagttgaaaatctgttagagtgaaaacagccatggtaatctacagaagaaaagggagaatggaaagtaaagatcattcatgtcttgaaataagttgtctacagtctgtgagaacttgtgggaggtgatcctagtgtgatatattagtgcatgagcctagcaaggaaatcacatcaccacagggcttagcgcttagaattagaactaagtcctcattatttgtgagaaactcaaaacagaacttaacaaaagtgtttaacaactttcaatttttaagaagggacgctatctcattttcagacgccatggatcctcactagcaaaacacaatgtcacagacaaacgaggcatatcaggtttttctaactcatttcggtactccatcacttaatcatgaaataatgttgactatatatatatatatatatatatatatatagtcaacattatgggttttttttgttttttttttttttttttttttgagacggagtctcgctctgtcgcctagactggagtgcagtggcgaaatctcggctcaccgcaacctccgcctcccgggttcaagcgattctcctggctcagcctcccgagtagctgggactacaagcgcccgccaccacgcccagctaatttttgtatttttagtagagacggggttttactatgttggccaggctggtctcgaatccctgacctcgtgatccgcccgcctcagtctcccaaagtgataggattacaggtgtgagccaccacacccggctctgatgtttacaatattataccaacaagggttggatcgtgtgtgacttatctagaggttaagagcaaaagttatgaaatcacagtgccatcatgggagtctagctttcaccatttaaagttgtgtaggcagccaggcgtggtggctcacgcctgtaatcctagcactttgggaggccaaggtgggcggatcacctgaggtcaggagttcgggaccagcctggtcaacatggtgaaaccccatctctactaaaaatacaaaaattagctggggttggtggtgtgcgcctgtaatcccaggtactcgggaggctgaggcaggagaatcgcttgaagctgggaggtggaggttgcagtgagccgagaccatgccattgcactgcagcctgggcgacaagagtgaaactccatctcaaaaataaaaaaaaataaaaaataaagttgtgcaggccgggcgcggtggctcacgcctgtaatctcagcactttgggaggccgaggtgggcagatcatgaggtcaggaatttgagaccagcctgaccaatatggtgaaactccgtctctactaaaaaatacaaaaattagcctggtgtggtggcgcattcctgtaattccagcaactcaggaggctaaggcaggagaatcgcttaaatccgggaggcggaggttgcagtgagccaagattgtgccactgcactccagcctgggcaacagagcaagactctgcctcaaaaaaaaaaaaa

SEQ ID NO: 913989 - DNA, 4001 bp, Homo sapiens
caagtgcctgtaatcccagctacttgggaggctgaggcaggagaatcacttgaacccgggaggctgaagttgcaatgagccaagatcatgccactgcactccagcctgggcaacagagcgagactttgtttcaaaaaacaaacaataaaacataaaagtccctttagggccaattgtgactttgcagtctgtccagccctttatcagttttaaagaaattgacaaatgtaatattataaagcttaaaaaagtttatttctattaaggaaggataaagcacttaaaattggataactatgtagtgggttctaattattagtatttcttaagttccagagagttccacttgataaaaacagttacttcagctagtgccaaattctaggagtagctttggtctcccataacggccaccaaatattaattgcaaataaataacctaagtaaaagcagtgtgtttgttctgcatatatagcttgaagatccacccctcaccttcaaaccagacagtcacctctgtaagcctttcctacagagaaattctggagccaacactatttccagaaaaacagtcccatgaattattagtcaaaagttactggactgtccttgctgcttaattgcaaaattaaataaaatggagagtggggggtagttctcacccttcctggattttacctgatagttaacctttggctagatgtgtaagctttacagttcgctttccttttcctcccgcaccaggctactttttgttccttcaatgcctattcattcgtctcctctactccccgcttccccttccttcatacaccaactcagagttcgaggcacctgcccatttccttccaaataaaactgtaaagaggttacaatagaagcgcctgtggtgacacatttacgaacgcctccgttatcgcccataatctactcctagtagctgggggtggggggagtaagaggataaagaaaaaccccaagtagctttcctccacctacaaggccaaaaaaacgtggtgccctaaggagcgtggagggcgccagcatgcagcctcccggtttccccgtgcagccctaggtgcaggacccggggtaggtaccccctagacgccgaatcctgcaaaggtaaaaacttggcactttctcagtcttgtttccagactgacgtcatctgtttgatttgagggaaacagctttctgtttcataaggagcattcccagcatcggcgctgagggaaaacaggcggcgcagaggcaggagcacgaccgggccgcggaggaccggtccagcgccttcacagacggctcccgatccgggcctcagttttcccgtctgtaaaacgagggggtggacttggctccgctcagcgccgataatctgagctacggcggcggaattaaggtctttaggaagtcactgccccccccggcccggagtcgccttttctccaaactgagcaatcctcttacgggaattatgttacttccaagcacctttctagggtgggtcggtgatttccttttcccaacagaccctgtcagagccagacacctgcaaaactagctgggcccaggttcgggtaccccgaggcgtgacaaagggaccatctccgttcagcggggagggatggccggaggcgaccctcgccgccccgaccggcggcggcaagtatgcaatgtgaggccggccaggccccacaacgcgcccgaggagacgggcccgcgtcggagacctggggccgagcgcgggccgcaccctcccggggaggcaaggcccgggaatgaatgggcggacgggcgcggaggggccacgggccgcagacactcactgaggaagactcggtactccagggagaagggcgcggcgcgctcctcggtgctgaagccgctcatagtgccggagtcctgccgccgccgctgccacagagccaccagcccgcacgcggcgccgactgacaaggagagagccccacgcctgcgcactgcgagcactggaccggcgggcggggcggggagcgcctttaacgcggctctgctagtgttcccacccccgccgggccaaccccgtgcgcaggcgcactccgccaggcccgggtgtccgcactccccagccccgcccctcgggcccagcctccgcgatggcagctagggctcagaggctgggccacgtggctgccgccggcgctggttctgttccttcggctttgggctctgacccgggagggcaaatgcgcaggctctaagcttggactagctaggagttgaccgccgaccacgcacacagggaactcacctttgattctcacacactcctccccgcagtcctattccttatctcaaaaggcgttgataagtcacctgcttccccagacaggctctgcttgcggtcttaaaggtgagcatttttctgatccgtcgtaacaaagttgagccatattactgacacccctagtggctactagtaaggtactcgcttctccactttctataatctctctcactccgttgcttatctgggaagtgaagataataatataactatttcatgagttactgggatgattacccgagttaatacacgtcaaatgcctgaagcagagcctgtatctttgtaaacaatctggaagttgttactgtcaccctccccagtgggggaggatttacgcccccgcgccccccgccccctccatcccccctgccaccctacttaacccacctgggtctccaggggcttcagatggaagcactgggaaggtccaggcgtgagctagagtcccgtgaaggagtgttctcagggacaggctcttctgatcttgatttcctgtttatattccatcatatcaggccagaccccaaaaactaaagtctgattgaggcagtgggaaaatatttgcatcacttacctccccaggaatacatgtaaaagaaaaaaagtatatccacaatcctaaatataaattagcaaattattattcacatttcaaagaatgcctggttttatttatttatttattttaatttcatggccaggatttctttaaataactttttctagaacattaaagataatgtgccttaatgacattttgaattaaacccttttttccaaacaatgtctattgtaaaaaatgaatattaaatgaaaacctagtaagatctccagttagttatggtgtcgctccctttgtctccatccaactcccaaacctcactgacacccattaattttcagaaggctgtgattcactgattttttgaacatttcaccacactgttttactgctgttaaaacagaagggcaggaaaaaaaattagcgaagcaatagtttagtcaataattagggtcaaggccaggcgcggtgacttacgccttcaatcccagcactttgggaggccgaggtgggcggattacccgacgtcaggagttggaaaccagcctggccaacacagtgaaaccctgtccctagtaaaaatacaaaaattagctgggcgtggttgcacgcgcctgtaatcccagctactcgggagactgaggcaggagaacacttgatcccgagaggcggaggttgcggtgagttgagatcacgccagtgcattccagcctgggtgacagagcgagactctgtttcagaaaaaaaagtaggatcaagttcaaagaatattttaaggggatgctcttttgattgaactgctctatcacttttctgcctttgagcagatggaaccaattttcttggaaaaacccagactctcatctgtgactgacttaagaagacagcagtgatgcaataataatgttctacatacactttccctttgcctcctgccagctcagagcaagataataaagtctcactgacctccagacttgcacactggctcttgtttcatcgaatgtattcagagagccagtcattatcaggtctggtaaaacacccagccctggtgaattgtaactttcctttgcaggcaagtgtagtgagcccataggcccaaaagga

SEQ ID NO: 913990 - DNA, 4001 bp, Homo sapiens
taagagcctatctcactttatctcagcattcttcctacattcacccaacaaatgttaaattctactgtgcactgaaaactagtttatcatttctatcacataataatttaatgaggttttagcccatctgccaattagaaactgtccccatctgatcacacagcaatcattagttttaacgtacattccaaaggtagaaaatagagtaggagaagggaagagtgttttgtttttccaaatgcatcaaaatccaactgaagttctcgttccttcttcccagtgaataacaccagtgttcgggcagaaggcgggagaggggggcttgcttgcatctgggggagctcatggccttttctgatggtgtgaataaatactctggatgaatttaatccctgctaaagaaaaacatgcaagaaagggcatttctttccatgtgtatcccctgggctgcccagaacagaagtcatctttgacacagcacacctgccatggatgactccagattgaggcagaaattcaaagagggcctcctgtttggctcgggagggcttttccagaaacgaaaacaaaaacaaacaaataaataaatgcatggcaaatccaaaaagttcatgtaactttaatacttagaatgtggcagaaaacatccatgggcagagagggggagagaatttggctcactgatggagggaccagtgcaggtgtgggtgcctaggtgacagcagctcacgggaggctgcggggtggctctgagctggtgttctgggctcaggtctgaaagagagatgtgacagctccctgcagcttgggccctggaagtcaatgagcggtgggtccctgggcgcacggaggaggctcaggcatctctgaaagaacctgcgccaccaccccttcttcttttcgggatcgctgttctcagtgccagccgctcaaagccaccctgggcatttcacggctacccctggagggcctccgcccccaaagcggacatcgaccgggcacagagctccagggtgtgtgtatcccaccccggcctgcagccccttgacttctcaagcctccacagcaacagtttctcagtaggagaagcgccgcaaacgcccgctgggaaaacgctcgccaggaccgcgggcgctaaagccagggacacggaaggagtctggccctgggcacagcggggaggaatcggagacggggccaggggtaaagacttccaacgtgggcctcaaagatcacacagaaggagaaacttcccgagggcacgggccagggtgcgcgtccctgtttagaggtgcagccctggatcccccgggcaggtggtgcggggctggcgacaggcgcgggcccggtgagacccgggagcaggtctcagcctcggcgcgcggtggtcgctccgcgcctagggtcccaggaaggagagaggaagggtctctcttggtcccgtaggacacgttgcgggcacttggcggggaagggacctcgaacccaggccccagtgggaagcggctgcgcaaactaagttagggcacagagaggcttggtcggttgttcccccgcgtcagtgcgccctgcccgcggtgcgccactacttacacgaagactccgaagagcagggctcgcaccccgatctcaatggccagctcccgcatggtgcggccggagcagctcccgcggcgtcagctggtgctctccgcggctcccgcagctcggccggcgccggctcgccagaccctgggaggcgagggaggcgcgctccaggccgcgggcgggggcggaggcgggcgccgggcgggggcaggcgccggggagggctcagcctaaacctcgcgcctcgggctccggggctccgggaagccgcgccggccgctggcgatactgcggaccccgcctcctagtgcggagccggggccgcctcagggactcccggatccctctccccaggagccgcctccgcctcctgggcccgcgccgggcacccgcggaccggggaggggaagcccggggaagccccaccgccgccgccgcctccctgcgcgctccccgcctcccccgccagtgggcggcccctgggctccgcgccagggcagcgcgctcgctggggctctgcccgcggcccctctgcagctcctggtcctgcctccgactcccgctgtccgggctctcgctccctggcacacgcacgcacgtgggcatgtagtggacgatcgctctggggattctccagggctcagggcagccctggccaaccttgctcccgtgttcggccctccctacaccgttcgaacctgaaattctttcttttttctaggaagttccccagagatcactcgcgggcttcgctttgctctcaggagatgccagccagggtccagggctccggcacagagagagggcaaaggcaagcctggctccccgccatgccaccagcgccaggtggcccctggggaccgaatcctctctcccccaccacctgtcctccgcccccagcagcttggggctgctgaactgtggaatatgaaaaagctcctgccaccgtccctggcctggccggtgtgtgggaagtcagggtcgctcgtcgctgacacagcattcaaccagccgtcagccaggcagcaggtagaacccagagcctcatcctcaggttaagagccaaaagcccaaccctcgcagcctaggggtcacgacctccagctggagcccagcaggagcttggatttgcttttcccaaaccggtcagaattttatttacttttcttagaattttgacttcttggcttcactaatttaaaccaagcagacatttaaaatgcaaaacacacagtgattataaccattaggttgttcctggggagcccaggcctctcttggattttaggagagacccagccaaaattgtgtgagcagaggacacggattagaaggtggttcctgggactaaggagctatggctcagtcctggataaaagggggagcaggtagaaagaacttaggaggaagcccttggcatcagcaaagggcaaacagaccctacctccaaaggaaacacgtgcagatcagagatacctgagcccagatatctcagggtctagagagagagaggcagagggagtaggaacaacccaggctctgtgtgggagggactccagccctgaggcaccacaggcaggagctgtatctgcattcctcatcactctatgcccagtgcccggcacactgtggatacctggttggtacttagtaaatgaataaatatttattcatacatatatatatatatatatggctatatatatgatatattcattcatatatattatatatggctatatatatgatatatatatacacgtatatatcatcaggcacatggggtgtcaggtgcaggtaaggtaggaaggtcttggagggaggaggtatgcttctgtctcctctgtatcttgggcccagcaactaccttggacataacaactcccacggattggcaaagtgctgtaggagagcccataggcagcctagtgaacactgatgatctcggtctgagattgtcaggtggccatattccagcagggcattctgacaatagcccctgacattggggcaccacttacctataagcatctgctgagtttgagtacagcctgtgcaaagttgtgtgctgggtgagacgattcataatctgtctctgccttcaagaagatggggagctgatagaccacaaggagacatcagggaagtatgcaaagcagtattaataagtcacaaacacatgcttcagaaatctggatcgctcagaggtcagaagttggaaccacatcatcagtctgagatagcctgaggacacagcctcacggaaaggagctggcttttggaccaggcgcgatggctcatgtctgtaatcccagcactttgggagcccgaggcaggaggatcatgaggtcaagagatcgacaccatcctggccaacagggtgaaaccccatctctactcaagatacaaaaatt

SEQ ID NO: 913991 - DNA, 4001 bp, Homo sapiens
tgtgacaagagtacaggctcatggctgtgctggccagcagggcacggactcaagggctgtgtgcccatcaccctgcctcactgggcaccaggagtggggaagtctccgggaaatttacatgtgccttccactggctctgaggctcccagctactatgagagaggagggcagagccaacgttgaggcccagagagggatggcagggctgccccagagcacccaatggctgagccacacatggagctcccatctgtcaggggtctctgagccccgactcttctcatcacgccacccaccttgccctgcctggcccccttccctctagacccatctcagaaggccccaggccctgtcttaccagctgtctttgggacgacatctgccttcagctgttgggggagaagaaggacaaaagaggatggtcattggagaggcaggtgaaggtgggtgtctctcagcacccacccacccccacagtggccaaggaggctaaggaagaagcacgtggacattccattcccattattgccaacccccatgggaggcagctctatcatttctgggagccgtttcctgaacccaaggctggaggaggtggccttggtttcctaatctgtcagaagagatgacaatgctatcttggcctacttctgtggacacagctggcagtgctcccacagctgggcccaaagcatcagaaattcagggacaagagagtgtgtctaaggtagaagccagaccagctcctccattcggggttgggaaactgaggcccagggagaggcatgagggtgtggggagggaaggctgaagccccatcccagccagcctctaccctcgaagctgcaagacccaccctggaaccaaatggaagcaggaagggtgtccctattttccagaagaaactgagaatgaagaagaaatactaagggctccctgggatacgggccagtcaacacaaacagacccctgctgtcaatgtgtggccgacctgaaggctccactagggctttccctctaaagctaccctggtgactgtttcttactttgctttagaaaagacccaaaaacagagttaggggaggtgctcagtgtggcccccaaggacagtggcaggggttgaggcgccgggcacactgtctctgagtgtgtcccgactcgcaggaggggcattctggggtccaccaggtggccggggcctgaggcctactgggcccgcactactgctggaaaccacctctcgctccatttcccagcacccccagtgtgagcccgaccgcaggggcggggccggagccaggaagcgctccgtgttgtgcaagggccgccacgtgagcacccgctgggccacgacgctcaccccaagacccccgacacccacctcggagctccggatctaggctcagccccagaaggctcctggagcccctccctcgtgcccgggccggcccagaggtgctgagccctccctctctgcgatctgaccttgagctttctcctccacacgtgccctccctcccgtctcccccgctccagtgctccgagggaggccggaagaaatcattctgacgcccattctcagaaatggggaaactgaggcccagagctcggcatggggaggcccaaggtcacccagcgcgcccggcaccgcgccgcccggggcccagggctctccccgggcccgtgtcccgcgcccaggccggccctgcgagcggtctcacctccagcaccacgcggccgagcggcttcccgttggcgtccacgtccaggtacacgagcgggttcccggaggaggaggaagaggacgggtcgccggagcccttgctgcaggcgcgggccgcggggaggcgcagcggcacggagcgcgggacggagagcaggccgagccagcgggagccgcagcgcagcgccagcatcgcgggcgcgggtcgggcgggacacgggcggggagaacacagaactcaaactgacgtcgcgcgcgcccagaaggccgagtcccgcgcagccgcgcgccgcagcctttattggcttgcccaggttcccggccctgcccccgtcccgcctcctccaggcctgtccgtggactacccctgccggccgcagcgggcagcgcagccagccggtggggccgcggagcgtgaagtgctttgaaacactcccgcctccaggcccagagacccggagaacagacacctggcaaaaggttgctggttccatgtttattaaggtaccagcagatttttttaaaaaaagaaaaactgctaaaacgtaattaattccaaaatatgagcatctatacgttgcaatttgaatataatagcaaaagtctacctttgagccctttgcaggtaaggctcaggccaaataagcttccctgctgccctaggtcctgcagtctgagagggttagagaaaggtgagatgagaggcgggattagtgagctagaggcgcaagagggaggagataagctgagacacctcccatgatgccccctagcctgcttgtcccggcctgggcctgtctctagttgtttctggggaccagacctgcttctagcaagactgaaaacgcagcctgggctcatcatgctcctttcaggcccccagccctccccaggactgggtctgatccctcctcctaggacccacactgacagccccggggcagactgccagctgccccctcccatcagcatgcaccctgggaggggactcagtggggagacccacagcaggagcatttaaaccccacgtgctgaaagtgggcttcccagcagccagagccaccctcactgcaaggtggtgggaggtctgcaataaatggatgccacgcagggacctgagagagcatctggcccaacacttgtactgtccccaggggaagctgaggcctggacacaggaaggcactggctagggctagggagccctggagtattgctaccagcttgcaccagtgctccaggcctctctgggcctcagtttcccatctggagggtaagggtgcgatcatgctcctcatcctgcttttttctcgtgtctgttcttaggataaaatgaacgagagagacatggatttgtcaactaagtactgtgcctgtgggcatctgtgatggacagagtctggactgtctttctcacagtttgggattcagagagctgcggtctcagttagaggcctgaggggtcagagaaaggggtggggctgagccttggaggcaggtgggcaggagtagggaccagctctggactgacctgccccagatcctgaatgggctcatgggaacaggtcaggcagcaaaatgccagccaagcaaattcatgaggtcagagcagtgccctagcttcataagaatgctagcttggcctctggaagtttggctagcttggcttctggaagttcatagcccccttctccgattcctggcctaggaggggcctaggcacccagtgaagcccaggtgggatgcattccaggtcccagcccagaatggggcctcactctgccctggggagcagcccctcctttcttatgattgtgccctgaggtgagcaggcctgagtggggagcccacttgagccctcagcacatgtcccagaccttcctctaccagtgcatcctgtggatttgagagtggaggaatcacgccatgtgccttgtcatgaagcttccttaaggccccaggcttccctgcggccagttccaggccctgagctcacaggaccttcagccacagcaggtagctcagcgtaccctgttgtttctcaagcctgctcctggggggactcagtttatgccccatcctgatgaagcatgagcatccccaccccaggggagtgctgccttcattcacttgaccacttcagttctcagaaccctttcccagctgtgaactctgcctgagagacagctctgttttgcagatggggaagccaggccccaggggctggggagtgaattgcccaagggcaggctgttggaactgggaccagtctgtctgac

SEQ ID NO: 913992 - DNA, 4001 bp, Homo sapiens
ggggtctcagtttccccatctgagaaataaaagggttcgatttgattatctccaaggcagccttgagaactgtgtgctctgttctggaccagtggtcctcaaacctgtctggtcactatgtctagggaattcattttctttctttcttgtctttcctcctttcctccttccctccttccttcctttcttcctctctctctctctttctctttcttctttctttccaattcctgggactcagaactactgaggcagaacttctggggctagggccaagggatgggtatgttcttaaagcttcccaggtgattctaatgaccagacaggttcaggagccacagttccagaccctctgctccctctggctacgttggcttattttgctgctaaattgattgacacttctctggtaaggtaattcacttgaaaaaaaaaaaataacatgcaacagttttgagagtgagaaggctagagaagaagtcaaagaatcatctttgcactttgattatcatgctcttatttttcacaaataaccactgaaatacaagccaacaattcatatgcacttaaaaactatataattgataattcacctaaagagatgcccatgacaagtccacatttaagtggaaaaactgattacctgaaagttggagtgttttaaaatatacattttatatatacaaacttataaatattgaaaaactctataggaaatacacctttcctaataatttaataattattatttctgggtgataggattatagattatctattttcgtttttgttcttttttggcattttctaatagacatttataagtagaaagacaataaaaccatttaaagttttaaacatgactatgctcagcaatattaaaccaagaagcatctataaagaagacttttctctgacctttagccctcatcatatatttccaagcttatggtattaagatttttttccctatcttagccttacaagtaagaggtgtgtgtatactgtacacgacatttctcagtctggctttagtaactctcctcacagcagctctaaacatgtatgcaagtggtcattatcacaaaagtgtgtaataacactcgcagaatttactgtgttagctctggggtttttctgggagatctgcaaacttagaacaaacaaatgaaagctaaagctatatttgtgggtctaataatagttaataggcaggatttttagagaagtcttctgctaagctatgtctggagaagctatttaaagtagttttatgggaggttttttttggtttttttgtttttttttttttactttttgcatttatagaaagacagttttagtttgggtgatttccttggaactttaagtcctggacaagagttaaaagtaatcgtttgctcaaactcttgagattttgctatggcaaactgtgataagaaggacgaatgaatgcaaacgtcgtcctgtaatttttttcctccaagctaaaccacctaaccagcaatgtcagagtgctgttctcaccacttcagctgcccgagtctttgggacatttgtgcaggaccaaaagaacagccgcatccatgagaaaatcctaactcaagctgattcacgttaagataatttctgctttaagatgctgattactaaaataggctctgcttaagaaatagagccaaatttctacacctccaaggcctctcggttgccagattcaactacgcagtcagtccacttgtcctccccctggggtgtccatttccagagatgatagaactgaaacgccccccaacttccccacagctgcgcgttcccctgtgttcctagcgcgcagagttgcagcgaacctacctggtgcagctcattaggcagagaggcggcggaccctaaaagccagcacccgctgcctgcacaaattcgaaccacagctccaggccttgcccccgcggcggtcgctgggagagactgagggcccggcgcctagaggccgcttatctgctcccaagcacgtgacccgatccctgggaccaatcgccgggcctcgagccccagggcgcgaccaaccagcgcccagctggggcgccagccctcgccccggcaacgtgatcgccccggggcgagacgtgcagagagctatctgggcatcgcggggaggttctgggactccgcggccagctggaaccagccgcgtaacgggaaccctgggctaggggccgggcaggcacgtaccgcatgcagcgggcgccggccaagagagagcgcagccagcctcgcccaggcggggcgccagtgcctcaggcttggggcggctgttacttgggaatagctttgtgggtcactgcgggtgaatctgcacacagaagatgtggctcaaaccgaatgtgtatcgcatttgaaatgtttatatcgttcattacccggtgtatccgcatttctccctcaccttagcctgcgcgatcccaaactggctgcatgcttttcgattagtatgagttcacagatgcaccacacagtagacagctgccgggaattaccaacttatctaacaaatgttgttaggaaagcatacgagccccataaaacaccaaggtggcatttaattaaaagacacttcgtatttctgtctattcttcaattttctcccctgcggggaacactaaagccggaagtgaaatgacccttttcacacatacagccggtcaagaggcagcagtcaacccaaaccccttactcaattctgacgtcctttggcagtggtgtggaaatcaaaatgttaaaataaaatttaaaaaatcacgccgtatgtttcatgggccttctgagccactcactttcgctgaagtttcattattttgattagtttgaagaatttttagaccatcatttacaactgtaaaattaaatgtctaagtcaagtctaaattatttttataaaacccacatcctagttttgctcccctaattgagctatccattagtcaattaaaatatacaaaaattcctatgtcttttaaacaactgtcaaacagtggaattgttaaaattattagagtgaagaaaaaaatcacactgaatatcactgggaaagggacttcatgcctgggttttatttttgaaatgaaatatctaactaatggcaggtcttctagcccctttagctcaaccaaaactagctggaaggtctttggattgacacttactagctacacgaatctaggcaagttctaacctcagtttcctcatgtgtaaaacagagatagtaacgttctgaagatgaagtaagatggtgccaatgaacagactcagcacgatgcccagtgcctgtgttccacccgggctagttcccaagtttctacttgatctctcagctagagtttttactctatcacctcaaggcgcctggtgcctgagctaaaatattgagaatagctgctgcttgttgagcctttactctgtgccaaacactatgtgctatcaattcaatcctcacaacaaccctatgtgatatgtccaattattaatcccattttagagaaaagaaaacggagacactgaatggtcaggaaatctgcccagtggatcacttgaggccaggagttcaagaccagcctggccaacatggtgaaaccctatctctactaaaaatacaaaaattagccgggcatggtggtgcacacctgtactctcagctactctggaggctgaggcaggagaatcgcttgaacccgggaggcggaggttgcagtgagctgagattgcaccactgcactccagcctgggcaacagagcgagactctatctcgaaaacaaaaaacaaaaaaaaaacctgcccaggttctcacaggtagagcagggattagagcctggctgataccagagcaataaccgctgcaccatattgtcttattttaatgacccatcaatggttagaattatggaggtaggaggtgataggcatcaaactctttatttcacagatgaggaactgaaagcttaga

SEQ ID NO: 913993 - DNA, 4001 bp, Homo sapiens
cacttgcttagcatatgcaaaatcaaacaaaaaaagtaatgcattttaaagaaataaaatcaataaactttttagatcacataaaatgcacctagttttaatctcaaaccatatatattacgcatttcttagagcccagtttcacctgcttaataacctaggccctgtttgtcccagggggcgcagaatctccagatgtcctcaggggtcatgtgccaaaccagacactgccagggagaggtacagggtagggaagagggagtaaaagttcacggggttgggggggccgagatggagggaagtgaacaggacgtctgacaaggggcttttagtaacttgaggcagggaaggtgtatttggtgcaaacaccaatcatttttaagaaaaggttaaaggtttacaatgttcagtaagatgtatgaacaacaacaaaaaagtcactatgactctgaatctgaaatattaatcaaacttctaagactcgaccaagttctccattcaacggtgaaaaaggaaagctacatagctttttaactttaaggtgacaggtaagcttcatgggaagctggggtgggaggcacttcccagttccctcccaccaccctaaaactttgtgcctgggccaatttgagagtatgatttaaggaaaagaccagtgaacttcaagtaataccatgaagttcaagactaaaatctggaatagagaccttaaaatatatcagtagagaaagtagcagtacctcacagtaaaattcaaggattttagaaccgcagaaagcagaccttaagaatcagggagccgaggcaaccagctcgctcaagagcgcaccgccgatgaaacgcagagcctggtgggggccgaggccccgacccagccctaggcgcgttcccagcctctgggccattgtgccgcgctgcccgagcgcacgatatggactccgttcccgtccccggctccgccgcggtctcctcagttccgccccaggcaggaggcagccccgggcttcggttccgccccgggcaggaggcagccccaggcgctgggttcggaggacccggccgcccgtgaccttggtgacttacataagtcccgccgcgggcccgacgcctccgcccgtgccccgcgggccgggacagcggacagaggacggccgccccccgatcacggcccccagctcggcccctggcccctgccccgcccggcccccatcctcctgcctgccttccacggacgcttggggcccggaggccgcgcgcggccgggctgggagctgtccgcgagggtcccggggcggggcgcggcgcggggctcaccttcggccacgtcctcgtcgatggcccccttgacctgcgagaagcaccactggaagtcgttgccgcccgcggggcagccgccgcctccggctcctgcaaacacaacggggcggtcaggccggccgcggcccccgcccgcccccgtggtccccgccggcccgcgcagacccctcacctgccatggcagccggcggcgggacgggcggggaccgcggcagaccagggagacggcctccgcgccgctgcagccgagcgctcagccccggggccgccaccaccgccggcgccgccgccgccgccgccgccgccggggagggatttttttcccttttcaaaatggcgcccaatgcccgtcgccccgctcgatgacgtcatcgccctccgcctcctcggacgggcagcggacggggcgggccgcgggggctgccgggggcgcccaatgcgcctgcgcccggcgccgctcggctgtaggggggaagggacgcctgggcgactgcggagggaagccggggtcgccgggcgcaggccagctcctcggccctcggccctaggcctcccgcagtggtccggtgtgcacccggcgctccccagaagactagcgccgccggccgcccctactctccggggactcccggagagcctaagctgcggccggacacgccttcagggcgccgcttggccggacacgcccccatcccgcatcggccaatggaaacgtgggttctccgtggaaccgccaatggaggacgcgcttggcggcggtgggcgggcatgtgggccggcctcacctgagcgcgccgtacctgagcgctgcctcccgcccactgcccccgacgcggagtctcgctctgttccccgggctggagtgcgggggcgcgatctcgactccctaaaagcctcgacctcctgggctcaatccatcctactgcttcagcctcggaagtagctgcgagcacaggcacgcgccgccaggctcgctgatttttaaattttttgtagagacgggggtctatgttgctcaggctggtctcgaactcctgggctcgagccatctgccggcctcggtctcccaatcctgtccacctccctttcggagcgcaccgttgctcaccagatggctaccttaggggttcttggagctcccagtgcagtcttagggaaacagggccgatcgtttcatttgcgggtggttttctctggcatactgagcgatcatgggtgctcctcgacttacagtggggctaccctccccgcaaataagcccttcctaagtcaaaaatgcatctaatacccaatctacccgtcgtaaagttgaaaaatctgaagtcgagctatcatcagggggactgtccctatgggattgatgtccggaatcagaacttctttcagggtagctgcggtgggcactgatggtattgcaccactaaaagacagtcgctgcaaatcaggaacattcgtccactccattaatattatttattgacagctcctgccacgtgcggcacactccacagccctgggggtgagaggttaacagagcagagaaatctcagccctggtagagcttacctttcagtgggggagacagacaataaggaaataaatacataataagtcggagctggagagaaaaatcagggaagaaggaaatgtgtatggggagagttggagtcttgcacggggtgactggagaagactcaaggataaagagcaaaccatgcagacgtctaggaaagcttggccaggaaggggagaccaccaagtgccaggacaggaaggagggccatgcctggcatgggcaggaggcagccagaagctgcgtgggtgcagagtgagtggaggggaggccaggggttggagtcaaggcagggaggtaagtggaggaggatggacagtgggcaggccatttaggggacttggactctgaatgagatgggctcatgaacagaagacgatcgtgatggacttgggcttttggatgctctgctgagaatagcttgtggggacccaaagaggggaagcagggagaccaatcaggtggccagctgggctgaccaggcatggggatgaggatagagtggtgaacatggggtggggtggtgagaaccagtcagatttcagagaaaagtgcttcgacagcagagcccctgggatttgctgatggaaaagatgcggtgtgagagaaagcagggacttaggaatgcctgctctcgggtggtctgagcacctggaaggatggagtttctgcagcagaaggcacagctgggtgggggcggtgcagcccgaccagaggttcgctgtcaacacatagtgctgttgcacagacaggctgggagcacacagggaagtcagagccagagcatcaaggtgagagcatttagaggtcatttcaagtcaggaaactgggtgaggtcacctcaggagggaggacagatgggggacaggaccaaggacagagccctgaaggggtgaggacgtggaggatgagtgagcagcctgcgaggtgggctcctggagaacccatctccaggatccactgaagacaggagggagtggctgctctgtgatgctatgtgatgagtatacaggagtgaccatttggttgtagggactgggaggccattactgacttggacggagcggtggctatggaatggactcagatcacaagtttgcagagggctctg

SEQ ID NO: 913994 - DNA, 4001 bp, Homo sapiens
cagtctggtgaaaagtgcccagggaaatgaacacacaacacagaaatacagtcagaaaatgaagaggtagccaatgtcccgttcccacccccacaaaactccaggatttcttgatagaatgaatgtctgcattactattttttttttaagatttctctgtattaaggattccataaactcgttattcagctcattccaatgcctggcccaactggatatactactaacttaagcctaggtgcaaatcagtgttttgtttttgtttttgtttttgtttttggagacagggtctggctctgtcgtccaggttggagcacactggcgcaaatctcggctcactgcaacttctgcctctcgggctccagtgattctcgtgcctcagcctcccgatccgctgggactacaggggcgcgccaccatgcccggctaatttttattttttgtatttttggtagagaaaaggtttcgccatgttgcccaggctggtctccaactcctgagttcaagcgatccgcctgcctcagcatccgaaagtgctgggattacagatgtgagccaccacgccaggccaaattagtattattcttttaagaaccgaagaaggctcaggttgaaaatttttaattaaaaaaaaaaaagaaaaaaggtttccttgtttttaaatattttaatggaaacatatgagtcagatttcaaaaagtaggctaacggtgtttaaatactgtgccagtgtatttgagaagctgaatgaaaacaaaagtacctatattttaaaaataaatacaatacaaataaggaaaagttcattctacgatttcaatttatcaatcaagctacatggtaaagagaatcatttcaattgtttttcacctccacagcagtgtttgaggttggtaggctctcccaggaagcttggaatcttaagcaactctcaattagccctcaatttctctattttaaattaatctgctgacctgttgtgggtaaacatccataaattctgccctggctgagaaacatttaactttttcgtctaggatgaatgtgtgggtgtgtgtttgtaagggaggggtaactccttttgaccaaagtgttgatggttttctaagtaaatacttgctatccacaagaattttttttttcgtttatgctgctttttctccctttctgcactataaaggctggccttccaattcctgccccgacccttcaccgtgatccaatcccacaaggttcccctaatttctgctccgggtggcacctgacggccaaaagtgaacccctgcggttgtcgccagctagacgcggatagggcggacgactgtcaccggggagcaggcgtgggccaaagccgaggtgatttctgactgctcactggcgggcctcgcgtggctgaaggtctccgagcccctcggttcgccccggcaagccagaagtgcagctgtcgcggggcaggaagctaatcgcggcccctgcgccgctttgacaggccgagtgaagagaaaacgggctcactgcagctaacagcctcaccccttgggctaggaagccacggaagcaaaacctccgccccggcctgaaagcaaccgggagaccgcggaaccactgccaccgactcagccctgcccagcaggggcccgcccaggggccactccccaagggaggcagccagtcactcgcccgcccttccgggcccactcccgaggggacggtctcccgcccgccctcacacacagctagctcttcaggccaggcccccagggtttcgtccacctctcacctttgacgacgcggtcagccccgggagggggcggcgggggcgggggtgggggcggtgcagcccgggccggctccggggcggccatgctgggcccggggctcggctaggctctgggccgggcggggttgggggcgggggcggcggctaccagagccaagcggcggcgccgccggggaacatggcggaccctctttccctacagaggggctaagaccggcatgcactgcgcgtgcgggggtgggggcggggtaggctctagggacttgggcaaaattactgaagctaggagagaaacaggacgaggccaagggatcaggttaaaattctttgcatgcagaatgaagaatgaggaggtgctgcgatcgaacgactgcgaggaaacacacccgctctcatggcattcccagtaaactgagaagacgtgattaaacctcaggatctcctactaatagagaaatgtataacgatttagctaccagatctgaatactgaagggttggtaggggaccagagaatagaggaagcattgtaggttctagagtggagaagggaccatccaaaatggagtttgaaagagaattctggcctttgtgtttagagtctggaattgtcaagagtctgaaagcacagaataagactgcagctagagcaatttaggcgccatagtttgtcaaaacaggtaaggggaataaaggggatgacaccaagagatgtgcaaagaatctgaagaattcacctgaaaaggatacaacctcctcctggaaggcagaggagtaaatagggaattggaaattaattccttatttctgcacatgcacagaatctgggcccaggtgacttatggaacctttatagagaccacggtgactgacactcatgggaaagggggtagaggggcaagaactgactgttcatcaaaaattattagatgagtgtgtccacgacaccaggagatatgttgaatcatggacagggaccagcatatccactaagctctatatatcttgatggtgcaggatccaagtgggatggaacaaccaattcctgcccatcctcctgctcaataatacatgtgctcagaatctgttcataatgcatggtggtaagtaagtagtagtccgaaggtccaaggagtacctttctacctcttctttgtgtcaatttctatcctgagaccccaggaaaagaggaagggaaagacccaacaatggattttttccaaaaagggaacccacaagctattttttagagggaagagtctcgggagtgaggcacaggtgaaaatggatctttctggcatggaagggccataacaccacaggggaagggaaagggagaggcccccacggaaggagaggaaggaagggacaggaggcacgtcacaaacttataagatagagggaaggcacctggagtacattgatcaggagtgagtctgtaagaagagcttgaatccccagaaaatcttcctaaggaggggaggaaggaagtgtataatgtactgagtactgaatgctctgtcaggaaagggatgggaaacatcctagcagcaatactagaaaggaaaggcaccctattttaggacccattgattcccaccttgattgtatatccttcaactcgtctctggctcctcacttccactcagtcaaaagccacttcatatatttatccagacttccagccccaatacaaagaaagcaagagcatacaaagggaagaatgacaaggaattaaatagaactgtcttatagatttattaatgaaaaatactttacaaaaacagtatgtttggcctaaaatagttcagctgactctgagggtttacattgacgactgagcaagtggcaataatggctgtgttattgaggacagaaggctgtgttagtgtgcctgactccatctgttcaaaagggtgaatgttatgttggcagctccgcattctaggcctaaggtttggagggcacagggaatgctgacaggccataatacctgggcaggggggctgccctgatgatgtcatcagaaccatgaccacagggctacatgtccccccaaggatgggagacagggaagacaaagggtcaggtaatagggataggtggataaaacaaagagtagaagttgggagtatagtagggaacagaggatgagggctcaggtggaggtggggacataaagcatccaggaataaaatgtgaccttaaaatcctaaggaatg

SEQ ID NO: 913995 - DNA, 4001 bp, Homo sapiens
aataactggctgactgaccagctcacatatacccatctttggttttcgggggaagggaatgacaatctctccatgagatcctctccaatcccaaattactacttaactattatagctggatcttggatccttcctgactctccctgtgctatttgggaattcagtgatgggtgaggtcaggtgtgagggtgtgtctctgactggacacctgatggaggtgaagatgaatggttcatagagagctgggcattgccttgagattctggcctagaccctggggctctggtaggtaggcagcaccagccccaaaagatgtgacctctgagaaagtaggggagaagggatcagcgctcccaaattcttgccccagaaaccattctcccctgggcaagggcctggattggtctgccggacctgatattaccaggcagcctgcagcccaactcccacctagtaacacacaaaaaatgctgtcaaggactcagcttaattgtttaagagaggtaacagttcaaactaattcctgccccttctaccctgggtggaaacttttaagaagccctccactgtagagtagaacaataacactttttgaaggccaagaaaaaaatatctaacagaatcctcctcatccagtgtatgttcaactgttgaacatgttgaacagttctcaaaccgcctccaacttttcccatccccagcaaaaaatccgaagagccttaagtacggaccaccccagtttctgcgtgtcagattacaggagcatgccttcccaaaagagatgctggaggaaaaagtgaggagaggattccctttccctttcttaaccttgtcccaggtgtatgttgacactccccataccccttgaatcactaataaggcaagactgcaaggcaaccaaaacgccaatgcccgtgactcacaacccaccccaagccggtcagacggaagcgccacaaactcactcctccacaacccttcagcctcagccctctaccctccccatcacactcagccatccgcagggaacaaactcccgcaacatctggagagtccttcaccatccgcagtggagagacgttgcggacccaagcagcagggaaaaaaaaaacctccaaggctctgaacaaagttgactctagcagcccttaccttccttcccggcccgggcctccagccccggcaggagatggcgggacccgtggagacacacccagttcgcgtcagccaggctccaaggccgatactagatgcccgacagcctgggacgggagccacgtggacgttccttccccgcccccacgtggacccgctgcctgcgcccccctccaccaggagcccgacccacgtggatgcccgggccgcctagagggggaggggaggcagacaagttctcccgggaaaattgctcccccaaccccacgtggctccgaaaagggaactgcggcgccgggctcggggagcctcactgggcatccttacatggaggtctcagccttcgaccccaagtccgaacccctgacccccagccgcgggttatgtttccgacaccccgctctccccctccggcgtcccccaggaatggccgtagagacgctgcctctgcccgcctacccccagcaaacggcctagggcccacttgctccggcccggctcccgcggccacccggcatcgactctcaggcgcttcctctctttcctgtggcgtccacgtgtcaccgcccggcacacaccgctttgctgcctgtcgcgggccgccagccaacctctcacctgctcgccgccgctcacagcgcccaaagtcccatacggcgcttggcttcgacttccccaaccactgccgcgggctcccccgccagggtccggaccggggcccccactcgggggcggcgcgactccgtctctccgtccccggcgcgccgccatcttggcccctgaacacccagcgctgctctgatcgctggcgccgcctcgcccagccgattgtgggaaaggaactacaactcccgaatgacactgcaagactacgaatcccagagagccgtgcggcgagacccacttgcaccctggaagaaggccctggcctcgcgcgaaggttcctgggagtagtagtccctttaagtggggaccgtttggcactagctgcaggcatcctgtagggcttagttttgcgttacactgggataccgatttagggagcgctcagcagttagggggaaagttaacatttgcgtattttattgtcgttaacttgtccaactgttggaacgtcctctttgacgttctacctgctgtacgttcctttcaccttagtccaagtggggccaagtgggcctgtatatgttttgaaacaccaccccctagtgggcacttgcgctccaagcgctaatcctcacctaatcccatattgcggcagtactgcaaacttaatcggaaaatgtcgcgttctccgccctctctgctactactcagaaacttacgttgccttctctatcaaatttgtttcttgctgtttcaggtctccttgctgttccctaaagacaacaggtgttctcctgcctatatgtcgacctggaatacttgaacctcaaaacatttcatgccttatttaatctaggaaaggctttggttgtcctagccaagagggatcccgctctgcgtttctacggtccatcactgtctctactcttcattcatttgccacttaaaagctacttcatatttgctatttttaaataactttttacaaagcacaaaaattatttcaaaaagtacaagactgtttagaggaaaaaaagtagtaggcctgcaaattatagttctactgcccagatttaaaccccttgttacttttagtgtgtattcattgacgcttttttctatgaatggaaaaatatataggggcacaaattggtgatttgctttttttatgtaacaatatgttaatccactcactagctaaatatttactgagcctttagcaccagttctattttatgaatgtattgttatttaaattatattgaagttgtttctggccgtggctcggtgactcacacttgtagtcccagcactttgggaggctgaagtgggtgaatcacttgaactaaggagtttgagaccagcctggacaacatggcaaaaccccacctctaccaaaaatttaaaaattagctggacatggtggcacacatctgtggtcccagctactcgggaggccgaggcaggaggattgcttgaacccaggaggtggaggttgtagtgagccaagatcatgccacagcactccaacttgggtgacagagtgagacttcttctcaaaaataaataatatttaagttgtttacagtttctcactattacatattattatgatgaacacccttgcatatgtcatgtacatgtacctttgcacttttgtgcaatctttctgtggaatagtttccatgaaattcaagtgccgagttaaacaatgcatgtatttgaaatacagtagaaaattgccctttagaaatattgcatcactatacatccccacacatgttcatgaaaagagaggaccttttctggaccttttcttagatgttctttcttttttttttttttgttagacaatagggttttactctgtcacccagggctgcagtgtggagtgcggtgagcaagagtgccgtggcagatcatagcatagctcactgtgatctctcaagctcaaaggatccatctgcctcagcctccagagtagctgggtactacaggtacacactgccatgcccagctaatttttttttttttttttttgagatggagtgtcactctgtcaccaggctggagtgcagtggcgcgatcttggctcactgcaacctccacctcccaggttcaagtgattctcctgcctcagcctcccgagtaggtgggactacaggtgcccaccaccacacccagctaatttgtttttgtatttttagtagagacagggtttcaccatgttggccaggacg

SEQ ID NO: 913996 - DNA, 4001 bp, Homo sapiens
tgcgtgtgctgtgtgtgtatgttatgtgtgtttgtgtgtggtggatgtgtgtgtatgttgtgtgtggtgtggagtgtgtgggcttgggtgtgtgtgtgtgctgtgtgtgcatgtatgtgttggatgtgtatgtatgttgtgtgtggggtggagcgtaagggtttgggggtgggtgtgtgctgtgtgcatgcgtgtgtggtgtgtagagtgtgagggtttgggagtgtgtctgtgtgtgcgtgcgtgtgtgatgtggtgcagacttgtctcttcagggccctgcgggggaggcttgcgtctgtcagggtggggtggtcttggggtggggcggggctctgggtctgtacagggctcagcagggctgcagtcaagggtgtctggggcaggcgcagtggttcacacccataatcccagcactttgggaggctgaggtgggcagatcacctgaggtcaggagtttgagaccagcctggccaacatggcaaaactccgtctctactaaaaatatgaaactgcctgggcacggtgactcacgcctgtaatcccagcactttgggaggctgaggcaacagatcacttgaggttaggcattcgaaaccagcctggccaatatggtgaaaacttgtctctactaaaaatacaaaaaaaaaaaaaaaaaaattagccaggcgtggtggcaggtgcctgtaatcccagctacttgggaggctgaggcaggagaatcacttgaacctgggaggtggaggtttcaatgagccaagatggcgccactgcagtccctccagcctgggcgacagagcgagacactctgtctcaaaaaaaaaaaaacaaaacttagctgggggtggtggcacacacctgtaatcgcagctactcctgctgaggcagaagaatcagtgtctgggacaccctgcaggcctggattgcagctccacagggacctttgcccgttctctgggtgactcagccatggtgagaggtcaaagggcaggggggatgccccggacagcccggggccgggacctggtctggtctggttcgggggccctgcttctcctcaggacccccagctggttctgatgctgggcaggggctcttgtctgggcactggaccccaatcccactgccgtgctgcctgggccacccctggtgcccacctcccatgacacacagcctgggggcctgggattcgggtcacggtagcccctagaaaggtggtcggtggtgactgccaagcagcctggctgtgggatccccgtgggtcccctctccaggcaaacggctctgggcaccaaagggtccccaagctacccagaagccacctctctacaagggagaaacaccaggagaggaggggcagggagggccctggcttagaggagggggaagaggaggagggcacctccacaggagcggggagaggggtcccccacacaaggagggggaagacagacacccccacagaaggaaggcagcctctgattccagggtccagcgggagcccgggtgcttccctgagctccagatcacagctcccagggtgacaccacctcagggcagcccctggctcctgcgccccagcccctcccctcccccagcccccttccttttgggcagtcacaggcctgctggtttcagcctggcacctcccctttccttgttccgggtgggggtccctgggtgattctccaccaggccaggggaaccaagaggcaagtgcactcggggccacagaggaggtagagcctggtggcagaccccagaccctcagagggcccctccttctccctcccacccgcacactcccctgaaccaggccccctggagcgcagcacagctgggccccctctggctaagggccaggcctccaggtttgggtggggtggggattggggctcagggatggtggcattacctcctcatgtctggggtccgcgtctctgtagagagtgctcagggagctgcagtggctgatcccagtatctggcacccggcccagctcctcctgcccaggcccaggccaattggggctttgttgctgccgcttggggcgtgtcaggacagaggtcggggccagggatcccaccctgggtagctcaggtgactggctctgcagccgcccagcccactcgggcctggatctgagcggggacacccagctgcctgctcagggcctgccacacgactgaggaagaaatttgcctttaaaaacatgcttgttgaccgggcgcggtggctcacacctgtaatcccagcactttgggaggctgaggcaggtggattgcctgaagtcaggggattgagaccagcctggccaacatagtgaaactccgtctctactaaaaataaaaaaaattaagtgggcgtggtggtgggctcctgtcattccagctactcaggaggctgaggcaggagaattgcttgaacctgggaggcggaggttgcagtgagccgagattgcgccactgcagtccagcctgggcaacaaagagcgaaactcagtcaaaaaacaaaacaaaacaaaacaacaccaaaaaaaaaaaacctgcttgtcatgaaggctgaaccgtgctcacaaccaaggcaacttggaagggtgtcgtgggcagctgtccccagctcagctgaagcacttccttcctcaggtgggcgtgacaaatcccccatccagccccagcccacctgcctgtcacacctgcccctgcccaccacctgcggcagggcgggaccagctcagctccaccaccgtggaaccctcacccccaacgccaccaccttccccaccccttccaggcgctccctcctgtccttccttactgggcacaccagcctgaggagtcttgcacgctgtgtggccagggcccgctccacggggcccagtgccctcattgccttttttattttattttttttgagacagtctcactctgtcacccaggctggagtgcagtggcgcgatctcagctcactgcaacctccgcctcctgggttccagtgattctcccgcctcagcctcctgagtagatgggactacaggtgtgcaccaacacgcccagctaatttttgtatatttaatagaaacgaggtttcgccatgttgcccaggctggtctcgaactcctgacctaagtgatccgcctgcctcgggctcccaaagtgctgggattacaggcatgagccactgcgcccggccctgaccaccttctttagccgtccctggcacaccctgtaaaacaaaaacacaattccaatctccgcctgaccccacccgactgatggaccctccctaagcccagggcattccacggttaacctgaaaactagttcaggccataatgggaagtgggggtcagacaggcctcattgtacccgcctccttttggaattcaggcaaaactgaccagcattaacattaaaacagagaccttaagactaatagaacagactctgacaagaaatagtcccttttattgattctatctgcatatacttggtctccacaacaccttatcttaaccctgactttcccttctattgattctaggtctttagataataacttaactcttttgaccaattgtcaattggaaaattactgaatccaccaatgacctggacacccgccgcctttctggaccaaacccatgtacatctcccacgtactgagtgatgtctcgtgtcccgaacatgtatcaaaccagctgcaccccaaccctctcgggccacacatgttctcaggatctcctgggacggcatcatgggccttccgtcactcatatttggctcagaatcactctccaagtattttacagggtttcactcttttcctcgacaacccccagcgggcagctactgttgggggctctgagaccgccggcctgcagggtatggttctcccgaagctgcatgttcagacacaattggaggccgtgcttccaagggggtggagtgagggccctcaagaaaggccaactcaggaatttccaacgtgacccacagcgt

SEQ ID NO: 913997 - DNA, 4001 bp, Homo sapiens
agactaacttgtctggggtgggacgggggcagtgctgtgttcctgaaagctcccaggtgactctaacgtttggccagggttcagagcccctgtccagagacgatggttcatttttcctttacctggctccagccaagacatgacataacacttactggtgctgaataattttgcttgactggaaccagaacacaataaatttgtcaagctcgttcttccacatgcagcaggcctgagggctgcagtggcagaaatgccccaaggaatggcactcacatgtcgggcaacctggaaagagaaactttttattagaaagttttcctggactggtgactgaaggctgaaagggcatcgtgccaacggtggtttcagctgtccctgttcctgtgaaccaaatagcaaaccccaaactctaagagcatggattggatctgcatgttcttaacactcccttctgcttccttctcctaggagactggaaggtggagaggaactataagaacacaaagaccggctgggcgcggttgctcacacctgtaatcccagcactttgggaggccaagacgggttgatcaccaggtcaggagttcgagaccagcctggccaagatggtgaaactccatctctactaaaaacacaaaacttagccaggcggcggtggcgggcacctgtaattccagctgcttgggaggctgaggcaggagaattgcttgaacccgggaggcagaggttgcagagccgagatcgcgccattgcactctaacctgggcgacaactccgtctcaaaaaaaaaaaaaaaaaaaatcagaaactccatgcgcttaaagcaacacagggttcagaagccaggggacttgtgcaggcttttcccagcactatctgctgagtatgttctaccatttcaaggttttccttagaaaaacaaggcccctccagcaccagcgacaagtaaacaagaagagccaaattcagcctctgggagtctgttaaaggctcaagggacatgtttactcaactttttttttttttttttgaaacagagtctcgctcttttacccaggctagagtgcagtggcgcgatctcggctcgctgcagtctcgacctcctgggctcaagtgatcctcccaccttagcctccccaggagcactgaccaccatgcccggctatttttttttttagagacaaggtctcactattattgtccaggctggtctcaaactcctgggctcaagtgatctgcccgcctcggcctcccaaagtgctaggattacaggcgtgagccaccgcactctgccggtttgctcaactttaatgttcaaaatgactcaggagaacgaaaggggctgtgttgaaccccaccagagaaagccgtgtaccaaaagagcacgacgcattgcccacagttaagcaggaaacagcagcagaaacacgcgggagtgggattgggagggaaagcctttgtgagttttttagcactttgcgcgtttttatccagtatttaaggggctgttcacagcaacgccttgatgtaggcatcattctttccatcttaagtacacagtctgagaaaggcgaaggcgcttgcccaagatcacagggtcggtggcagaatcagggccaggaccttaagtggagatgggcctggggaccggggacgccgaaagaggagggactcggggaagagaccgcgaggatggagtggggaagggcggttctgcgcaggcgcatggaaccttcccggagggaggcctctgggtccgttacccgcggaaaccctccaagaagggcgaatggccctcatgcccagaagcgcggggtcctgtctgagaagcacgttcccggagccaccagtgtctccacgcctgtccccagccgacagccactcaccgacgctcggagcaaccgtcctacagcagccgccatcttcagtgcactcgggcgccacggggcgggcagagacgcaggggcggggcctacggggtggtgagcgggccctctgctggtgggggggcggggccggaggagccaccgcctccccgcctcctggagaccctgagggagaaattccctttaaggctgaatgcttgggcaagtgacacgtggttttcctactgtcgccccaaccttaaaagaacgaatccaggcggggcattaggtatttgtttccatatttcccactgttttgttaaccttgtgtggattactgtgtctagtatttctgtgacaggatccctttcttatttcagcctcaggtagagacttccggcttctgtatgaaatggaattaattacaaatgcagttttagtccgttaataagctaagtgggctagacacatcaaggctttgttggcctgaaatccgctggaattgtgtgtggtctaacatttggcctctcttcccaaaattgggaaaactgggacaaatttaaaatttggtttttgtctattaatgaagccaagtgttcagtggtgagcatagtacttgaagcaaccacatcaaacatagataaaaatcacaccgtggccttacagtaagtgtgacaaattgcagtcttggagctggtattttcttttctcttttcttttcttttctttttttttttttttgagactgggtcttgctctgtcgcccaggctggagtgcagtggcatgatcttggctcactgcaacctctgcctcccgggttcaagcgattctcctgcctgagcttcatgagtaattgggattcctgagcagctgggattacagccgcctgccaccatgcccagttaagtttttgtattttaagtagagatggggtttcaccatgttggccaggctggtctcaaactcctgacctcaagtgatccgcccacctcggcctcccaaagtgctgggatgataggcatgagccactgcacccggtctgagttggtattttccaatcactagtcattcaattagcaacttcgtttctcaagtcttcttatcaccaaatatcacttactattttctttaaattggctttcttttttttttttccttttcttttttgagacagagtctcactctgtcgtccaggctagagtgcagtggcacaatctcggctcactgcaacctctacctccttggttcgagcgattcttctggctcagcctctcgagtagctgggattacaggcgtgcaccactaaacccggctaatttttttagtatttttagtagagatggggtttcaccatattggctaggctggtcttgaactcctgacatcaggtgatcctcccaccttggcctcccaaagtgctgggattacaggcgtgagccaccacacccagcccagtatattttctaaaatcatctcaggtaccactaggcgccaccctgggtaccagtccccagatgtggaaaggactgccttggatgtgtggggacacacgtttcgactatttcacctcacaccttccttgtgtttgtttaattggttttaattatgtctgtgtttagcagatgattgaaaaggagacaatcattttggagctcaaaatcgtactgtaggccgggcgcagtggctcacatctgtaatcccagcactttgggaagctgaggtgagtggatcacctgaggtaaggagttcaagaccagcctgaccaacatggtgaaaccctttctctactaaaaattgcaaaattagctgggcatggtggtgcatacctgtaatctcagccacttgggaggctgaggcaggagaatcactttaacctgggaggcagaggttgcagtgagccgaaattgaaccagtgcactccagcctcagcaacaagattgaaactccgtctcaaaaaaaaaaaaaaaaatactgtagttcacaatggaatattatttatccataaaaggaatgaaatactgatatatgctacaacacagatgaactttgaaaacactagctaagtgaaagaagccagacacaaaagaacaaatagtgtgtgtttccttttatatgaaacatctaaaataggt

SEQ ID NO: 913998 - DNA, 4001 bp, Homo sapiens
gccatgcaccaggcacgaacttgtggctgcgcttgcactctgagcgtgcggctgtgtggcacggggcagggacgggcaggggcagcagcaggagaaggatgcccaggaggagcagacgggctgccatggagctgcagagacagggggcacttgggctctgggaagccatgggtggagggatggaggatgactgctcccttcccccacagccacagattatcagggcacatggaaggggaggggctgagatatctcttaagtcattattcaatgaatgtcagagctggtatgtcccttataggcctggttcagcccccacattgtacagatgggcccagagaggggaaaagcccagccaaggggagcccctttttagaatttccctaaggcctaatggggatctaggtggatggctctgtccccaggacacaactgtgggtggtggggagggggctgtggccacagaagaggggacagagtagctgtagcaggtttagggaggggtctggggacctgaggaagccttcattctgaagaagtgtcatttttggccccagaacaagccaccctttgcccaccctgactctcactctgtttctttgtctctgtcactctctctaacctctctccctcccactgagcccttaacagaattggaagagaaatgaggtcctatattgcacctattcttctcattttccctttggggctctccctctgagctttatggaataacatcagcccgaattctagaataaaatctgccgacctggccaggtgtggtggctcacacctgtaaaccgaacactgtgggaggcagaggcaggtggatcactggaggtcagaagttcgagaccagcctggccaacgtggtgaaaccccctctttactaaaaatacaaaaattagctgggcatggtggcgggtgcctgtaatcccagctacttgggaggctgagacaggagaatcgcttgaacccaggaggcggaggttgcagtgagccaagatcgtaccactgcactcccgcctgggtgatagagtaagactctgcctcaaaaaaaaaaaaaaaaaggggcagacctgaccacacccttggattttgtgtggggagaggcctcgatggttgctcttcagatcctttcttgctgcccctcccctctttgccactccctgccaagctctgtggccttcggcagtgacaggggcccccctattgcctactatggacaatgattgtctggaaggttcttcctaattttaaggtgtttctggggccttgcctgggcctgtttatgatctggaacctcctttctctaaccttacccaagcctaaccttatccaagctgagctcttcaaaggcctttgcccttgggtaccacaggttctgagacaagagggctatggagagcccccattatagctggagcctcctgccctgcccaaaggtgtgacttgaagggtggaatttcaggcagcgtggctcgccccagggaggcaaagaggccaggggaatcttcaaaggccctgggctcatcccagctaggaggcgggcacagtcataaccctaatccagtgaactcagccctcatcctgactctcatggtattctgtcccagggagcctctttccagctttcttagaagctttaatgtcagcacttgcagggccttagaaactgcacgctacctcttcatttcatacatgaggaaactgaggcccagggtggacacagggctgcccagcgagttagtgatgggcaccgtctgtgacccaggtgtcttgtcttataggtcacagcacttcctgctccatcagcctcttcccctccacccagggccccaggccccccaatccctgctctctccttacctggaatcccgtatagagaagcggctacacagatggatatcctctcttcaccgaggctcctggaatggtggcatcagccccccaggcagcccactgtggctccttgcaccagccaccactcacatcacttctacttcctgccccgcccccagctgtggtcacaggtcctttgtgctctcccctcccacaagcacccaccctgtcctcagccctcatccggctccccactgacagccctcaggaagcgagcagcagggccagaggctcatctgccgagtagagctgctggggctcggggactcagggcacacaggcggaggagggcggggcgctgaggactttgagactcggccctggtgttgatgaacaggccagcagggccatctccttgcttctgatgcacagcatcgcatgtgtgggatgtaagaggcaagcagaggcggcggctcagagcatgggcctacacgccagaccgccggggcttgggcagctcggttatgcaccagcagtgtggactggtagggttcttcagcctcactgtgcctcagtttcttcactgaacaattgggattgtaggtcatgtagaccctaggggttgttgtgaagtgcttggaactgtgcctggcccttcttgagtgtcagagcctgtggccattccctcctccctgagtgggagaagagagatgttgctctaatcttgccatccacttcctgctcaacctacatcccaccctagcccaggctccgaactccaagcatgttcctcgaacaggggctcctgctcctcgctttgtgaggacagccagtggcctccacgctggctccagccctgctgaggtcgtgggtgctggtgagagtggtctggtagcaccggaggacatgtcttctgcactctgccttgcttgaggtcagggtggggtgaggtttccatgggtggagtgactcacagggcactggggggcaaaatcacacggcttctggggtgggggcagctgggtaagggaggaggtggttctcacaacttgttctcataactgtgtatatgatgggaagaagtggccgcaggctccagaccacatgtgacatcatgtctcatgggtcacactttggggctcatcccttgcgtttatgtccctgcttccgtccctgctcttacaggaacaggggcttatgctgtcttctcggaatctggccccatcttctctccgcagtgtccccaccctcttctagaaactgcagcctcctgatcactttccagctgtcacccatggcctgacttggatgctgaggctgtgaggagtttctttcctgaccatgacaggaaggccggtttgagggacatagaagtcctgcaaagtatctgcgggaaaagagaggcaaagtctaaacaggttctgatcccagcttcaccagaaacttaccgtatgcctcacggcgatagatatcaaccccctttctgagcgttagtttcctcacctataaaatcaaagagaggactttggaattctacacatccttccagctaatgataaaatgtacacttggcaggtttcaagtggcttatgaagtggctaatgcccaagagatgctagtggttgttaggggatccattaaagagccgaaatgacattgagggtgatgactgtttttgactcgtttaactgatgacagctgtccttctgaaacttgacacttgaatgtgcattaagcagagtttttcctcagagacacaagtttcaacaagtgcgtaatttgttcaatcaccagacaccatgtatatggttttctttagtaacaacaatctttagatgtaattcacataccatataattcacccatttcaagtatatgattcaatggctttagtatgttcacagagttgtacagccaccgctacagtcaattttagaacatcttcatcactttccagaaataaaacctatacccactggtggtcatttctcatttctttttctttttctttttctttttttttttttttttgagatgaagtcttgatttgtcacccagactggagtgcagtggcatgatctcggcttactgcaacctctgcctcccaggttcaagcgattctcccacctcagcctccccagtagctgggactacaggca

SEQ ID NO: 913999 - DNA, 4001 bp, Homo sapiens
ctcctcaagtaacagttgccatcccgaggcaccacagcacaagacagtagcggaaatgaacatgacaacgcggatggtgggtgacaagagtcttgcctggatattgacatttttaaagtgtagaagaaaatcgcaggtcactgaaacaaaggctgatggtgcccagcaggttactcttgaaatcagaaacagaagttcatgagaggcaagaagacagaaacaacaactgaaaaacttagagtggatcgctaacttgcaggagctgtgcagctttggctttgcaggttttagaagctctccctacgccacgtctttaaatatatgtatgttcaatcagcaggaggaagggactaacaagagccttctgcggtaagcacctgcatcaaacaatggcactgatctcagagggattttaaacagctgtgcataaacttcaaaagtaatttgcaaccatattagtaaatgtcactcttcttcccgctagacacagcacttttaaaagagattaagcatccgcagtaagcctgccattttacaagggttaccaaagataagttagggaaaatatgaagatgatgattcacaaggtcggggtgtggggtggggtgggggacccaggaccttaggaatagggcttgtctatcacacagcctcgggcaagaagggcccagtggggaccatggcttctagggagcaaaccaagggaaaagagcaacggagtggaccctccaggcttcttgcctctctcacggagcctcacgaatcccagtggtttagaattttctttggcaaaagaaaaggtcaaagaggccggagttgacagaaagcatgggcggacttctcagatcttgtaggtggttcttaaaagaattcagcaggcttgaggtgtgctctcaaagggcaactggaacgtcaaggacttggacaccaggcacagatggttcatttcccatggacaggaagagggcacggagtgctccctcttccctccaccttctccagcctagtccccctcagcctgtgccactcctgaatcatcttttatagcaccacgtccagcccgcacaggggcaggacagcccagggaacaaggcagtcctgtggcgctctccttgcagaaatgaccggagtctcccaatccagccagcccgtggacctctcttcatgcccacgggggagtgcacacgcctgtagcattcaacagtcactctcccattgataacggtggctctcgaaaatccaataccacaaagatactttattgcacaaactttgcttggttaacctggccctcaaagctggggaataacctcacttgaggctacaggaatgagcacgcagatttttcttttttttttttttttggtatctttcaaagacctgcctccccctcccccaggcccttgaccagaaacttggcttgtttagaagcctgagcaatggcacccccgtccgtgctccaatacattcccagaaaaggggttatgctcccctgtggacaggataccatctccagaaaacatgtttcctcacgcattttttttttttttttttaccaagaatacaaaaactttccaccttcttccctccccgcaggccccctttcgttcaggtgagaaggaaaagggagaagaaaggaggaagcgcccccaggccggcggcccccacccggctaaggtcgccagcatcccgcatcccgtgcgacctgcgtcccagaaacccagcggggaaattcttcccggtgcgctcttgcgcccgcttggttccatttcctactccgcctgctcacccggcagccctcaccccttcccggaggctctccgaggggcccgggtagcccttctcgccacgggtctcggcccctccagcccgctccctcccggcggcggcgcggggcgcggggccctacctggagcgagcacggcgccgctgctgcccggtggcgctgggactgcgcggggactgcgcggggactgcgcggggactggcggggctggcggggctggcggggctggcggggctggcgggcccggcgcactgcgggtgcgcctagaaggcggtgcccgccagggggcgctcgccagcctccccgccagcccggcctcccgggacccggcacctctagccagggacgcgcgctcggtcccccgccgtgcgcccccggtcccgcgcccaggctcccgcccctggcctccttaccagccacttgtcgcccagctgcgaactggagcgggaggcggcggccggagggcccaggacagccccgggagggcggcgaggcggagcaggagcgccccggctccggccacattctcagagtcaggaaaaggggcgagaggccacatgtctccctctcgcccaactgaaaacgaaacggcgctccagcagattgggtggaaagagctgggtctcttttctctgtttttcacgctagaaagggcttgtaaacattgttccttttaaaatgacctaccccaggcatttgtttgggcacacttctgtcctggggtcatcgttcctaggtggcttcggacctgggacttttcctgtatctgcacattgtcgttttatacacaattgccaaggtgggactgctttcaactttactgtgcttgaagctgcaaaggtaatgttgccgccgtgcgtgtcattttaggactttttatgccttgcgggtaatactaatgatggtcacagggaggataaacggggtggtttctttttctatactccatgtaactaatttctcattcaggttagaaaattatatgtctggttactaatattcttactgaatggtttccttgcaatgatgacaccaaataattaaaacgtacttgattaagacttttgttgctgtagtgtactaagatcagattaatctgagaagtaaaatagtaattttttgtccttttttcttttcttgttttgagagagacattaaaaacgattaaaacaaaacaaaacaggccaggtgcggtggctcatgcctgtaatgccagcactttgggaggctgaggcgggtggatcgcttgaggctgggagtttgagaccagcctggccaacatggcaaaatcgtgtctctcctaaaaatacaaaaattagctgggtgttgtggcacgtgccagtaatcccagctactcagaaggctgaggcaggagaatcgtttgaacctgggaggaggaggttgcagtgagctgagatctcaccactgcactgcagtctgggtgacagcaaaactctgcctcaaaaaaaaaaaaggtttaacaaaagccaaaagttgaattagcagccttctgatcatgggaatgtaggatgtcaactaaaaagaacctcagaggttgggaaggcagatgaaaaactgaggccccgaagtgtttcaagacttgattaaatcactcaggtctgcactaggaagcgagttatgatgatgcccctaatctatatgaacccaaataaagccaaaacacacacaccttttaaggataaaactatattccattaaaattagccccgcatttgtcaatatctaacagcattggactgaccctcaggccagaggctgtagctcttggaagatcctagccaggaggtttgagagtggccagtacctcggaagtgctggctcactctgacatcatcagaacctggcatacagtaggcgctcattgggtatttgctatggaaattaggcaggaaagtgcgtctgtgtctggaaacaaagaggcaaagcttaagcagtgatccccatgcagattctttctgcaaactacaaaacagaagcttccctagttcagactgccatccatctggctctttctccaattgtttttcagcggatcctgttacagtgcaaagaagaaatggcaaacggataacagctactgtgcctagaagatggtagattcctcacgctccatatctgggtttctcattgacaattaggcactgaaaggaagctcatatgtcctgttaatttaatcagtagttagtggctttag

SEQ ID NO: 914000 - DNA, 4001 bp, Homo sapiens
ctggctccccatcccatataatcaatacacaagagggactccagaggcagacacggaggaggtgcagtgggccagtggcagacactaagcgccctggagctgacctggatggggacagtggaaaggacatgctcttcagaagagcttgcctcaaaagtgagagagctaaacggagagagggggactagtttaggagtcccctgagggccccaaactcagacagcaaatgatctaagaagagggaaagattaagagaggtaggcgggcatgaaggcactcctaatggaatattcaatatcctgagaaatgcattttcggccctgcacttccagggactaaaagccagtaatggctttggagtctgcacttcctctccctaatgtccagaggcgctttaatgctgcagccaatcgatcagccttctccggtgaaggcgacgagtggagtgcaaaagcttcctacttgtggccaaaatccacccagcctcctctgcacaccccaaaggagtgacatacaactttgaactggcaggatttgtctcttaaagtgccggagaggaggaaaggaaggagcccagaggcgtccggagaaacagcctaccctcacccctccgccttcttcatcccaacttttccagggagggactcaggggaaaacaaaaagggagggcgcactatccaccttgggacagggctgacgagcagcctcaaatctgcttcaggtgcaaggtcactgagcggactccaaacctagagcagccttaggtgttgaacttctggaagaggcacaatcagagcaaagaaacgtccagaaggtggggtttctttgcaatgtcttgctgacatcacagctgccttgaaagtgaccctgtgaataaacctctcccctcctcgcccccacgctccaggctggatccctgccctagagacaagcccctgtcccgcctctccctgtccccgcatccgccagcagagctcgggttctgggcaagttcagtccctaagttgagcccaaccctgtccagcctccagtcgcccctccctaggaggctcggacagccccactgagcatgtccagtggcctgagtccggggggtcgccgctgggaagctctccaggcccctggatgggcagggttgggtccctgcgtggacgctcccagcggggcgcacgaaggacagccgcgcgactgcagccatgtgtggagggcacaagttagcccgcgcgagtaaactttccgcggtcctcctccccacccccacgccacaggggcgcgtctccccgtgcagctcgcctttcccagcccggcggagacaagcacagcacgtgatgggcagaaataaaaataaacacttcccattcccgggccgcggggccacccccactccgcgcgccgcagcgagcagggggcgccctgggccgacccgcccccgccgccgcggccagagcccccagcctctgcgccgcgggccgggacgagcgcccgggcccacggcctccgcgcctacctttcggacttggtgaacttccggaatgcctgtcggaggtcgtggaaggacctgtacgtctgcggctcggccgagatgccctgcgcccgggtggtccgggggccgatgtgggtcgagggcactgggagcaccgactggcatttgtggagtttcctcttcagctcctgaatttcttcctccttctctgacagccgcttctccagctctttgatcctctcctccttgagcatgagaatcttggcaaagtcttcctctagctcgctcattttttcactgagcccctccgcgaaactttttctcgggcggcggcggcggcggcggcggcggcggcggctgggacggcagccggcagcggagagcgcgggtgagcgagtgaatgggcgctaagtactcgagcgcggcggagtgcgcccctaatgcggcgcggggagcctcctgcttcgatccgcttctgctgaatggactaaaagcaccgaggggaggatgagaagtctaaaagcgatggagaggagaggcagagtgctaatctccagcctctctggggagtaggtgattatctttcattgagaaaccaattagagctgcccttcctcccctgagaccccctccctcgtccccctctcctagtcactccgtgagaatacgcgcgcgccaccccaccgacagccgagttgctagcagagggttggatcagagagcctggtcccactccatcacacaaaactcactcttccacgctgtatggtaccaagggaagggggtggggtggggggggggagatttatgccacttgatccttgaaatagcaacaattaccatgtgatctggcggatgacgcagcgcttgtaactggatcctaaagagtgtgagtgtgtgtgtatgtgtgtgacatttcgtaaatattaaactgcctttagacagtaacctgcacaaattcatcttggtctttgacttttacttcttttctatttttgatgcctggatggattcagaaaggaaggcgtgtgtgtgtgtgtgtgtgcgtgtgtgtgtgttagttactttgaagtctcatggttctgaccctagtaagaatgacagggcaataccagttccaaggtttttcagcgtaaagccttactggacagagtgaactaaaattgttggtggggaagttggatgaacatagggtaatgagccaaatgattacggaaaagagaaaggccatgtgttaactgtaaactttttgtgtctggctttttttccatctactacccttcagtcttgtatacagagcatccaaattatatcacaatctcttcctcaatggctcagaagtggtggccaccagtgctaagctgggtcacactaccagttccagtttgggggagaaattgcatctttaattatctgtgtttaggtcttacctgtgcatccaccatctaccctatgctaaaaggattattctgcacagtagaataatcgcgtattcacggattcttacaatttccttttttatatctatcacagagagcatttacataacataagtcactatttgagagtttgatttgatagggaatgagaagtatttcttctgataatagtcaacacattggtaatttttttaaggaaaaaaatagttgcaactaagataccaggagattctttcctaaattgtaacttttcttaaaaaagaaaaatcaatgtataattactggctacttacaaaaaaaaaattattctaccttttctgaaacaactaaataaaggaaaaacaggtgtatattttattctggagatttattatttactattctacttatctgattattgtacattaaaaatgttttaaaccacatctgaatttcttaattgcaccagatgctaaagtctggctatgtctactgatgtttgagaaagggttcttagtgttgttgacagttgctattctgttgcttctgtctatgaacttaatctgctattatcattttacacacactaaaataattgacatttaaaaataatacattagaaaaaacctttgatcacattcaaaaatctaggcatagctttaactttatttacagaagaaaaaaatagttttaaaatgactcttaaaaggttttttccaagtcttacactatcttaaatgaagatattcaaatgtttcttctgcttattaaaaaataaacctttaaacttagatttcacgcatgcacctcaaaacccaaaattcatccccatcttccaaaataaaactatttttgaataggtcagttttaatttaaataatgttgattgctagtgacgttaaatcttgtccattggcttaagaagtatttaatttagaccacaaggaaagcttgagaaaagacatgctggtagaagaataaacactgaattattaaaaaacatgtcatagtatattacagctgaaagaactttgaagatgatctaacccaacaacctcatattacaaaggaggaaaattagatcttgagagggaaagtcc

SEQ ID NO: 914001 - DNA, 4001 bp, Homo sapiens
tttgagttattttttcattatgcaaaacttggcccaggagagatggtcatgtacctcgttagctaaaacagtcaggcatgtcaggattgcaaattaatttaccagagaaagttgaagtttattcagatcactcaggtttctaaggcagatctaagtctgctgaactattagggcaatttggtaaggtcagaatctcagaaatgtttatccttattgtctctttccaactccctcgcagaatacaaactcctccctaaactaagcctgcatgaacagcaaatgttccatgggaatcaacatgtataggtataactctaagttttcaaaagtagtaattggtacatgctgtgattctccccaaaaaacatccaataaatacaaatagagataatcaaatatttactttctccttatattaacttgttgtatttatgaagtgaagggtttcgatggaccttgcattattacgtaacacgtgccatccagccaatgtgatttcgttagtagtagagtaagcagcaatatccttggttttatcaattacgttattatctattaatttaaaatgccgttcttttgggtgctctcccacattctgttaacctcatgttcctgtcgctttactctccatatgaactctgagttgagtgttgtataacaagtttcattaaatttttcccatccaagttatgaagcccactaacatcagaattgcacagttccctaaaaggctagaacaatgccagagtggttgcattagaagccaagagtaaggcaaacaatgggtccacgttttaaataagataagtgtgcttatctgtatctgaccctggaaacaagcaaccacctcttgggagatggagatgctccattagtaacattatgcacgtttcttaagtaaaataagcaatcttctccctcatatgttatgaaaaaatatttcttcaaaatcaacagactagtcttccatttatggattgtaaatgtcatccaattcaggaaatcaaaaattcttcctttttctatgcctatttgcttatgtttcacactttgatgatgacaagaacgtcaggtttgaagggtaccagcgtgaagcgccagcaggtagagaaatccgggagagccacaaaagcatagaaagtatgggtgatcagacgcatttcatttcaagtctgatgagcctgcatttaggattttccagctgggctggtttgccagggcttttgggagacgggggctttttatttcttctctcacactcacacacacggtcggacacacacctgggacgtgttcaaactctacgtacactaggtggcttatacgaatgtatatgtatatttaaaaataataccttgacatctgacaaagacacgaaggcaacgtatgtgcagtgagtctggctctgagaaacgtgcacagccccgcaagaagtgcccgttaaaatgaaacatttctgaggatgaggacagacatggcaagcgggaggggcgggggccgacagacaatacagagacccgcagctccccatcgccagggcgccacatggacccggcgcgtcacccctgcttactgtgggctcttggggtagaagggcagggtcacatggctgagatcctggatgtcgaaggcggtgggctcggcggagatcgcctgccgcttggtgcgcggctcgccctgcaaggtgctcgcgctctgcttctgcgcctgctgggtggctggtcggatcaccgagcggtacttgtccagctcgttctgcagcttctggatcagttcgtccttctgatccaactccagctccagctcgtcgatgagagcatcccgctgcctcagctcctcgatcttctcctggagcgcgtactgtaaatcccgcaaggtgcccatgctcctccgggctgccgggggctccttcctgccgctgctccgcgtcttgaggcttcctcccctctccgatcaactttccccaaagtcgccgctgcctcccgagtgccaaagcttcctacttgagaccaaagccagccctggcttctgagcatgcccagtccgccggctccagccacccagagtttcagtgcagattccacttctctgggctggctgtgaggctcagagcggggagagcaaaccagcaggtccaacccgggattaaacctgagacgcggtgggcgccgcggcgcgggggagaagagtcggaggcgcggtggcgggggagcgggaggaggggacgtgaatgggggctccgaggcagcggctgggctctcagagtccctcgcgccgggcgcccaaggaagcttgcggggcgtgcggggagcctgataagcctccgaggcgcgccgggggtgtgcgggtggagcgaggcgggagcgctacttcgggggtggggaggtgggagggaggggacagggaggaccccgggcaaactcgggaggcctcagctgactccagagcagaccagcctggagaatgttgagctacgatcctagcgacgtacgaggcataggggactctgcatcatcaaagctctgagttctggaggtattttgacggccggcctcactaaggaaagctcccgagcggtgtggccgagctgtcgcttctcccacgccacctttcccacccagagcgcctcacacaggtggctaacgcttgcgaagaaacttgcctctcaggagatgcgagcgagtcggcgcccgcgaggaattccccctttcagcctactacctttgggaaagggttgtggggtagggggtggggtttccgattttagcacccgaggcgttgctactcttcgcctgctccagatagttactttcctttctgccccttccaaactctcatcggggaactgttttagggcaaaggccaaaaacggatttgggccctagcaggtcactcagcttccccatgagccctccgccttgagctggtgcctgggaatagttctcggatgggccttgcttcttccatttgctgaatttggcggggagagggtgggggttaaaaatcattcccgagctccaaaaatttcatcttgaaactgaatcatacctttaaaaatattactttcctcacaaccaagctgttaggaatgtatctttccacttgaatggccaggaagacatcctgacacaaactttgaagaagagggaaaatcgtgaaggagcgagggagaccacgcaggctgcagtgaattgtacactatactgcagtcacccccacctctacccactcccaccctcatccctgcccactcaatattccccaaaatgatcacaattaggtaacttcctttctatccaagtgttacactcccatcatgggaacacatgtttagaatccccaaatatctgcctaatacgtacctaaatccctaatatttgcttaagacattacgaactcatccaattttatagcatctttattggcagatttttgattactattcttgggcactcaatattataatcctcaatgctctatttggttattccttaacactaaaacaaagtggacagaaaataaaattgaattgcaatgcaattctaaacttagcaaagaatagtatcaaaataacttgcacactgttgcttttgaatacacaactttttgtatttaagctagagacagaggaagggaggaaaggagggagggaggtcaaggtatcttaacaagcttgttcatttaaagtgtccttgtttttaattagaggactaaatgacaaaatatatagtcctaaatattcttttatgtagattatgatctagtaattctcttaatgcagattacacaagacacttcatttttctgctttccaacacagactttcagaagtgcatttatttctaaatgtgatatataaaatggatcattctcaaaacattttcttttgcaatgaagaaatgagcaacttacaaatattgaaaataataatagctctgaattactgttgttttaattaaaagtaaaccaagcagaagtactgtgactttgtataactcact

SEQ ID NO: 914002 - DNA, 4001 bp, Homo sapiens
gcaagggttcaaatggactaagcaatatcatggtactctcagctgggtcctttttctaaaggcaaactgaaaatctttaccaagcccaatgcattccttttaaatcccattcatattgttcatttcaccaacgagcaggaggaggggacgccaggaaggcaatcgtggttctgaaatacttttctgaacgtggagaaaaagttttgtttgtccttcaagggcataaagaagaaataagaaatcctcttccctctctttggcctcccccaagcaaagagcaagactctcaccaaagcccgcttaacattttacaaacacacaaggacaagacagacagccggacaagagggctgggctggaaatgttgccctatgttggcttagctagctctggtgctgagaataagcaccagattgacctcgagtggtgccctaggaggccagttgaagtggagctccttgaccaaggcctggctaagtggcatcagatgaccacgctgacggtcatattctggccatggggggctatcttgcggggccaagcgaccaacagtttgcgcagctcctcgcggaagctgtcgtgcagccaggcgtagatgaaggggttgtagcaggccgaactcatggcgagccagtggcagagcagctgcaccagcccaaaggcgtaagggtcgatggcgtgggggtcgaggtcccgcagcaggttgaagacgtgcagcggcagccagcagacggcgaacaccaccacgatcaccaccagcaagcagaaggtgcgccggcgccgagcgcggtcccagtcggcctggctctgggtcacgcagcccggcaccacgcggttgcggagcttcactgacacccggacgtaagacaggaggatgaccagcagagggagcaggtaggtgaccagcagcagcccccaggcgtagagctggcgctggcgctcctgggagccccagaactcctcgcagaggcgcacgtcgtgcggcttgagctccacgtgataggtgtgcacggcggcgggcagcgccagcaccgcggacagcgcccagatggccagcacagcgtaggcgctgaggcgcagcgagatgcgccgcctcagcgggtgcaccagcacgacgtagcggtccactgcgatggtggtgagcgtgaacaccgacacatagacggtgaccggctgcaggaagaagaccaggtggcacaggccgccgccgaacacccagccgcgtggctcgaaggcataggccagcgtgagcggcacgcaggcggtgcacatgagcacgtcggacaaggccaggttgccgatgaggaagttcgtcacgttgtgcagccggcgcacccgcgcgatcaccagcaccagcaggcagttgcccaccagccccacgaccaccacgacgctgtagagcagcacgatcagccccttcagctgatgcaccagctgcaggctctggaagggcgtgacggctggagcgtccgcgccagccaccgacccgttgcccgccgaggcctctgcgctctggttggcgggagttgtgaccgccggcggcagcccagaaaataagtcagaaaccctggggccccgagtggtcgatgaggccatggccacctgttcaaaggtaatcaaagtccgtcacttcccttgccatactccatccgacctcctacaccagccgcgcccctcccccatcgcctgagtcctcccttgggaataaccggccacagaacaacagcaaaagtagcaaaaagtgttgtcctctcacctctgtaaaataaacctaagcacggttagaacatacggtttatttaaacgcttccgcctctatttacggtcctcgcagtccacgcaggcagactcaggagcgcgatcctacctgggagtggggtttggagagcgggaaagcactcgcgggaagaaggggcagaatttctgctggccctcggtagtcctctgcccacgtcggtgatccggtctcgcttctccgcgggagctgaacggatccaaatgtttcccagtgggctagcagcttcttagagggactgggagcgcctcccctcagctccgccccccactccagctcccatgtatggaaaataggggtggagcgcgctctgccatgctcggtgcttagagaactagtgaagaggacagtgtggggaggatggaatccgaaacgggaggaggggccggcaaacctggccagagcagcgaagaggacgaatctctactgcaggagcttgcacggcccctggagggtcagggtccggaggagcgcacagtggaggagggcggaggagaggcgcgaagcgtcaggctatcgggaggagccggtgcagtcttaggagggaaggagcggggaaggaagtagcggtgggagattgcaatgcagctgggggcttgagagaggcacgactgacccgttcttaaaggctggatcctgcctagcggccaggttgcggagggcagagacgctagagggctcgggctgggatttaacagcagagcctggagctggtcgcggacctgaggaccctcaccctcccgtggccccgccacacgagccccctgcttggctgcagcgcgctcagcgggcagcgggtccggccaagccaaaggcaggagtcagcaccacggacagcttccgctggatctgccgcccctcgggcggatgatgtggggaggagcaggggaaaatgactagggaattcctgcccctctctggatccgggtgtttggggaaggaacctggtccggttcaaagacctgcctcgctgcctgctttctgggctggggctgagaagagtagggtggagtggaggcagctgagccgggggcctgggggtcggagactcatgacttttgctcctcttggtggtcaccgcactcagtgccaaggacggcgtcgtcttttacctcccggggtcagaaaatgcagctctcctgccagttattctacacaggcacacttcagtctggcccagcgactccccggctcaccctttctctcgctttctttctcggctaccgcgacctgtgccgtatctggctgcttctcccagcacagagtagttcctggactgagacttgacccctccctccttgactgaacacccacaggcctcttctcttcattttaggattttttaaaaatactggtaattgcagatttcagctagggtaacaaaagtaacaaacatttgagaagcttaggcgtttcataaaatcttcagtagtattaagtcctcattgaaatgcaaattagcctggcccacggggcaagagccaggggaggaggggcctttgtaagctccctccttagaagctatctcattccctcagcctcttgtttcctttttccagagcatggagcttcattgtctcctctctgataagtccttgtactttgtcctctggctgcagatattccagttagactggaaactaatatcaatttattccaccctccaaatttaaatgaatcactcatatagaaaaaagtcaatattggaacaaaagtaatcaatgttatgcacctctgtccatcctaagctcacggtccctgagttataatcaatttagctaaaaccagtgtgtgtgtatatatacatgtatatgttaggacaagatctcactctgtcacccaggctggagtgcagtggcacaatcatggctcactgcagcctcaacctcccaggccaaagccatcctcccacctctcagcctctcaagtagctggaactacgggtgcacaccaccatgcctgactaatttttgtttatttgtttcttttgaggcggagtcttgctctgtcgccaggctggagtgcagtggtgtgatctcagctcactgcaacctctgcctcccaggttcaagcgattctcctgcctcagcctcccgagtagctgtgactacaggcacgtgccaccatgcccagatgattttgtatttttagtagagacggggtttcaccatgttggccaggatggtcttgatctcttgacctcgtg

SEQ ID NO: 914003 - DNA, 4001 bp, Homo sapiens
aaacgcaacgatggccttcaccgtcaaaggaaagagctcaggttctgggatgctcctaggattcccctggcacctcccgaatggcctctgtgccaccggcagctgccccacaacactgcagataagatgcacttgaacttctaagttctagaggctcccctgttctcagctctgctctacgcaggcccttcctctctcccccttcaggtttccaggctccactcctggagttatctgagatgatcttccaaatcaacacacagtgccaactctgggcgccttgggtgtctaagaactttggaaccaaggccaggtatctcttcagctgccgatgaaggcttgcttgatctggttttaatcagtttgggccatgtggctgttatctagaaatgactgtatgctggacgaccagtcacggctctgcgcgctgtaggtggtcagtctacaaatattcctgaatgaattaatgggcaactcccccacccccggcaaccacagattcaaacacgctcagaccttcctaaaagcatcgctcctctttccagccttcgctccactatatcactctaattttggatttctgatttctagtaatggagaaaatgtgttacttttaaatcatcagcatctaaaattttcaaagaaagctcatttgaagtgctgttaccaaggaatataatccagtcgctttaacatggctattactagtctggacaagaaaacacacaagattccatacatacgctgtcaactttggcaagaaagattttagacaacttccatccttcccacccaatcccaagtcaatagggcatttgtttgtatttccacattggcttcatgaacgaaaatacctcctccacctagaaaaacaatcagtaacattcagacacggaacttggagggcaaactttttagtgcatgctggggcacttttatgtagtgtttttaaaaaataatgtaaaaagtatttttaataaagttttctcctatgagtatttccctcaagtttccacgtacgcctggtttggtctttcgatacctttcagaaataccgatttttaaaaaatgttctccgttaaaattggagccagaaagaaccttcttcctacagatctgaacgttttactctgtttagggtggaaaaacacacacacactcattttccttcactcactttaacttttctgctctgcacgcactaggttctggtagagttaaaagttttctgaggttagttcctgtggttaaggaaaaaaaaaatacaccaaacaactacatgcttaaatttagactccgtaaaacaatactgggaaactttcaaagccttggagaaatactggagtttattttactgccttttgttcaatttcatcacacgggccacattttctcctctattttagtccctcccgccgcgctgggctgggcagaccctgcacatccccgcgtgattccaggacctgggggcccgggtggaacaggtggctccgcccgccgtgtcggacccgcaccctctccccgaggccgcatggggtcccacggcgcaaaggacaggggtcccgggttgggggacggacggtggggacagcggggaccctctgcgcccaaggctgggaaacccgcctccacccctgagcccccaggatagccccagactcggaacccagcgcgctccccgccgcgccccgactccgaggtccccgaggaggcagcgacgccccggggtcgggggtcgggcaccgggtggcctctgcggcggcggcgccgggctcccctagtcagagcgaggagcgcgccaaggcagggtccggcgccccctctctgcccgacccgccggcgtcccagccagagcccagcgccgccaccgccgccaggacgccctcccgtcgctccagccctgcccggagtcctagggccccactcacctcgcgggagacccctaccccgggactcaggtgtccacgccgccagcgacccggagccctcacgccgccgcccgtctggcgcagactgttccgggacgccccgccgcgcgctctccctgtgcgcgcccacccgcgcgcgctctactgccgccgcgcgctcgcgccgcccgaactcgcactccttaggcacgcactgcgcgcgcccgcggcgcttaaagggccgggccccgccgcgctgggggacctcgcggccgcctcccgggggtcctcggtcaaggtgtgaagttcgagttgggggacagcaccgtgaaaatccccaaccccatcgccgagcgacccacgcggagaaaagcaatagggatgtgtgtctgaagcttgcaagagatgggacattaatttaatctaatttttattgagacagggtcttgctgtgtcgcccaggctggagtgcacgttgtaccatcttggctcactgcaacctccacctcccaagttcaagtgatactcgcatctcagcctcccgagtagctggtaccacaggtgcatgccaccacacccagctaattttaaaattttttgtagagatgggtgggtgggggggggggtctcattatatcgcccaggctggtctcgaactcctgggctcacgcgatcctctcacttcagcctcccaaagtgctgggattacaggcctgagccactgcacctggcctttaattttttcttttgttttttattatggtcagctttgagaggctattttatacttaataatgctgatgcaacttattgcatacctgtaccctcagacacagcatttaatgtgcatacaccacatacattatttcatctaatccttaaaatggttttctggtttcttaaccccattttacagagcaggaaagctgaggttcagacagctgaagaaactcatgggagaatttttgaccccatggctcgttgcattttcttcttcaggctatcaccgtggaaatatctccgaaggttaatagctggttgcggaaggcttttgtaagttggtggaagttaatgttactgggtttaactcagtaggcagggagaaagcaagagttatggggttgtattaattgtaggatttgttatatactcaaatgacaaacgttgtaacaacctagattcccaaaatgtttgtgttgcttcccattttacagaaaactaagaaggaaatggttgcacagaatgactgagtcactggccccactcagggttgagccccaatgccttagtcctgaggtcatttctttgccctccccagaaagagatacctgattaaagggaagaaaacttttcctctaataacacattggcctcacctaactccctgcatctttaattaatgtttacaaagcactttaatctacccaacatgctacttaattgggtcagtattattatcctctctttctgaacaaaatccaggagacaatcaactctgacaatccttaatcctcagtgaataataaacctaagctttctggttatgttcttttattttccctcttacatttttgtctcatgttgtgttaaatatgaacgcatttatcatgaagtgacataataaatggtaatattaaacatctacctataggtgacaggtaatatagcagctgctgtctttaaggaattcattttattttattttttgagacagggcctggttctgttgcccaggctagagtgcagtggtgaaattgtagcttactgcagcctccaactcctgggctcaagtgattctcctgcctcagcctcccaagctgggactccaggcacgaaccattatgcctggctaattttttatttttctttttgtagagacagggtctaattctcacggtagtcccaaacttctgggctcaagtgatcctctcccctgggccgctcaaagtgctgggattaaaggcatgagccaccacgcccggccctttaaggaaatcagatcaagagaaaaaaaaaactttcccttgattttgataaatgataattttgataaatgttgataaatgcttcctagaattatttttctttttatta

SEQ ID NO: 914004 - DNA, 4001 bp, Homo sapiens
cagttttaacttctaatatggtaaatacggatagaaataacacataaacaaaagtccttcaagatcttcagtaacttttaagagtgtgaaggggtcctgagaccaaaagctttgagaaccagcggtctaagttactgctacacaataaagtaagggagatcatcttcaggaagttcctaaatcatgtaattctttctccccctttttagtacctttccaaaagagtcttagcattcccatcagtgaagagcaggcctacagacttttcatgtgttgaagaagagagaaggaggaggaatagaatttaaaaaattgggatttactattagaaaggaattttattacttttttttttttttttttagagacagggactcggtctctcacccaggctggagtgcagtggcacgatgatagctcactgcagcctgaactcctgggctcaagcgatcctcccgccttggtctcccaagcagccgggactagacgcgcgcaccaccacacctggctagaaggaatttttttttttttttgagacggtgtctcactctgtcgcccaggcaggagtgcagtggtgcgatgtcggctcacggcaacctccgcctcccgggttcaagtgattctctggcctcagcctcctgagtagctgggattacaggcgcgcaccaccacgcccagctaattttggtgtttttagtagagacggggtttcaccatgtttgccaggctggtctcgaactcctgacctcaggtgatctgcccaccaaagtgtggggattacaggtgtgagccaccgcgcccggcggcccttcctccatgtttcagttgggcacaaacccttcgtaaggcgacagaagggaactctcaggagcactggggcacgtccgcagaatgccaacaggtaggagcggggatagggggcagttaggtaaactggagggaaacagggtcagtcgggggaaaacaaacaaagcctcgggttttcctgcaattcccacacctgcatccctaaggctcccaagtggttaccggaaagaaggccgtgagtgtaagttgcccgggtccttggcgttttgaacaaagaattggacaaaacgcacaaaaaaagtaacaaaacacaggaatgaagcagcaaaagtagggacttatgaacgcgagaaagcactccacagggtgtgagtgggcccgagcaagcggctcgaggccccggttacaaagttttccgggttttaggtactccttctgaggtccctatcagctaccccgtatctggatgaagggttcggtctgtggctaaagactgaggtgaactggcgccctatgcagatgaagggatggcccgtgattggcccacggccaatgcagggcacgttcccttcccatctgagaggtggtggaaaggcagggatgcggggagagccgcagcctgaagcctttgctactcggtggtgggaagatgaggatttttcttttggtttggcttttggacgtgggcgttaattggcctcaggttcccgcccccagacccaggtgttttccttttgatccagctttgggaagtcagcacgaattgtactcaagttccctgctctcagaccctattctccagcctcaacagtgagacgccaagggttggatctaagggggcctaccaggggtagtggcaggacactcgctaagccccgtccccgccccgaatcctctgagtatcgtcaccctcaccccaaaaccccgacacacatactctcactcttacatcccgacccccacgaccgcagggtcctcaccaccagcaggttcctgtcctccaccagctgccgcttccgaaggatctctgatttcagaatgtccatctcgccgccagaatttaagctccagtttcccgctccagctcctcgaacccagcctcactgggccggcggccgcgaacccactgagtatacggaacaacaagcccaaacacctgagaacaactgacaggagccgcttccggcggaagctgggatgagagagatgagggaagagagtggcccggggcgcctgtggtggccaaagcagctgtgcgtgagtgcccactggcggcgccctccggcagcgcgcctgtagtttcccctcgtagggaggtttacgtgaacgtggacggaaacccgggtctttgtagtactctctgcacctgctagttgagttccaaaagcctctcgaagaacacctcaataatgccagttaaatcaagatctttattaactggaaatttacattagggtttctgaagttacttgcttgcaaaatttgcaaaaggatgagaaaaatctaaacaataatactaacttgtaacaatagagtgaaagggctgtctgttcattactagcctgttaaatttcctgtgaacttaaacgactacaaccatttaaagcagtttggaagtcaatttatcttcactccctctgttttagattgcttaccaatcttggtgataattgaacatttacctcaagctaactaatcattttttggtcatgtgttcagcaatcaagatttttcagtgacatgattggagatgtaatcagaaattccttttttttttttaaatccaacccaagggaaaaaaagttaaattgaagagaaaaattatgtcagagattttttaagtccctaacatttgtttacagtggacttatttttttcatgtcattgaagcacgtttaaaaattgtttttgtgaaatcataattgaacaatatttgacatttcgtttttcttactcaaaaaaggtaagaaatatcattttgttgagtcagctgataatgggtaaaatgctttacaaaacaaaaaaatgaacaattgaattatttcaatttagaaagtcttttgtggggggtgatacttcatctaaaagatatctgaggccagacggggtggctcacccctgtaatcccagaactttgggaggccgaggtggacagatcacctgaggtcaggagttcaagaccagcctggccagcatggtgaaatcccgtctctactaaaaatacaaaaattagccaggcgtggtggcaggtgcctatagtcctagctactcaggaggctgagacaggagaattgcttgaatccgggagatggaggttgcagtgagccgggatcatgccactgcagtccagcctgggtgatagagcaagactttgtctcaaaaacaaaacaaaataaaataaaatatacctgacttttgccagaaataagccaacacaggaaaatgtccttgaactaaatatggcaacactcttgcatgaatatgggtttccctcactaatcaatgagcaaataataatttattagcattttcctgatttagggattagggattgttagacacaaaaaaaacctgaagggttaagacagatgacagtaacagcaatggaagtttacagagaacacaacggctggctacctgggaaactgtcagtgtaaaccagagaagttactagctacagttaacagcctccccttacattttagactttcattgatttctacgtttatgtaaacatgtgcactgaatcctgattaaggcctgagatcaaagagtgatagagagaaatacttgaacaagcaactgacaagcaagcttttccattcaaaaggaaggaaaaaagatatccaggagcttttagaaatacttaaaagaggccgggcacagtggctcacgcctacaatccgagcactttgggaggccaaggcaggcggatcagctgaggtcaggagtttgagaccagcctggccaacatggtgaaaccctgtctctactacaaaaatagccgggcttggtggcacacacctgtagtcccagctattcaggaggctgaggcaggagaatcgctttaacccgggaggcggaggttgcagtgagccaagatcgcgccactgcactccagcctgggtgacagggcaagactctgtctcaaaaaaaaaaaaaaaaaaaaaaaagaaaagaaaagaaacacttaa

SEQ ID NO: 914005 - DNA, 4001 bp, Homo sapiens
tcctgctcaacaatgctctattcccaaggcacccaccatgctgcctgccctcccacccttcaaagttctttctcggttccttcaaccagcttctcccccacaggcagcctcttatatttgggactttccaggcttccatccttaacagttgctttaattgttttttccatattcactgagcactcccgaacattacatattattctttttgctgatgacttccaaatctctccaatcactctccagaattccaaatgtgaatttcaaattgcctacagtgcaggccaacctgtgggccttacaggcactacaaactcaatttgtccagaatgaacttaatgattgccctttttgcgttttagtccccctcccatccatcacaccgctaggcttgcccctcctcctggggcaactggaatggtttttgtaaaagcataaatcggatacaatgattcttttgcatttggtatgcgggtctctgcctgcagtccacatggctactcctgtgtacccttcagatcttggctcaaaggtcaccgcagagaggctgccctgaccacctgagcaaaagcatcactccccccttctcctccaattaccctctatcctgttaccctcctcctattgcacatatctctatttgaaattttctctatttgtttacacactgcttgcctatgtcttctctagaacgcaagctcatgaagacaaggcctttgtcttttgcaccccagagcctacagcacctcctacaacccagcaggacaataaacgtgtggaatgaataaatcaactcctcatcctttcagaaggaaaggtcctgctgttaaattaagcactgagccccacatttcaacctgacccttctgtctgaatgtgacacgtttccctccccagcccacttactttagttcaggccattcatattcataaacagattatctgtgaatgacaagctgatccctggaaagagatggcaagttagccccacccaccatcctcaccaccattgagtttcacactgaacctgacacaagttataaccaccaccttctaggaaaaccacttctcagggagcagggaggacgtggccacaaggtcaagaacgggttggatcctagcacactgagagatgggtaccctctggctgacaccgtcaggattctcagggttaatgaggctcagttctgggaaaccagcaccccacaccctcccatccggacacactgctagatattttacatgcatcctcccaattggctccagagcccagcttgctgttgctcccttttacagacaagccataggtcactcaggagccgccagcgtgtcctagagctcctgcagaggcctccactgccagagagcccccaacctgggtaccaaaggcttcaaatctcaagctctgtccacttgagctactttatttcctagctgccttcaaaacccctcagtgtgctttttaaaaacaaaacttgaagcccgccctggaggagtcaagaggagacccaggaagaaggaggcctccagagcagcacgcgggggtctctggggccctgccgggctcgcagaagcgactccccgtggctcgcggggatggggacggctgggcgccggcgggacgctgcaggagcgagctaccggccggaggacacggggggacgctgggaactcggggtgaagggacgggactcagagtttcgtcagattgggggcggggagaggaggcccgggtccgaggatggaagcgatccccgccgggagggagaacaaagcggtggccctctctctcccccgacgcacggcaagcatttaatctacaagcagggtgccagggagggaggggagcgggccgagccccaaaatagggagtttgcatttaccacgacgcctcgcccgtagtctggcgcctcctcgctgctcccggccatgtttctcccggggaacgcgggaagggaagacggcgcgggaaggagcagggagggcgaaggctgcgtgggggatgggacgtggggatggggacggggacggggacggggacggggacggggacgggtccgccccgccccgggcccgccggcgggaagcagcggcctgacgcggatccatggccccggcgctgcgccccctcccctggctaggccgcgggggcgcggggagcagctgccaagccgctaccgctccccctgagcgcgggccccggacgcgtcccttgcggccgccgctgtcgccgccgccccctgccggatggtcgcgtgcagcccccggccccgccgccaagccccgcggggactctggagcaggaagcccgcggcaggaagagaacgtgtcccccaggcccctgattcccagatccaccgtcccagccctcgggctaacaatctccttgactcctccctgccagatttcatgcacgcgattgtcccaagcagaagcgtgaaagagcctgtgagccagcgtgctcttggaggatgggaagtgtcctggatgtgttttcaaaccttggagccgccacccacctctctccacctccgctcatctccctccacctcccctcacctccctccacctcccctcacctccctccatcttcctccacctttctccaccttcccccacctccctcatcccagggcctggagctggaaagattacacccgattgcttttagggtggcccggatctgcagtgatcagatctgggctttgaggatccagcctttcggcctttcgtcaactgcattcaggggaggagggggagagatttttacacattctctgctttaccagttttgcaagaacatctggtcagattgtaattgttccaggttgcagctttactaaagcaatcgctcttttctgattagaaatccttcttgtatgagtctgttgttcatttcaacccctctcacatgcctatgctccggttctttgtccactcctgtaggttcctgctttttctgggtgtgtcttcattccccaggtccctgacatctcaccagcgtcttcattcactcagcccaattcgggtcgaagccctgaatccaagagaacttaacacagttttcctgatgcaggcgtcttttgttcatcttcgaattctggcacacagaggggagaggaatgctgattttgcctagtttaaaggggaaatagttatcaatcggttaatgacgttctaggttggaaaaatattagtcattcagacttggcgccctggtcctgctcagcagggctggctcttcatgtcgtttctaagcgccagcgccttggagggtgcagctccagagatccctgaaatcaggcatctgcttggcaactgccttacagaaatggggggtgttgtttctcagcacacgggtaaacattttctcctagtaattgtgagagggcgttgttttgagccatttttgtagtctgcatctcacttcttttccccaaagtcaagcaccatcttttattttcattttcaaagaccaggcccaggaaccatattcacaagcaacatcattaaaatttccaggagcagaaaagtgctatcattaggatgatgatcaaactttagagttcacaagactctcctggggagctggttaatgcagcttcactgggtggggaagatctgtggaagcacctagaatcctgtacctgctgagagacaccagatgggtgtgatgtgggtggctcatgacccatgctttaggggattccactagaccatcttactgcttggatatcaaaacttagccatgaggctcagtgtgggtgcagggccagattggggggtaccaggaacttcaaaatatgtcacaggagtagttgccatacagaagtcaaaaagcatcaactttggttccagcctagacactgcggaagatgtaagggaaatggtagataaatcttcttcccttagaaaggctattagtttaaacgtaaaatccaacaagttcacagtgaaaaatgtaacttgcttgaaagacaacaggaatcttatgaatgtgt

SEQ ID NO: 914006 - DNA, 4001 bp, Homo sapiens
ttcttcggttttgcatcaaccctgtcatccactttgttactttttattaaaatttgggtagctaggttaaaaatggcagccagcccttaaactacatatagttactaaaaaacagacattgtggtgggggctgggtgcggtgtctcacgcctgtaatcccagaactttgggaggctgaggcgggagaatggcttgaacccggaaggcggaggttgcagttagccgagactacgccattgcaccactccggcctgggcaacaacagcgaaactccgtctcaaaaaacaaacaaacaaacaaaacaaacaaacaaaaaaaaaacggccaatagcgtgcaagactttcttttctctttttctttttttcacaggtggggtcttgctatgttgcccaggctggtctccaactcctaggctcaagcgatcctcccacctcggtgtcccaatgtgctgggattacaggcataagccaccgcacccagatgcaagacatttcaaagcaagtgaaatgaggaccccatggcaaaataactggaccagaaaaccctatatcgccttcaatacctatgagaattaagctccgattttttttagcttgcccaaattcctatctaaggggtgtaggaatcataccctacaaaccataaactctcatcagatgggttttatttgaccccatatatcgtgacttactttccaatctgactctggcataacattttataagacaaggaaaaaaaaatcaaaatatctaaccccaaaatatatttccttgccataccttgaaattgccctgcaaagtctcttgtgggaaaaatccacattctatagagaatcccctttcccctatgttttccttccttcctctccagatccaggagataatcaactaagagccagtcaccctttcatttccatagaaatattttacaacgtgctcgctctcttagtcggctacctgagagcttcctctgcacaataaaacttggtctccacaatcctttatcttaacttgaatactttctttctattgattctaggttttcagataaactcaaccaattatcaactagaaaatgtttaaatttacctatggcctggaagccccccgccgctttgagttgtttcgcccttctgaaccaaaccaacgtatttcttaaatgtatttgattgatgtctcgtgcctcccgaaaatatgtaaaacccagctgtatcccaaccaccttaggcacatgttctcaggacctcctgagggctgtgtcacgggccatggtcactcatatttgcctcagaataaatctcaaaatatttttacagagtttgactcgttttgtcaacacctagaatccagagtaaatacatatgcaaacgtcaatatagatgatacacatgtgcttcctgcagcttcgctacccttacaaacaggcaactgaagccaacggccaaagtgtcctgcgggacggggctccagcccacctcgatcacgtgcgcccagcacaggcacaacacagctgcccaaggggtcaccctacaagactcacccacccccacagtgggaagcgcagcctgagggaaggcctcggggccccagccgcgcaggaacccactcgagccccgaaggagatgctgcccagggcctgggccgtcctcccgggggcattttcgcagcccgccccccgcagcccccagccgcccagagaaagccagagaaagccagcgaacgcgcctgcgcagtgcgcgcgcccccttgccaactagggcagggggagcagaggggccaggcccggcacagcccattctggggcagatggacgctgcgaggcacctcctccccaggatgagggtcccagggcttacccgcgcccaggaggctggccaggaggaagagggcgtacatagcgccgtctgactccgcagtctgcaatgcggagcgtcagctgatcccccgcagatataaatctgccctgccccaaagccgtccagagcgcaggcgctaaccccgccccatccgggcctgcccgagctcaacagcgccctgactcagcgcctctgagggcgcctgcgcgaaggggaggccaataggagggggcaatgggaggggcgaaaggaagggctatggggaggagtgaggaagaacttggagaaagggaagggaaaggtcataaaagaaaagccctactaattgaataggtcagagattatatatgtaaaataccttttaaatctccacattgttggccggccgcggtggctgacgcctgtaatcccaacacttgggaggccgaggcgggcggagggttcaagactagcctgggcaacgtggtgaaaccccatctctacaaaaaaaaaaatacaaaaaaattagcccattgtagtagcgggtttcacatagaatagcttggggtttcacatagaataagtagtcgtgtaacagggtacagggctcagtcctggccaggggcacgtgggggcaggtggtggcacctggtcaaaggcaagtctgggctgggcatgctggctcactcctgtaatcctaacactttgggaggccgaggcgggcggatcatgaggtcaggagttcaagaccagcctggccaatatggtgaaaccctgtctctactaaaaatacaaaaattagtcaggcgtggtggcgctcgcctgtggttccagctatttcaggaggcagaggcaggaaaattgcttaaacccgggaggtggaggttgccgtgagtcaagatcgcactactgcactgcagcctggaccacagagcgagagagattcccatcaccaaaaaaaaaaaaacaaaaaacttttaagcctcacattgtggtaccgttaaagatgtaataccattcctcacccatcataagagatcataagagtcacaaccaacactcctgtaacgagacagcttaagagaaaagcataacaaatttatgtaatcaacgttttatgtgacatggaagccttcagaaattaagacccaaagaccctctgcctgtggctgcccctgccaggacctgaacagagaatgatgatgaccctctccagaaggataagaacctgccaaccgcaaggcagggaaaggaggggaatcttagccccttagggcaggcacttagaggtcatttacctgtagggacattgagcctaggagagggcaagacgtttatccaaggtcacacaacaggtagagatagaacctggcccgaagccaggtttcctgacccaggaagggcaaacctacagttcctccaacttcctccaatctgcaatccgctctggagaacaaccccagggactaaggcctcagaaccttcagttctgctcccctgcaatctccctaagtgcccccagcccccaccacagctctgacttcctctggggagccagatggggaagtgtgccccatgcaccacagtgggccatgtgaggcagctgagtgagttgggacaagatgtggtctcaactggacgcctcacaggtcggcctcagtggccagatggagacttcgtggctgctccacctttgggcttcccaaggccaggcagaagcgtggggcagaccacacaacaactggttaaaagcaagggagctagccgggcgcggtggctcacgcctgtaatcccagcactttgggaggccgaggcaggcagatcacgaggtcaggagatcgagaccatcctggctaacagggtgaaaccccgtctctactaaaaatacaaaaaattagccgcacgatgtggcgggcgcctgtagtcccagctactcgggaggctgaggcaggagaatggcgtgaacccgggaggcggagcttgcagtgagccgagatcgtgccactgcactccagcctgggcaacaacagcgaaactccgtctcaaaaaaaaaacaaacaaaaaaagcaagggagctggggctctaggacaaatcccccatccttcagctccttgcagatggaggagcaaagcatcccagtgctccatgcagaggttacaggaccc

SEQ ID NO: 914007 - DNA, 4001 bp, Homo sapiens
ctgacctcaggggatccacccactttggcctcccaaagtgttgggattacaggcgtgagccaccgcacccggccagggacattcttttcttcatacaggtacagacaggcacctacacacacacaaacacacacacacacacacacacacacacacgcacacacatacataaggacaaatatgtcagtacacagttaaacacattcataggcaacaccctctggcacacacacagacacacacacacacacactgctcaaagacacaccctcatgcactctcacagtcataacaagtatgtgtgtaatgaaaaggcacatgcttgttttacacacacaccatcatcaaacaggaacacacaaagaggtacccaaatatatacacaagctgtcattctccagtgcacacagaggtccaggtgtatcagacactcacagagacctactgctcacagtcacatacacatacagatgtacacatacagatgtacacactcaagcagggacacacaccgtcccctcccccccacctactggggtctcttgaggggaatctgcacccatattcctctcctctccctctctccccaggggtaagacagatcccgcccaggagagaccataaccaggtaaaggggcctctggtggcaatgcaggggaggggcagaggtcaggagtagcaaccctgccaggcaggttccggaagctcaacggggtcccagcgcatacccggtgcagccccaactcaatgccacctcagtactcaccgctgctcgcccagagctgagaccgaggagagacagaggagaggctgggcccagctgagctgtgaaggcagcgcggctcccgtttgctccaggcccgcccgcctctcagtccctccccctaccccctacgcgccgctcaggcaacgctaatcccccccaccccccgccctctcccagggcccagagccccggaggctgccagccccccttgtcgctaggtccccgctgggctctcccgccaacctaagacccgccccagacaaggaggagggcgcatggaacccctggttctattccccagaccctcacgtgccccaccccacttgtgtccacgtctctctcgcccaccgccccttgagccacacgtaaggcccggctgcacacgcgtgtcccgctccagaccccacgcgtgtccctaggaggctgccacatgacctgttacatgccacacgcgctcccgcccccacgagcacgcggccgcgccaagcacacggtatgggtgtagactggacccgccccctaaatccaggagaccatcaactatggaaaggagatctagggaacaccgtcttgaacccgccaggggttttgagtctcggacccaggagatccaaccctgaccaccctcccaggatgcagcagggggatgttaaatcagacttcaggaagaacttccttgctgcctgagttaggtgtcgtcacgcctgcccaggggtaagaggttagacgggatgaactagggaccggaagacgtgggggaccggcaacccttgtgcccttggccagggtagaagggggccctgctattttaagaaagagccgctggagttactatggcaactactctctttgggagggccagggcgggcagatggtgacctcggaaggaagaaggggtctgttcgggcagtcagggggcgcgaggacgtgcgaggcgggggcgcgcggggctcaccgcggggaggggcggcgcggactccgcgtggtgctgaaggggacagcgccagatttgtcgcactgcgcaggcgcagaggcgcgaacaaagaggggagggggacgaggcgcgcggccggaggtggtgcgcgctcacgtggctctatctttgcaggggtctgtcctcccagctaccccctccctaagcaggctgaggaagaagagatagcaagccctcacctaacttgacccctttcttgtctctccccgctgctagcttctcccttctcgctgccttgcggggtggggaaacgtggaaggaattctgggaaaaccagatgtctgggttctctattcccgtctggcttgattctggacaaggggcttcctctccagggcctcggtttccccatctttaaaatggactgatagcatagacctgcccacctttcagaggtgcccgaagccttgacgagataacagatgagaagtggttttcgttgtgatgagccagctgaagcggttgcaccggagcgccagaccgtcagcggtgcagtggctctcgcgtccttcacatccccccacacccatcccgtggatgatgggggaaggcactactcctggggttccccgaagcggatcctgggactgggacctggggacgcggtgagaggcagccctgaagctgagtccagaggtctggggcgtcattgtcccagggcggacccagccccagaccctacaactaaacccaaggccagccgagaagcactaccactggcgggctgagctgagctctcattcttcttaggactctggacctttggaggaaatgaaagggacccagttggaaatatagtctttcttcgcgccccctacatctctctcccccggcggaaacgcggcccaaactgttacgaagtggaagaggctggatagctcttcataattaatcaggaatgggaggtttgagcaggtttacttgatgagggaaacattatagcctcgccaattcattcattatttcaacaattacttattgaacacctgctacgtggcagacagtaagagcctggatagtttctccccgtttttcaaagtcgctaaacgcgaccagagggcagaggagaggccggtaacctaagagtcctggctccgccccctccgcgtttggccttgcctgctcctcccaccaccacttcgctcagaggcggctactggctcaagaggacgacagaagccagtctctgatgcccaccgcattctccagcttcaggcctcaagccctgtagccgagaaggcgaggcctaatgttacaccaccggtctgttccgcctccgtttcggggtccacccgaaaagctttcagatcggatcctcggtgagacggcactcgattaaataggtctgtctctacaggccaaggaggcgggtttggtgcggccactccaaggccaaagcgagaaaatcttactgcgcacgcgcaatagacagccgatggagccaccgatggagccgtccggaggggagcaagagcccggagccgtcaggtaccgagcaccggaggggccgagagggaagaggaacctgagggaggggagccgagccggggctgggtctgggggccgctcttgggagctggggcgcaggaacataacggaggcggactcgcaggtaatagtggccccgggacgccagtgccaacgcccctttactcgcaggttcctggacctgccctgggaagacgtgctgctcccacacgtcctgaaccgggtcccgctgcgccagctgctccggctgcagcgcgttagccgggccttccggtcgctggtgcagcttcacctggccgggctgcgtcgcttcgatgccgcgcaggtgagccgggggctgaagccccgcccctgcctgggtaccgccccgcctctagcccagcccccagccccgcagtatgcccttctggacccccttgggccgccggggctgcccggaagggatccacgcaccaaagggcaaatactcggtagcgactcagagggaaagtggggtctctcctgggagagcaggaggctgccagaaaagaactcaggtcaggggtgcataggcggctgaggagtgcgggacgggctgagagttggggtgcctccccgcccgcaggtgggtccgcagatcccgcgggccgcattggcccggctgctgcgggatgccgaggggctgcaggagctggcactggcgccgtgtcacgaatggctgtcagacgaggacctggtgccggtgctggcgcggaatccgcagctgcggagtgt

SEQ ID NO: 914008 - DNA, 4001 bp, Homo sapiens
gatggagtttcgcccctgctgcccaggctggagtggaatggcgctatctcagctcactgcaacctccgcctcccaagttcaagtgattctcctgcctcagactcctgaatagcttggattacaggcgctcagcactatgcctggctaatttttgtatttttagtagagatggagtttcaccatgttgtccaggctagtttcaaactcctgacctcaggggatccacccactttggcctcccaaagtgttgggattacaggcgtgagccaccgcacccggccagggacattcttttcttcatacaggtacagacaggcacctacacacacacaaacacacacacacacacacacacacacacacgcacacacatacataaggacaaatatgtcagtacacagttaaacacattcataggcaacaccctctggcacacacacagacacacacacacacacactgctcaaagacacaccctcatgcactctcacagtcataacaagtatgtgtgtaatgaaaaggcacatgcttgttttacacacacaccatcatcaaacaggaacacacaaagaggtacccaaatatatacacaagctgtcattctccagtgcacacagaggtccaggtgtatcagacactcacagagacctactgctcacagtcacatacacatacagatgtacacatacagatgtacacactcaagcagggacacacaccgtcccctcccccccacctactggggtctcttgaggggaatctgcacccatattcctctcctctccctctctccccaggggtaagacagatcccgcccaggagagaccataaccaggtaaaggggcctctggtggcaatgcaggggaggggcagaggtcaggagtagcaaccctgccaggcaggttccggaagctcaacggggtcccagcgcatacccggtgcagccccaactcaatgccacctcagtactcaccgctgctcgcccagagctgagaccgaggagagacagaggagaggctgggcccagctgagctgtgaaggcagcgcggctcccgtttgctccaggcccgcccgcctctcagtccctccccctaccccctacgcgccgctcaggcaacgctaatcccccccaccccccgccctctcccagggcccagagccccggaggctgccagccccccttgtcgctaggtccccgctgggctctcccgccaacctaagacccgccccagacaaggaggagggcgcatggaacccctggttctattccccagaccctcacgtgccccaccccacttgtgtccacgtctctctcgcccaccgccccttgagccacacgtaaggcccggctgcacacgcgtgtcccgctccagaccccacgcgtgtccctaggaggctgccacatgacctgttacatgccacacgcgctcccgcccccacgagcacgcggccgcgccaagcacacggtatgggtgtagactggacccgccccctaaatccaggagaccatcaactatggaaaggagatctagggaacaccgtcttgaacccgccaggggttttgagtctcggacccaggagatccaaccctgaccaccctcccaggatgcagcagggggatgttaaatcagacttcaggaagaacttccttgctgcctgagttaggtgtcgtcacgcctgcccaggggtaagaggttagacgggatgaactagggaccggaagacgtgggggaccggcaacccttgtgcccttggccagggtagaagggggccctgctattttaagaaagagccgctggagttactatggcaactactctctttgggagggccagggcgggcagatggtgacctcggaaggaagaaggggtctgttcgggcagtcagggggcgcgaggacgtgcgaggcgggggcgcgcggggctcaccgcggggaggggcggcgcggactccgcgtggtgctgaaggggacagcgccagatttgtcgcactgcgcaggcgcagaggcgcgaacaaagaggggagggggacgaggcgcgcggccggaggtggtgcgcgctcacgtggctctatctttgcaggggtctgtcctcccagctaccccctccctaagcaggctgaggaagaagagatagcaagccctcacctaacttgacccctttcttgtctctccccgctgctagcttctcccttctcgctgccttgcggggtggggaaacgtggaaggaattctgggaaaaccagatgtctgggttctctattcccgtctggcttgattctggacaaggggcttcctctccagggcctcggtttccccatctttaaaatggactgatagcatagacctgcccacctttcagaggtgcccgaagccttgacgagataacagatgagaagtggttttcgttgtgatgagccagctgaagcggttgcaccggagcgccagaccgtcagcggtgcagtggctctcgcgtccttcacatccccccacacccatcccgtggatgatgggggaaggcactactcctggggttccccgaagcggatcctgggactgggacctggggacgcggtgagaggcagccctgaagctgagtccagaggtctggggcgtcattgtcccagggcggacccagccccagaccctacaactaaacccaaggccagccgagaagcactaccactggcgggctgagctgagctctcattcttcttaggactctggacctttggaggaaatgaaagggacccagttggaaatatagtctttcttcgcgccccctacatctctctcccccggcggaaacgcggcccaaactgttacgaagtggaagaggctggatagctcttcataattaatcaggaatgggaggtttgagcaggtttacttgatgagggaaacattatagcctcgccaattcattcattatttcaacaattacttattgaacacctgctacgtggcagacagtaagagcctggatagtttctccccgtttttcaaagtcgctaaacgcgaccagagggcagaggagaggccggtaacctaagagtcctggctccgccccctccgcgtttggccttgcctgctcctcccaccaccacttcgctcagaggcggctactggctcaagaggacgacagaagccagtctctgatgcccaccgcattctccagcttcaggcctcaagccctgtagccgagaaggcgaggcctaatgttacaccaccggtctgttccgcctccgtttcggggtccacccgaaaagctttcagatcggatcctcggtgagacggcactcgattaaataggtctgtctctacaggccaaggaggcgggtttggtgcggccactccaaggccaaagcgagaaaatcttactgcgcacgcgcaatagacagccgatggagccaccgatggagccgtccggaggggagcaagagcccggagccgtcaggtaccgagcaccggaggggccgagagggaagaggaacctgagggaggggagccgagccggggctgggtctgggggccgctcttgggagctggggcgcaggaacataacggaggcggactcgcaggtaatagtggccccgggacgccagtgccaacgcccctttactcgcaggttcctggacctgccctgggaagacgtgctgctcccacacgtcctgaaccgggtcccgctgcgccagctgctccggctgcagcgcgttagccgggccttccggtcgctggtgcagcttcacctggccgggctgcgtcgcttcgatgccgcgcaggtgagccgggggctgaagccccgcccctgcctgggtaccgccccgcctctagcccagcccccagccccgcagtatgcccttctggacccccttgggccgccggggctgcccggaagggatccacgcaccaaagggcaaatactcggtagcgactcagagggaaagtggggtctctcctgggagagcaggaggctgccagaaaagaactcaggtcaggggtg

SEQ ID NO: 914009 - DNA, 4001 bp, Homo sapiens
ggggtgaactgccaaggagttagatggataggacagcagagatagggaagggaaagttggctagggcctctgagtatcagggacctagcacaccctggtaatatgggatcattgatcccacgcctggggactacttccatagaggcctgacgagaaaagacttatacacccagtgggcccctggctcctttccttctgcctgaggccctgagcatcaccctgggaggagagaggaagcaacttcaaagttgagtgagcccggagttcttatggcactttggagctacttctagaataggggaagttggtaccccaccctctggaaaaggggtgtcagccagctgtcaccatcatacagccctgtgacccctatagtctctcttatggaggcccctcactcagggaagggaaactcaggcctcctggaaggagagggaagaggaacaggtgttatatagggatgctgaagggctgagaggcacagcatggaagtggggagaaaagcctgagcagaggctcctacccccaatatatacatactgagtgggaaagggacattcttcttttttttttttttttttgagatggagtttcgcccctgctgcccaggctggagtggaatggcgctatctcagctcactgcaacctccgcctcccaagttcaagtgattctcctgcctcagactcctgaatagcttggattacaggcgctcagcactatgcctggctaatttttgtatttttagtagagatggagtttcaccatgttgtccaggctagtttcaaactcctgacctcaggggatccacccactttggcctcccaaagtgttgggattacaggcgtgagccaccgcacccggccagggacattcttttcttcatacaggtacagacaggcacctacacacacacaaacacacacacacacacacacacacacacacgcacacacatacataaggacaaatatgtcagtacacagttaaacacattcataggcaacaccctctggcacacacacagacacacacacacacacactgctcaaagacacaccctcatgcactctcacagtcataacaagtatgtgtgtaatgaaaaggcacatgcttgttttacacacacaccatcatcaaacaggaacacacaaagaggtacccaaatatatacacaagctgtcattctccagtgcacacagaggtccaggtgtatcagacactcacagagacctactgctcacagtcacatacacatacagatgtacacatacagatgtacacactcaagcagggacacacaccgtcccctcccccccacctactggggtctcttgaggggaatctgcacccatattcctctcctctccctctctccccaggggtaagacagatcccgcccaggagagaccataaccaggtaaaggggcctctggtggcaatgcaggggaggggcagaggtcaggagtagcaaccctgccaggcaggttccggaagctcaacggggtcccagcgcatacccggtgcagccccaactcaatgccacctcagtactcaccgctgctcgcccagagctgagaccgaggagagacagaggagaggctgggcccagctgagctgtgaaggcagcgcggctcccgtttgctccaggcccgcccgcctctcagtccctccccctaccccctacgcgccgctcaggcaacgctaatcccccccaccccccgccctctcccagggcccagagccccggaggctgccagccccccttgtcgctaggtccccgctgggctctcccgccaacctaagacccgccccagacaaggaggagggcgcatggaacccctggttctattccccagaccctcacgtgccccaccccacttgtgtccacgtctctctcgcccaccgccccttgagccacacgtaaggcccggctgcacacgcgtgtcccgctccagaccccacgcgtgtccctaggaggctgccacatgacctgttacatgccacacgcgctcccgcccccacgagcacgcggccgcgccaagcacacggtatgggtgtagactggacccgccccctaaatccaggagaccatcaactatggaaaggagatctagggaacaccgtcttgaacccgccaggggttttgagtctcggacccaggagatccaaccctgaccaccctcccaggatgcagcagggggatgttaaatcagacttcaggaagaacttccttgctgcctgagttaggtgtcgtcacgcctgcccaggggtaagaggttagacgggatgaactagggaccggaagacgtgggggaccggcaacccttgtgcccttggccagggtagaagggggccctgctattttaagaaagagccgctggagttactatggcaactactctctttgggagggccagggcgggcagatggtgacctcggaaggaagaaggggtctgttcgggcagtcagggggcgcgaggacgtgcgaggcgggggcgcgcggggctcaccgcggggaggggcggcgcggactccgcgtggtgctgaaggggacagcgccagatttgtcgcactgcgcaggcgcagaggcgcgaacaaagaggggagggggacgaggcgcgcggccggaggtggtgcgcgctcacgtggctctatctttgcaggggtctgtcctcccagctaccccctccctaagcaggctgaggaagaagagatagcaagccctcacctaacttgacccctttcttgtctctccccgctgctagcttctcccttctcgctgccttgcggggtggggaaacgtggaaggaattctgggaaaaccagatgtctgggttctctattcccgtctggcttgattctggacaaggggcttcctctccagggcctcggtttccccatctttaaaatggactgatagcatagacctgcccacctttcagaggtgcccgaagccttgacgagataacagatgagaagtggttttcgttgtgatgagccagctgaagcggttgcaccggagcgccagaccgtcagcggtgcagtggctctcgcgtccttcacatccccccacacccatcccgtggatgatgggggaaggcactactcctggggttccccgaagcggatcctgggactgggacctggggacgcggtgagaggcagccctgaagctgagtccagaggtctggggcgtcattgtcccagggcggacccagccccagaccctacaactaaacccaaggccagccgagaagcactaccactggcgggctgagctgagctctcattcttcttaggactctggacctttggaggaaatgaaagggacccagttggaaatatagtctttcttcgcgccccctacatctctctcccccggcggaaacgcggcccaaactgttacgaagtggaagaggctggatagctcttcataattaatcaggaatgggaggtttgagcaggtttacttgatgagggaaacattatagcctcgccaattcattcattatttcaacaattacttattgaacacctgctacgtggcagacagtaagagcctggatagtttctccccgtttttcaaagtcgctaaacgcgaccagagggcagaggagaggccggtaacctaagagtcctggctccgccccctccgcgtttggccttgcctgctcctcccaccaccacttcgctcagaggcggctactggctcaagaggacgacagaagccagtctctgatgcccaccgcattctccagcttcaggcctcaagccctgtagccgagaaggcgaggcctaatgttacaccaccggtctgttccgcctccgtttcggggtccacccgaaaagctttcagatcggatcctcggtgagacggcactcgattaaataggtctgtctctacaggccaaggaggcgggtttggtgcggccactccaaggccaaagcgagaaaatcttactgcgcacgcgcaatagacagccgatggagccaccgatgg

SEQ ID NO: 914010 - DNA, 4001 bp, Homo sapiens
tgacatagttaagaaatctaagctggagggaaaacacgaggacaggggagtgagaactctcacttgcctgcccatgccttaccaccactgagattacactacatacaacaaacacatcagctaaacccactaaattggaaacacatatcacttcctaagtgagcagatgagtcccacagtctttgtccataggaaaagcgtggaaaaaacaacataatacaagtgaagggaaagccagcaaatacaacaatccctatcgacaactttcagctttctccgaagtgttgaaaatactatcatccaggtcaatcctgcgctatcctgacactgcacttacttcacaattaaccaagaatgagaaagtagatacaccttgctggagagcccatgcaccaaatgtactgtatttttgtatatatacttagaaagtagagtcacataacatttgcatttgatttctgtaaattcatctacattaggcattaaacaacaaaaataataatgttaacatttcagaatatttcaaagagtatttactcaagagtgagcatgagaaacacgaatgtaatctactcttcccccagtggtctcagtttccacatgcttctccaagaggatgtatctcactgtgctgagtgtgagatgaggagggcttaaagagatgtatttggaacatacaagtttttccgtaaatacaaacccattacttcctctggtggtcaactaagaaacagccatccttcccaaagctggcagaggcagatttactttgagatgaacaaagattaagcttcataggtctgataatgcatttgtacagcctctttctatcgttctgagggaccccagaaattttgttacttatagtttttattccttttcttaaagaggattcctcaaattacaaaacctgaatccacccgtagctagacgttcaagttttagaacttctttccctctcctaaggagaaacttcctaagggattttcgacagtgcatttgactataggggctttccaccttgcacgctgacttgagaacctgaccctgtctgaagactcaactgtatagaatatacaacatatacatgcatcaaatatacagataagcatctaaaatgcatcgttctaacagttggctttgtaaccactttctacagccaacgcattcaccctctgcagtaactatgttaacccagctccacttttctcgaacttcacctcccacaccaagcaatgggcgctcatggcaaatcacccaggaccgcgtggacgcgagtgtccccgccccgccccgccccgccccgccccgccccgcggcccaggccccgcccctccgtgctgaccgccggtcgcgctcttgccccggcgagaaacgcgtcgggcatgacgtcatcatacgcgacaacaccgatggcccaaccctgctcctgctgcagccggtgggcgagggcgcgcgcgaaagtcgattttcctgccgcggggaggccacagaggacgcagaggcctcgtttccgcggcccgtcgctgccggttcctctgatgttctcggcggtcttcatgctgcccggggagaccggaggagtctgggagcgtcgtctccgctctaccgtctgccctgcgcgcacgcgcagcgtctccgccgcctaccggcgcagtggaggaactggcctagctgggtttccgtgcggccccagaggcacctgctccaccggtgccctgcttgctcccagggaccagaggctggagagaccgcggcgctgcgttcctagctcctggacattcccaaggggtcccagagttaggattgatcttcaaatagaatcaccctccctgccgaaagttgccagccagtaggattggcgcctcagttttgttaggatgaggtctttctgcttaggaaaatcccaaaagagacgttgagcctttccctccagcaatctttcgaaaataagttactggaaatcaaagaatagaaggcgaggctgacagtccgaccaccgcgctcctttgcggttcccagatgtgaagagtgcaagggcaaagtaaacattcgttattgtgccctcacagcaccagtgggcagcaagcgtgaagaaatattgtcaggaaaggcacatccacagacctcaattccagtgcatgcagacagagaacaataggtgtttgtgttaaaaagtaatactaagctatggagaggtacaaaacaagtttttgttttttgtttgtttttaagacggagtctcgctctgtcgcccaggctggagtgcagtggcgcaatctcggctcactgcaacctctgcaacctccgcctcctgggttcacgccattctcctgcctcagcctccgagtagctgggaatacaggcgcttgccaccaggcccagctaactttttgtatttttagtggagacggggtttcaccatgttagccaggatggtctcgatttcctgaccttgtgatccgcccgcctcggcctcccaaagattacaggcgcaagccaccgcggctggccaagttttttttgtctgggggtgtgttgtagaaaaattgaattcagattacagttttttgttttttgagacagcgtctcactctctcgcccggactggagtgcagtggtccgatctcggctcaccgcaacctccgcctctcaggctcgagggattctcctgcctcagcctcccgagtagctgggattacaggcgaacaccactactgcccaattaatttttgtattttcagtaagaacggggtttcctcatgttggacaggctggtcttgaactgaccgcaaatgatccacccgcctcggcttcccaaagtgctggtattacaggcgtgagccaccgcgtcgggcctagattccagattcttttatccttatattttaggggataattccttcttacctgtaaagggtatgttcaaaatgtgaagacgtaaggacaaaatcagtgtatactgtgtcaaaatatgacgagtaacctgctaaagctgatataatttgtatgaagcacttacaaataatctcattttcctttggactgaaagtgaagagcaatgagttaaactctttatttcatgacattttatcattattggtccagtataaggtccctctccttaatttgcccctcccccacttttttaagagacagggttttgctttgtcacccaagctggagtggaaccatagctcattgtaacctcgaatttctaggctcaagcaatcctcctatctcagcctcctgagtagctgggactataggcatgtgccattgagcctggctccactgtcttttatctcccatcctccacatccacacccatttaacccctgcaggcaaccggttttttttttctttttatcatagttatttttgttttggttatgtattttttttaaataggctttattttttaaagcagttttaggttcacagctaaactgagcagaaagtagagttctcatatactccttcccctcctcattcataacctcccccactatcaacatccttcaccagagtgatacatttgttacaatcaataatcaatgaacctacattgacacatcattatcacctaaaggccatagtttactattggtgtaaaatagtttactattggtattggggtttactcttggtgtacattctgtaggttttggctatgtataatgacacatatccatcagtacagaatagtttcacagcccaaacatcctcagagcacagagcacaaacatcctctgtgctccatctgtttatcctccctctcctctaacccctgacaccattgatttttgtgtgtgtgtctctgtagttttgccttgtccggaataacatacaattatataattgtaatcacacaattttaatttgcttcttttacttagtaatatgcatttaaggctcctctatgtctttttatggcttgacagtgcatttctttttagccatgaataatattccaatgtctagaggtaccacagtttagt

SEQ ID NO: 914011 - DNA, 4001 bp, Homo sapiens
tgaacccctggactcaagcagtctacctgccttggtgtcccaaaatgctgggattataggcgtgagccaccacacccagcctaaaactgtttaatcttgttctcattaatagctgcagaaattgtaactttttctaaatttgtattaggttagtgtcttttactatttcagttgcataaatatttcaggagggcctggtctttgaaagctctttccagcaggtgtctctttcactaggcttatttatacatctgaatagtgttgcagatccaccaataactgaacagctaatatgtacctcacactaagccaggtgctgcttcgtatgtatctaacttgaaaaatgctaagctagttatcttcttaaggctatggaacttttacttaaaagacggtttgttttttaatcccaatgagctccaagcaagttttaggggttcccccaaaccagtgaagactttaactaaaagtagaatttcagaatactgtaatttgattagaaaccaaaccccaaaattaaacatgaagatcaatgtctgtactgaacaggcccatctggtggacataggatttgtgttatcgactagaatgctaccaaggattcacaatttctggcatccgtcggtgttaagaaaattgggttgagtaccaaatacagtagagcacacccagcctagaggcaagggccccgtaaagtagtcaggaagtgcttttgttacgattctggggagcaagtcttcctcatccctctcaccttctcctggcctccctgtaaacccacaccaccaggtacctcaatttttttcaaggccaagatgttcttaatgttggtaaattgatcgagcaaatgggtgagccactgcttgctctgcacgtcgtactcagggtcctcggtcttcaggtagtacagcagccgcatggctttggcccgcaggagtaactggcccattcctaggctgccccccaagatgtatcctccgaagaagccggtcaggtagaggggatgcctgccgtggttgtaggcggggaaggagatgctgctcaggttgagcgttttgttcacctgccaggcgtacaggatcgggttggggggcacgcagagcgccctgtacctcgcgcacacctgctggtactggatctggcttcccttttcccgcgccacgcgcagatcctgcaccgcgccgtccagtttgctgacttctgcaaaggtagctgggtccagcagtgagtcgctgtaggagaccaccagaagcgagacgaaattggcttcggtgctcctcctggaggcggagaagcggtaggagtcgttggtggtgaaatggccctgcacgaagcgccgctccgccttggccgggctccccacaggggtgtaatgctcctctaggtcttcctcttcgtccttgggtaggtacaggaagccggtgcccagcgcggctgtcagcatcaagggcgccagcaggaagatccaggggtgcgcgcccacctgccaccccagccactggaaggtgcgggacagcagcccctctaggcagtcggtgtgacagcggtgccggtgcctgcagatggccgtgggttcgggggtttcctcctccggcaggggtgcatcgtccagctccagcggcaggcggggtgcatcgtccagcatcgacggccgggggggtgcatcgtccccctctggcaggggtgcatcctgctccgacgccaggggtcctgagggttcgggggatttcgggggtgccaggggtcccgggggtggctgcttgccttccgactccgattcctgagattcctggtaccactgcggcccggtggcagagtccggtttggtgagcttgggcttctgctccggccccggcctgggcttgggctccacccacggcattgattcttcctcttaggaagcgcaggaggaacagcaggtgaaaagcagctgcggagatcccaccagacggtttcctggccccacccaacgctctcctggccccacccaacggtttcctggagaaattctaggggagtttgccctccagccgcgctccggaagcggaggctgcgttgggagcacgtggtttgccccgtcgcccaactaatctgaaatgtgtttgtggcgtgcctggtttctcaggggttctgcacatacaaggaacgcttcttcaaggccatcaaatgcgtgcctatcctatggactcgcaatttattgggagaatgtgggtgtttcttccatgcacacaaatggcacagaaattccacgtgtcctgagtgacagattttacctttcttggcattcacccagtaacagtttcaagtaagacttttatgaatctgacacacttgacttagttattatttttattttctgtccacaagtgtaacatgtacatacattctcctagtaaaaagaagtaaatgcatagaatgaaaagtggggaaaaaaaaatcaaaatctttcactcccattcctcttaaaagaagtgttaaaaagtgggtctacatccttgcaaaccctttctatgcatatacatgcatatcaaagatatagcaaatatacctttttcataaatactacttcactattcatgttatgtagatcacatttttcatctacagtggcagaagatttgaacatgtcagtgcatatggatttatcttatttttttgaactgctctatacttttccaatgtatggatgaaacataatttagccagaattttactgatggacccatacattgtttagtcatttgcttttataaacagtgctcagtaaataaatatcatattttaacctgtacacagcaaccatatctgtgagagataattctttagagtggattcactaggccaaaggataggttcttttaaatttttagagctattgagaaattaaaatccaaagaagttgtattgatttataccctcataagcaatatatgaatttgccacagcctatcctacaatgtcagcaaagtggtttgtgccactggcatcttactttggtttaattttgaatgtactgcttagtatccttatctttcctttttgagtgaactatcatatcttttgcgtgcctattccattcaatagttttcctattggattttgggattttcttcttgatttatatgttaaagaaatgaccacttttcttgtggtctgagttacaagcctcccctctcccctcatttttctcattgccatggcttatttttgcaattcaattaatgaatacttttctttcatgaattccattttttgtcataacaaatttttctttttttgtgattataattgctgcgatttgaatgaatgtgtccctccaaaattcaaaggttggaactcaaaccccaatgtgatagtctttaggggtgattaagtcatgatggtagacctcttatgagtgggattagtgaccttataaaagggctggagataactagctaggcccttttgcccttccactctttcgccaggtgaggacatagccttccttccctccagagggtgcagcaacaaggcaccaacttggaagcaaaggctgggccctccagacaccaaacctgccaacatcttgattttggacttcccccatccagaattgtaagaaataaattcctgttgtttgtaaacaggatcttagatattttgttataacagcactaatggactaatacaataattatctgctttttaaaaatttaaatattaatccatctggaatttattttagtttaatgtaggcagttaagaatcaatgacattaagtgatagttgccaactgaaaactatgctaccctttccatcataatatggaattgtaattgaaatatggctgtccaatcaaggattacattttcaaatctcctttgttcctttgtgtggccttgtgaccagtaatcagctacagaatataagtggaagtgatgggtgtttcttccagaccaagacctttaagaattgctctatcccatcccatcatctagacataggtgacagaggaacct

SEQ ID NO: 914012 - DNA, 4001 bp, Homo sapiens
agttttatttctgcaatcttcacttgctacacacaatacccttgaacctacacattaccatctgggatcagaaactactcaatatccattctatgtttatgacaagagcactgaacattaaatgctactgaagtgcaaatttcaagcactatcctacatcaccccatagggagagaaaaaggtaaatataacaaagatctagtaagaacgccttataaggtatattatggcactattgacttcaaactacaaaacttctacatacagttcaaagttgtaggtaacttaagtttaaacattaacaaaactactttttgccctcaatgtgcaccatatatactgaaaatgattctgcttctaaagttatgcaaatcagtcatattttaaaagaatctatcaatgcaactcaggaaactaaaacaatcactgcaagattctgatgcaatatgcgtacgtgcaacactaattttcattttattctgatctaaacccttgatctagggcctaagccaagatttaatcgaaatatgctcaacctcaaaaagcgtctacttttttgttcatttaggagaccggattaccgagctcgctaatccactaacagtgtactgtattctgtattaacggacaatagccctcaggaagagaccatatagatagcctaagaaagcaatcggtggcttgacacttgcaaccaggcaagagttccgtctagccaaacacaccctaggttgaatacacagaaaggaaacacaaaatatatgacctagcaacctgaccagggttaaatgttatagtcacccaaactacggacattttcgcatccgtctactcccacgttctaagagagtgacagaaaggtaaagaggagcagccgcagaaatggatacaggtcaagtctaagtcgaatccatcctcttgatatctccttttgtttctgctaacgatctctttgatgatggctgtcatgtctgggagcctgtggctgaagaaaaaggaggagagagatggcagaagctgctggtggcggggcttcttctgcaggatggaaatggctctggacttggcggtagctgatgcccctcgctctgccgccgcttggctctggaccgcagccgggtaatggctgctgcggcggctgctggatggttgcagcgactgggcctgcttctcctcagcagccagaggcctggcagcggcggcagcggaatggggagaagacgaataatcctccgaacggctgcctccgccggcggcctccggagcccgggccacggggggtgcggcggcggcgcacgggaggtttaaaaccggcccgggtccctggatgtgccagccgccgccgccgccgtgttggaggcagtagaaggggagagaccaactctccggcgttcccagccctggaaatggtgacaggcgactcagaccccctccctggagctgcagccgccgcggccgccgccgccgccgcttctcccccccgctccaggagcgggaggtgccgccgccgccgccgcgcctcagccggctcccgcccgagcccacggcttccaccttccctttcaggagaagccgaggaagaggctgcacggttagaaaagacgaagaggaggcgagaaacgccgccgctgccgccgccgcaggccggccggctccccgagggcgctgcccccgcggctgctcacaggcgctgagaggggctccgggccgcggccgccgccgtctctcatctccctcgcctgagcccggcctcgcctcacagcggctcaactctcaaacttccatcatggctgcagcttccgagaggagagaactgagcgcagtcgcgtcccagcgccgagcgcgtatcctgccgcagcgcataaagagtcccgccacatcaccgcccgccggcctgcccgccccctccgccgccgcgccgggagcccgggcgcctcggaagaccgaggggaggcgggaggcgagcgagaggcggacgggaccgcgccgggcgaggggagggcagggcagggcagggggcggtaggagggggcagagcggtagctctgggtgcgagcgcagagtccccaagccgcaggctctactgagcatgcccagtgtagctgcctggggcttgctcgggccggttcccagccgccagcctgcagctgcacttgctgcggcttttgcagcaacgcgaggcgaggataacgagctaagcctcggcctctgcccagaaacccagccggaggcagggtaggctgttgtggggcgggggtggaggactgatgatgaaagctgagatgggtgcgttgagcagtgtcactgactcgagtctgaggttacctgtgcacaggtgaaaaggaccaggtgaccacgctgctcagtgtagagggaaatgcagggacggtccctgcaaggggaataccctccccccttgcctctacccctagatttccgcggcgtggactgcattcgctctttccttttgcaccgctgtcggatcacaatcgttcgcagagatttgactgtaacagcctttgcctagagattcccccttcccccaaatctgtgtcctcatggtgtcagtcttagcacaaagagcaacctgctattgtgtcgccagcgtgtatcacctcatccggctcccttgcagcgccccacctctcgcttccccggtaactcggctcgtttgccctaaaaatgaaagctctcagccgagcgtgctgaacgtgaacacatagccgttgaatttcaagggcccaaagggcacctatctaaatgaactgaaagaggatccctgtgagtgggacgcaccccgcaggcctctcctgcgcccgctccggtgcccccaagagagtcgagcatctttcccctcgggctccaggtcggttcgcggcgtcggagtcaagctcggttctcagagaccacctagccccgcccccccttggccgccgtgaaaacccggcaggatggatcgcccggggccaggctccgcgcgccccggccggaccgtgcacgtttggggttaccgggttgagtggaaagtacggaacggtaggaagctgcagcccagcgagtgggcggggcgaggagacctaggagggttcaaaaggaggtggaaggatacacgggccacagtcggaactactttccgaaggaggtcacgtgtgtccctagttggggaactttccaaattcccactccccagtgatagctccggaggcaagtcgtcttcttcctttgctcggggtgctcttgcctggtgcaggcagcggaaccccaacccttcctgcgccgcggcggaaacaggggctcggaccagcctcccgaaggagcgctgtcggggctggcgcttggggaactggttacacaagcacccacatccaaacacgtgcccccgcctccccgcctgctggctgccgccgattcttacagaacgcggggagagagtccccaaactggtgccactcctcgcctgctaccctaagagcaagccaaaggactgagacctgagactcactccttgctctacatcgacctattctgcgccttcccaaacgtgggaaaaggagctgggcgctagggctctcgggcctctccatcgctgatgccctgccgcttagggtgaacccttttggttctgtgcttgagggtatctcctgctgcagcccagagcgtgcattctccgatgttgcaacaaacgtccagtcactacccctgagctggtgagcgcgccccacctactgtggactcagccaagtgacttatctggtctgagaacctagtcaatggccgtcagcccagaacaaacctgtcaagtctgtttacagccccgattgggctgacctgtcaccgtgagagagctgattcggaaatgctgagagttggatcgcactcctaccccgcaccccacccgtcaaggatctacaaagcaagtagtcgacccgcttaaagagaatgagcatcaacaccagtctgggaatttattgttttttcatttcccttaggaagtagaacta

SEQ ID NO: 914013 - DNA, 4001 bp, Homo sapiens
ttaccttttttttttttttttttgagacagagtcttgctctgacacccaggctggagtgcagtggtgtgatctcagctcacagccgcctctgcctcccaggttcaagcaattctcgtgcctcagcctctccagtagctgggattacaggcatgcccaccaccatgcccagctaattttttgaagaaaagaggtttcacatgttggccaggctggtctcgaactcctggcctcaagtgatccacctgcctcagcctcccaaagtgccgggattacaggtgtgagccaccgcgcctggcctgagaccactcaccttaatgtgtctagaaaacaggcaggccaggcgcagtggctcacgcctgtaatcctagcactttgggaggccgaggcagccagatcatttgagcccaggagtttgacaccaacctggacaaaatggcaaaaccccgtctctaccaaaaatacaaaaaaaaaaacaaaaaacagaaaataaaaactagccgggcgtggtggtgtgcacctgtgggagactgagctgggaggatcacttgaacgggggaagtgaaggttgcagtgagctgtgatagcaccactgcactccagctttggtgaaataatgagacctagtcttaaaaagcaagaggccgggcgcggtggcttacgcctgtaatcccagcactttaggaggccgaggtgggtgaatcacaaggtcaggagttcgagatcagcctggccagtatggtgaaaccccgtctctactaaaaatacaaaaattagctgtgtgtggtggagcgcgcctgtagtcccagccactcagaaggctgaggcaagagaatcgcttgatcccgggaggcggaggttgcagtgagccgagatcgcaccactgcactccagcctgggcaagggcgagactctgtctttaaaaaaagcaaaagaaaaccaacttgtagaaagtcactgagctggaaccagaactagaatagggctctactctttctgggtccaaagttctttaaatcagcaacccctcttactgcctatgtaagggtatacctttagttcctgttgacttgggatgtacaaagaatgaggtagtctaagagagtaacagcacactggctgtggagtcagaaagactccacctctaaactttgtttccatctctaaactttccagcagtgtggcctaatttttctgtaccttagctttgtcgttatcactagaatccttcacagggctgcagagtggattaagcaagagtgcacaggactcagacatatgaccgctggtaattggcttttataaactgtcaaaaaatatagacctgtaatgccagcactttgggaggccgaggcagcagactgattgagcccaggagttcgaaaccagcctgggcaacatggcgagacactctctacaaaaaatacaaaaataaccggacatggtggcacgtgcctgtagtcgcagctactcaggaagctcaggaggctgaggcaggaagttcgcttgagctcaggaggtcgaggctgcagtgagctgtgatcgcgccaaatgcactctagcctgggaagcagagccagaccctgaatctaaaaaaaaaaaaaaaaaaaagcttattaaaggaggcttagcacagctacccgatgacgcccccgggcattgctgtcgagccacagggagctggcgccacacgggactggcgctctttgcaacgtccctcaagcacttaaggagaggcggcagggcccaagcgcagcggctagaaaatccttccttccggcaggaccctcgcgtggagctctgcagcgaaccctggccgcgcggcctccgccgtcgggccccactcttcctactgggcccacagttccggctcctgctctgactccaagaagccttacctcgggtacaacgcgctgccttctccctgggaacttccggcaggccaacttccctggcctttttagtctcccctgtgccctcccacttcgccctctggttctctccccgcccctggcccgaggtcacgccctcaccgagtcctaggacacgccccgtgggtccttgccaagccctacctcttcgtaggacacgcccttcaaacccttgccacgccccaccctggtccggggccgttccccgcgtttttgcctggccacaccctcctgcaggcgctgtctgactgtcggtagtttggctgaatgaaaaaaattcggggctagatccccaaacggaaagaaactgttgcattttccccagatcccagttctccatagaacagtctggaacaagggagcattccgtagctcttttggttttccccaagaataaatcggaggtggtgctctggcaatttgatgtcacagtgggttctggatcctcatgctgcatacggagaactttggtttttgtgttcccacttgtcactgtttcctgccccggtgccgcgtttccttctctttagaattagagtgccgtgctagagcacttgaactggccctggtacttgctgtgactgaaataaacttagtatgtgtgagtctgttggcaaaacatgatgcttggagcagctgccacagtaaagagtcatacctttaggtattgtagggggccaagggcaaacctctccttcgtcctctgaaagtttgctgaaaatcaactgacaaaagacagtttcacagtagaaaaggcatacaaatatactagatcgtaactttatgtgatccgggagccttcagaatgaaaacccaaagatgcaggggaaacggtccattttttcgcttaggttcaataaagtatggaccgccatgtattcagctggtgcaaaagtaattgcggtttttaatggcaaaaaccgcaattacttctgcaccaacctaagagatactacgatggcataaaaagggtctgagctaatgccaatagactaagtgagcaagccctgtctgtttagattctttttggcttttctgtgcagtgttccttccttctgggtatagagcaggatcctttctggaatgggggtcttatgacctacagtcaaacaaagcagggcagagaatttctttaccgccagttttgacacagaaaggcaggggacacgcagagtcaaacttttaggttttatgcttggctttggggatgaggggttctggcttctgtgaatcaccttggggaagagggattccagtttctagaatgaggggccagaggcaggaggacatgaggttagagagagctgcttctaaggccttcattttggggtatcattttctgaaccccaaccatattacactgtcatcaattattattattattattttgaaatggctctgttgcccaggatggatttcagtggtgcagtcatagctcactgcagccttgaactcctgggctcaagggatcctcctgcctcagcctcctgagcagctgggactacaggtgtgcaccaccacactcagctaatatttgtaatttttgtagagatggaggtctcgctatgatgcccagcctggtctcaaactcctaagctcaaaggatcctcccacctcagcctcccaaagtgttaggactacatgcataagccacagcacaaggcctagtcaattaattttatcctgaattctgagaaaaaagagaataggtatgcagatgggcagaagctacagatgtcatttcaaaggaaagtagagttttaataataatattaatagatgatgtttatcggggccaactctaccaggttttgtaatgggtgtatgttattttgtttaagattttgagcaacctgcatgtggcaggagctatttccctccaattacagacaagaaaacaaacttaggcaagcaccttgttcaaggataggactagggacccagattagttgatatcagtcactacacttgccttcttagtaaagaatggggaatttttttggtttgtttgtttgtttgtttttgagacagagtcttgctctgttgcccaggctggagtgcagtggtgcaat

SEQ ID NO: 914014 - DNA, 4001 bp, Homo sapiens
atctgcaaaatgggaacaataaatactccaggatgtatttgcatagggtgtttggaaggtggcccaaaatacagacaaaagttgctgtgtagggcaggcgacctagatgaagtgctgtcatagaaagttgaggtctaatcctctaacctacccacctttaggctaagtctgaaatgtagtttcttactaaaaagctacactttgagtctctggtttggttaatttttactaagttaattctttttaaagagtatctatcaaatcatgtactcaaaaaccttcaggaaaaggtgtaaatagcatttattgacaacgcttagaaataaaccatatctggcaataaataagcaggacgttttctggccagagttctcccaacaacacagagttcaggaaaatcataggctattgcatattttcagaaaatcaggataagttatataaattatatatttaaaaagaaatcatctatttcatcaactcaacaggataataaatagataaataataaacagttgattgccattcgaaaaatttgattcttaaattacatttacattatagatatttacatgtacaatatgcacagagacataatcagatcttcagccgagtctgggacttctcaggacacaaactcaaatggtggttcgttttctatgttgttgaaggaagatttgctgttgagttttctggggtcctctggggtccagactttggctgttcggataatattttgttccttgagttgtttttcatcagtccatgagagagagtgtcctgctaggggagggaggccataatcagggtcgctgggggagggggaccctggacaggtgagaagagaaaacagactgtgaatatccaaccacattcccattggtcccatcaggtcctttaggaccctttcctgggtgctctccggttatactagaaccaccctcttcctccacacttcaagtccccaccgtcccctcccaggaatccgaggagctgcaagtctggcggggacgcgcgcccttgagagccgcggtcaacgtggcagaaaaataaaaaaaaaaaaaaaaacgagaaacgcgagctcgcattcaagtttttccgtgcccaccgacaatccgtcggtccgactgtctgcttggcagtcagctcccccagcccctccggagccttcgagtgcccgaccccttctccctgagctgggaagcggaagcacttacgggtgccccgatggcagatgatgaccttctgggcctggctgcccgggctgtccccgcccaggcgcccgccgccgcccggccccccgcagccgcccgcgccaccgccgcgcaagggcaggtcggcctgcacgagctcgctgaggaagttgatgtagccgatggccaggcgcagcgtgtccaccttggagaggcgcttctcgtagggcagcgtggggatgtgcgagcgcagcccctcgaaggcgtcgttgatggactgcatgcgccgccgctcgcgcacgttggccgcctgccgcagctgctgcagctccgcctcggagcgcacccgccgccggcgccgcgccgccgcagccgccgctccgctcaggccgcgcagccgcgccccgggagacagtactgccgccccggcgcacgggtaggccaggcacgagggcggcgagccgggcgagtaggggaagccgcctgggggcgcccccgtctcgcagcagtagccgccgccgccgccgtcgtctggctcaccgaggccccccgaggacggcggggcgagcgctagcggggcggccgggggcgcgggctgcagcagcaggcacgccccgtcgcggtagcagtactcgtggagctggtggctaaggaactccacctcggcctgctcgtccgccagcagctcatcgccgtcctccagggggtcccgtgaagactggtcggtgaagaagtcgtcctcgtcgaagtacgaagaaggaaaggcgtctaggcccccggggaagtgctccagcaacaccgcgtccatgctcgccgccgcagtgggcagcgggactgccgggctgcgcgtgttagttcttggtgagtttctaaggcccgtccgagcccctccctcccggggccctggctgggggcagctaggcggccgccgggctgcccgcccccgggcctccctggagtgcccgcggccgctgcgctctggcccgcgctcgcgctgcgctggggagggctgtggcggacttcctggagctgagggccggcacgcgaggattcttataacaacatccataggcgcgtgccagggacccatcgcgccagccaatcagagcgcggtgtgccggcggcgagggggcccggaggcgcggcggtgggcgggggtggggggcgttttgctccctttgggagctcctggggcgaggaaaaggcggggtcgcgcggcccggggctcctcgcaccgctctcttccctctcctctgcctctgcatactggattctgtacctgccccgcgtgcggctccaggggcacctgcgtcccgcggtgcccgctgcgtacccgcgcgcgctgagcagcgccggctccttccgccctgggactggggcagccgcgcgccgcgtctacacgcggccagagaagttcctaggggtgcgcgccggtggcccagacggcgagagcggagcccgcgcggcgatcgtcctcctccgcggcagcctgggcaatctaagggtgctgccctcagggaccaggtgggtgcattccgccacccccttatccgaggtgcgcggggctccggcctgggttctgctgggggcttctgtcccatctctggacttttcaagggcttttgcacagtttgcagagtatatgcgggtgtcattggaaggtgatccgggcccactcccactgcgttccagacgcaacacgggggctgggagcgcacctatgggactccgctctggagcctggctgtggtgcctggtgcgggtccccagcgacatcggctcagtggctgcctcccctgccctccccggcccggagaaaggaatggggagacgggaggggcagcccccagagcagctcagcggggcgcgtttcttctgagagcaaatctagaccctagggattctgagcaataaactggatacaaaaggagtccattgaatcgtctgctccggcgcagtccggagggaaggcattgaagttaaagggcagaatgtgaatcgttttcaaagcccgagtctctcacctttccgactggccacagggaccatccctgaatgacttgtttttttctttctcgacctttcttttctgaaaaaaaaaaaaaacacaaaacgtatgcagctctgccccaagacagactttatcacagactgcgatgcaacgtgaattcctctttttaagagcaacaaagaaacactttcaaggtctgggcaattccggttaaaagccaggctgcagcttccaccccgggagagttcagaagcgcagccatcgtgcgtattctctctacagaggactgaaaggagtcgtcctcctgggccgcttcctttttcaggcacttgtctcactagaggcttctgttgggtattcagacgcctctcaaattccaagtcatgcctcttcagattagtgatttaaatacgcttcttggttttagacattgcactgtaattaactgaattgagaacaaagagttaaaccaaaagatatataaggttagaaggccagagattgccttaccttgaactgccaacaaccccaaacaattttaacccaaggactgactggttttcagtagttttttcctgtgttagtttctcagccttcacagtgaaggagtcgttcactatttgcatatccttaaaggcaaatatggacagtttcccggtgatagagcctgagctgtgattctctgcaattagatttctctttctgacctcaaaggaagggaaggggtgtgtgtgtgtgtgtgtgtgtgtgtgtgtgtgtgtgtgtatcaaggccagagatctagccagctagtgatg

SEQ ID NO: 914015 - DNA, 4001 bp, Homo sapiens
aaccaacacagtcccctgcatagtaagtcctcagtaaataacatttgtatgaactgtatttggcattcaatatcatatgctaagcacataatagaaactcaatcaccataggtaaagatttattaaatttttgtcaatcacatttttctataaaccctggagaaagtttaaaatattaagccggaagtggtaatcccagcacttttggaggttgaggtgggaggattgcttgaggccgggagtttgagaccagcctagccaacacagtgagaggccatctctatttttaaaaaattaaaataaaatattaggcccggtgcgatggctcacacctgtaatcccagcacattgggaggccgaagtgggggaatcatttgaggtcaggagttcgagaccaccctggccaacatggtgataccctgtctctaccaaaaatacaaaaattaatggggcgtggtggcccacgcttgtagtcccagctactccggaggccgaggcaggagaatcgcttgaactccggaggctgaggttggcagtgagcggagatcgcgccaatgcactccagcctgggcgacagaatgagtctccgtctaaaaaataaaataaaatactgtcagggcgggatggctcacgcttgtaatcccagcactttgggaggccgaggcgggcggatcatgaggtcaggagatggagaccatcctggctaacatggtgaaaccccgtctctactaaaaatacaaaaaaattagccaggcgtggtggcgggcgcctgtagtcccagctactcgggaggctgaggcagaagaaaggcatgaacccgggaggcggagcttgtagtgagccgagatcccgccactgcactccagccaagaccgagcgagactccgtctcaaaataaataaataaataataaaaagaaaaaaagaaaatagtaaacttttcctcgcgtttacataagttaatacttcgagtgataatgggaaaataacttttttaaaaggcagtgcaattgagaaatggaaaagcattttcccaacaggttttgagaagcagttgacacaaaagtcactttgagagctctgcgaagagcgacagtcattgtgtaaccttaacttgcaaagtcatactcaaagccaaaaatcaaggtccagcttatcagccacggagcctgaggccataaagatgctgggcaggagctccacgctgggataagtggggtggttatttcaaaatcgtcccaagtgacaagctctaggacgtgctgtgctttaaaaaaaaaaaaaaaaaaaagtcgcggtgaaattaacaggggcgaaaactctgcccagcgatcgcagcatgaagctctgcgctcccgagaccatcgagtggccagggctgggcgctccttcaacagcagcgaaggcagcggcgccggggcagcagccacctcccccgcgggccggcaccgcattcctgcccggttctatacttaacctccggccagcgccccgccgtgcaccgtattaggcaatgccaggcgcgcagggcccggcccccccgcccgctccattcaaccccggcggtggccgcggcgacagctcccttcccccacggccgctgcccgcaccccccgcgccccttacaccccggcccgcgccccctgaacccggaacctccgcggaccgcggcgcggggagggcccgagggtgccccgcggcgcgcgtaccccgcggtcatggcgatgtcgtagaaggtgagccaggcggtggccaagacccccaggcgcctccgctcgccgggagcctcccggtcctcgccggcctccgaggcgccgccgttggtgccgtcctcgtcgctggacgccatggtggccgcgcacctgggggacgtgggagacagcggcaggagcgtgggaggggaccctgcccagcctgcagcccgagagccgctgcccgctgccgccgcttccgtcaggcgccccatgtgcagcgcgcagggggctcggcgcagccagctctaccgaccgcgagggggaggagcggacgcccccggccaccgcccgtcacgcccccgccccgccccgccccttgggagcgcgcgccactcgggggccagaacgcctggccctggcactggggatccaggacccgcgagccccggcacgctttccaggcggcgctgtagtttccgctcccgaggaaagtgcacccgcctcgctagctgcgggcgcctcttcatagagagacgcccagacgccttgcgccctggcgatgcgcaccctgcgagtgcatttagtggggacacagggaacgcacctgaacttggcgtggctctgccctgcctggccttttgtaaggcagtttctcaatacgcaggcagggagcgggatcttcccgccactcattcttttctttttagagatgcggtctcagtctgtctcctaggctggagggcagtgacgtgaacatagctcactgcaatttcgtgagctcaagcaatcttcccacctctgccttccaaagttctgtgattacaagcctgagccacagcgctgggccaaacattcattcattcttaagagcttctggggaagaaacgcctatttcgccctgtttcccgtttactagcgagtccaacaggtcttccaacagtgagaagaccgtcccacttgagtgatttttttttcctttttcatttcttatttttttttttttttacagtctggagtgcagtgttgtgatctcggctcactgcaacctccgcctccctgattcaagagattctcctgcctcagcctcccgagtagctggaactacagtcatgcaccaccacgcccggctaatttttgttatttttagtagagacggtttcaccacgtttgccaggctggtcccgaactcctggcctcaagtgatccacccgccttggcttcccaaagtgctgggattacaggcgtgagccaccgcacccggcctcacttgtgtgaattttaccggagcgtgtgtgtgtgtgtgtgtgtgtgtctgtgtgtctgtgtgtctgtgtgtgtgtctatttaccaagtgtcaggcctctgagcccaagctaagccattatatcccctgtgacctgcacgtatacatccagatggcctaaagtaactgaagaatcactaaagaagtgtggccggttcctgccttaactgatgacattaccttttgaaattccttgcacctactgaaatacaacccccaaattcctgaatcctcccattttattagctgtgtgaacttggacaacgtaacctatccatgcctcagtttccttagtggaaataatttttaaaaatcgtgagcagagatcgcccgttgcactccagcctggacgacagagtgagactctgtctcaaaaaaataaaaaaaaaaggaaaggaaggctgggtgtggtggctcacccctgtaatcctagcactttgggaggccgaggtaggcagatcacttgaggtcaggagtttgaggccagcctgactaacatggtgaaaccccgtctctactaaaaatacaaaaattagcggggcatggtggcgggcgcctgtaatcccagctactcaggagttgaggcaggagaatcgcttgaacccaggaggcacaggttgcagtgatttgagatcgccccattgcactccagcctgggtgacagagcgagacttcttttcgaaaaagaataaaaataaaataaagggaagaaagaagtaaaactgtttgcaaatgagagcaatgtgtttcctagaaaatcccaggaatctcgaggaatcctaaaaaaaaaaaacctcctggaactacaagatcaacataacaaaaatcaattgtttttctacatgtgtacacggaacaactggaaaatgaaatttaaaataaaccatacaacgttaatcagcatccaaaaacatgaactatataggcataaatttcacaaaatatgtgtgagacgtatacactgaaaattataaatcattgctcaaaactataaatctctgctga

SEQ ID NO: 914016 - DNA, 4001 bp, Homo sapiens
aggaggaagtcaaatttgtccctgtttagagatgacatgctcttacaaatgcaaaaacctgaagaatccaccaaaaaactcttagaactgataaacaaattaagtaaagttgcaggatacaaaatcaacatgcaaaaatcagtagcatttctataaaacaataacaaactacctgaaaaagaaatcaagtaagcaatctcatttacaataactacaaaaaataatacctaggaataaatttaaccagagattaaagatctctagaataagaactataaaaaattgatgaaataaattgaggaagacacaaaccaatggaaagacatctcatgttcatggaataaaagaataaatatttttaaaatgacaatataaccaaagaatctgagagctcaatgcaattcctatcaaaataccaatgacattcttcagagaaattttaaaatcataaaattcatatggaagtacaaaaaatactccaaatagccaaagcaattctgagccaagaaaaacaaaaacaaaataaaaacaaacaaacaacaacaaaaaaaaaacaagaacaaagcttggggtattacactacctgacttcaaaatacactacaaatctatagtaaccacaaaatcatgatactggtataaaaacagacacatataccagtggaatagaatagagaacccagaaataattccatatgtttatagccaactcttttatgacaaggcacaaagaacatatattggggacaagaaagtctcttctataaatggtcctggaaaaaactggatattcctatgcagaataaacttagactcctatccctcatcttacacataatctgacttacagatggaatccaggctcacaaaagcagatagcagaatggtggtttccagggtatagaggaaggaggaaatggggagttgttggtcagatggtatcaagtaacagttacacaagatgaatacgttctgaagatctgatgtatagcaaaatacatacaatactgtattgtaatgatatttgctaagagggtagatcttatgtttgtaatacacacatacacacaaagaaagaaaatggtaactgtgaggtggtggatatgttagcttaattgtggtaatcatttcacagtatatagacaaatcaaaacatcaagttgcacaccttatgtatacacaatttttgtcaattatacccgataaggattggaaaaacacttctagggagagagcaataataatgacaaggagggcggatagaagagggaatagaagctgggctgaaggtggaaggaatgagaaaaggcataaaagacatactgaaaaatgatggcaagctactaatgttttaagcaagacaatggcaatatgggtcggctgggagacagctgacatttaactaaaacactgcattagtagatgtatcaaaaaccttagaaatgtatatgccctgagttcacagctaacaaaattatggaaacaaacagctttgtggcagattacaggttgtttttattgtcttgttgttttctttgtgttttggtgcttttttgtacttcccaaattcttcacaataaacctatattacatttataatcaggaaaaaaaaatgccatttgaaaagggtaaagtaaaacactagagtttaattgttgttactctaagcgtgatggcttattagaaatgcagagtcttgccccccaccccaccccaccaagacccagaggatcagaatatgcaggataataatccacaggtggtccctatgcaaatctacagtctgagaggcactcctgtagctcctcctgatcccatacccacaaaagtagatgatgcacctaccaggctctgctctaaagtccctaggtgaagacatgttgttcccatcccctaaatgagactggtaaaaggcttcttcagaaaaggagccttagtgtcctgtgagtcaggccaaaggtctagttagtatcctgggggccagcaaacaatttttgttcacctggtaaaacacacaaagccaaagatttttctgttacacaactggagctatcacagctttgacatattattactcatcaattcaaaatatttaaaactgcaattttaattaaagacaaaataaatttcatttgaaattttatcaaataatttcaggatattccttgagaactggagatacgcttatttattcaaataccagagcttaaatatgctataccttgcattccacaaataaatatgtgaatggcccctccactccaatgacgtatctctttatataaacacacacacacacacacacacacacacacaaattcaatcaatgtcactcaatggaaactcagttatttaaacgccacacctaagctaaattaggtgctgagaattcagtactgaataaataagaattaattacagagaccgtcttcaaggagttcttgttcattcaatctataaaaagttctcacacagaataaatcttttttcttttctaattcttgccataaagggcctgtaaggccatgttacattgctcccattggttaaaaccaagaatacttttatctggagacctttccatttactacctgcaaataaaatggtattactataatctgaatctaaagttaatgtgtgaaacagatttattttaaaaactttgagatataggtgttaaaaaattatttaagactaggtgtagtggctcatgcctacaatcctagcactttgggaggccaaggcaggaggatcgcttgagctcaggagtttgagaccagctggggcaattgggtgaaatcctgtctctacaaaaattagacgggtgtggtggcacacacctgtggtcccagctacttgaaaagctgaggtaggagaatggcttgagcctgggaggaggatacagtgagccaagatcatgccactgcagtctagcctgggcaacagagccagaccctgtggcagaaaaaataaaattaaactaaattaaaatgtgaaagtaaggcaaaagataagtggaatgtcacttcaatgtcataaaataatgacaggccatcccaaagattacttatgtggggaaattgtactttattcagttcattgtttactactgattaaaagtcctagacttaatgcaattacaacgtaacctatagatttttgtccagcagtgatacaaataatttctgtctgataaggtaacactaaagattataatttatttctgtctggcattaaccaggttttcttaatctaatctagcattcttactctaacattggttcaaaacgccagtgaaaaacctagatcctcaaactgttctttgaactacctttgccatcttcctggtttcttcactaattaatacattgagtaaaatgtttaacctggtttcatttcaaatttgtgagtcacatttataatttttaaaaaactctgctttgacaaggggaagaatatcttttttaaataggaggagggctaggcacagtggctcacacccgtaatcccagcactttgggaggccgaggtgggaagatcacttgagctcaagagttcgagggcagcctgagcaacccagtgagacctcatctctaccaaaaattaaaaaaaagaaaaagatagccaggtgtggtggcactcacctgtagtcccagctacttgggcggctaaggcaggaggatcacttgagcccgcaagatggaggctgcaataagctatgattgtgccactgtactccagcctatgcaacagagcaagactctgtctcaattaaaaacaaaaacaaaaggatggcagtgttcttgtgactggcagtgaggtaacagatttcagtaaggagccttccctggaagcagacatgagatcttaaggacctcagaattaactaagaacctctaagaatgacacctaagcttctgcctaccaactatgttattgaaaagatacaaaatagtacaattttaattaaagacaaaataaattttgtttcgaattttatca

SEQ ID NO: 914017 - DNA, 4001 bp, Homo sapiens
ttacttaacctcttggagcctatttttgcatctgaaaaatcaggataataattgtacctgccttgtagagctgaggtgatgattaaacaagattaggcatgtgatgtgcttagaaaagtacttggcacttttaagagctttctgtcagccattattattatttgtattttaaaacagctcaagtggtcagggagaaatgaaaatctattaaactgaaaattttcctgccaatcttagatttgtagattctgtagattaccagtacatcagatccaatatgaaatgcagtcataaaagattttcacaaaaacttaaggactgtcactgtgacaaaccccagcccaaacagtccaggacaatggctctaaaaagcaaacatcttcaattatcaagctgtgtacatgtaaacacaacaggaaccagacttctgagtagctgcaaactgcagttctctgtgatgggagaacatgccccagaacagcctgtcaagtggtaattgccagccatcctcagtcacatatgtataaacagaaaagaaaaacaaaacgagggctcaaataaaaagcgttaacattcattaaacgcctgacactctattaaatgtttttcatgcattaccttctttaatcctcacaacacccttccaaagttgaacatgaaacaaccacactggtttatatcactttaaatgtaagactacacgtctcaaatgggccctgagcactgcctgggaatccaactctatttctctagtacgctcactttcaccctctctaggactctgtcacatatctctcctccaagttcccacacctttcctctcccccgctgccctccctctaagctgatggatgcctataccaatagactcttttcccaccacccactgtatctgcacctgttatctcagcttcccctctagttacaacagagtaagtgtccctgctcatttcaaaaccaactactcacctgcttagggtcttctcctttctcaggtattcaacaactaccctttacaatgttcccctctttcatctgcagcagtttttcctttctacgagtttaatcacattgccatataaacattctgctttcttctatcttgaaaaaaactctacccaaccttaaggcccctcttccccattaaagttgttcttgtcaaaatgattaaaatcctcctaattaccaaagtcatcttatacggtaacattcaacatggttgaccactacctccctcccttttttggcttcgcctcctcttctttgtgtacactattaaactagatgtcttcaccagtcccatatattttaaatactatgtacagtatatgatgccgattccaaaggttaactctagcccgacatcctccagaacttcagatttaaatttctaaaaagcacatttgatatctcaacccaaatatctactagataatttatgtgtgtatatttcaccatactaaaaaaaactaccaggtgactgataaatggagagaaggtgaataggtaatgtgaaaaatcaaatgtgctaaatattcatggcacctgtaggtggtaggtggtcagagtcctctgcaaaattcttcccagctatgcttatgtcttctattgggaaaaacctactgggcatctcaaacctaacacattcaaaacataagtactgattccacaacttccaaaaatgaaacctaccccatcctacagttttccttgagtcaaggctagcatatgagggccttggcatatgggggcattgcctatcgcgttcatagatattctgagcttctagaacagcatctggcacacaggaggcgttcaaaatagctgctgaatggattgatgaattcatgttctttctttctaggtccctcgacctccacccgcccttgagtcattgggaagttctgggctgtctcagcgcctgatgatggcttcttaccaatcataccacacggctgctcctcagggagttggtggcattcccctaccacagagccacagggttcctgtcccggtcccgtctcgcataggcgccccaacacgcgtcacagtgcagctggcatcacacggccagaatcacgtcctgccctctggctgcagcgacactacttcacagctcaggcccacccgggcagtctcccgggccagggccacaacccacgccttgtgacccctgcacgtcaacggcatcttccttcttcacgcccgccctcccacagcccggcgcagcggcctcccgcacgccccctgcccacctggcccccagccacctttcctcacctgggcctgcggggccgccccaactgtcccgctgcaaccccagcagcctcgccagttgggtccacgcctagcctgccggccttcgtcgctatccaatcccacctgcgcccgcgagcctgcgcactggagctttgccctgcgccgcggcactctgccctgcgccgcggccctctgcttgccaggccgggagagacagaacctgcctctaccggtcttccaaggcactgagagcccatcgccgcggacgccgctgtaaattccctgcgggccctgtgcaccaccctgtgcgggtccccctctcccaggccaggctgataatgtcaacagctctctgagctatgctcatatcctgaaccactgaggactgtgttctccaggaatgctcgcctgacccacgcctgccctctaagcccctaatgaggccccagagggctggggtgggggggtctctttgtagtatcagagcagggcagataggcaaaaggagtcagagcctgtgccagaatatgaggtcagttggctgctaggtcaattaagacaacttcagcaagggtggtcaatgtagagggaattcaatcgttggcattgcctgaaaacaggaagccagaatctttttatcttgacgaacaaacctctattcattggtcctgacctgagccactttggtgaatccagataccctgaaggtgtgacaagacctgcctcacttatcccccagccttcagtgctggtcccacagagagccatatgcttgagctgaactgcagttaagcagtgacagctaccctctgtccaggctctgaggccagccttctgctccgtgagtcactgacagtgagtctctacagagactttttctttctgtagcagccaaggtaccctgcaagcaacccacgccattgccatatgtcttagtttgtttgtgttgctataaagcaatacctgaggctgggtaatttataaagaaaagaggtttgttagtttcacagtttcacaggctgtaaaagaaacatggcaccaccacccgcttttgatgagggcctcaggaagcttccactcatggcagaagacaaaggagagccaatgtgtgcaagacagaggaagagagagaggtgggaggtgccaggctcttttccatgaccagttctcatgaaaacaaagactaagaactcactcagttccatgagactagcaccaagtcattcataaaggatctacccacatgacccagacacttcccaccaggccccacctccaacattggggatcaaatttcaacactagattttatttatttatttatttattttgagatggagtctcgctctgtcgcccaggctggagtgcagtggcgtgatctcagctcactgtaatctccacctccccagttcaagtgattctcctgcctcagcctccccagtagctgggactacaggagcatgccaccatgcctggctaatttttgtatttttagtagagacgaggtttcactgtgttggccaggctggtcttgaacacctgacctcaggtgatccgcccgcctcagcctcccaaagtgctgggattacaggcatgagccaacgcacccagcccaacattagatttagatgggacaaatatccaaactatatcaccagggtaagattcccctttaaagatggaccccatgtctaatgtttcttcatagtgcctaacatcaagattctgcactggtcatcatt

SEQ ID NO: 914018 - DNA, 4001 bp, Homo sapiens
aaacagtccaggacaatggctctaaaaagcaaacatcttcaattatcaagctgtgtacatgtaaacacaacaggaaccagacttctgagtagctgcaaactgcagttctctgtgatgggagaacatgccccagaacagcctgtcaagtggtaattgccagccatcctcagtcacatatgtataaacagaaaagaaaaacaaaacgagggctcaaataaaaagcgttaacattcattaaacgcctgacactctattaaatgtttttcatgcattaccttctttaatcctcacaacacccttccaaagttgaacatgaaacaaccacactggtttatatcactttaaatgtaagactacacgtctcaaatgggccctgagcactgcctgggaatccaactctatttctctagtacgctcactttcaccctctctaggactctgtcacatatctctcctccaagttcccacacctttcctctcccccgctgccctccctctaagctgatggatgcctataccaatagactcttttcccaccacccactgtatctgcacctgttatctcagcttcccctctagttacaacagagtaagtgtccctgctcatttcaaaaccaactactcacctgcttagggtcttctcctttctcaggtattcaacaactaccctttacaatgttcccctctttcatctgcagcagtttttcctttctacgagtttaatcacattgccatataaacattctgctttcttctatcttgaaaaaaactctacccaaccttaaggcccctcttccccattaaagttgttcttgtcaaaatgattaaaatcctcctaattaccaaagtcatcttatacggtaacattcaacatggttgaccactacctccctcccttttttggcttcgcctcctcttctttgtgtacactattaaactagatgtcttcaccagtcccatatattttaaatactatgtacagtatatgatgccgattccaaaggttaactctagcccgacatcctccagaacttcagatttaaatttctaaaaagcacatttgatatctcaacccaaatatctactagataatttatgtgtgtatatttcaccatactaaaaaaaactaccaggtgactgataaatggagagaaggtgaataggtaatgtgaaaaatcaaatgtgctaaatattcatggcacctgtaggtggtaggtggtcagagtcctctgcaaaattcttcccagctatgcttatgtcttctattgggaaaaacctactgggcatctcaaacctaacacattcaaaacataagtactgattccacaacttccaaaaatgaaacctaccccatcctacagttttccttgagtcaaggctagcatatgagggccttggcatatgggggcattgcctatcgcgttcatagatattctgagcttctagaacagcatctggcacacaggaggcgttcaaaatagctgctgaatggattgatgaattcatgttctttctttctaggtccctcgacctccacccgcccttgagtcattgggaagttctgggctgtctcagcgcctgatgatggcttcttaccaatcataccacacggctgctcctcagggagttggtggcattcccctaccacagagccacagggttcctgtcccggtcccgtctcgcataggcgccccaacacgcgtcacagtgcagctggcatcacacggccagaatcacgtcctgccctctggctgcagcgacactacttcacagctcaggcccacccgggcagtctcccgggccagggccacaacccacgccttgtgacccctgcacgtcaacggcatcttccttcttcacgcccgccctcccacagcccggcgcagcggcctcccgcacgccccctgcccacctggcccccagccacctttcctcacctgggcctgcggggccgccccaactgtcccgctgcaaccccagcagcctcgccagttgggtccacgcctagcctgccggccttcgtcgctatccaatcccacctgcgcccgcgagcctgcgcactggagctttgccctgcgccgcggcactctgccctgcgccgcggccctctgcttgccaggccgggagagacagaacctgcctctaccggtcttccaaggcactgagagcccatcgccgcggacgccgctgtaaattccctgcgggccctgtgcaccaccctgtgcgggtccccctctcccaggccaggctgataatgtcaacagctctctgagctatgctcatatcctgaaccactgaggactgtgttctccaggaatgctcgcctgacccacgcctgccctctaagcccctaatgaggccccagagggctggggtgggggggtctctttgtagtatcagagcagggcagataggcaaaaggagtcagagcctgtgccagaatatgaggtcagttggctgctaggtcaattaagacaacttcagcaagggtggtcaatgtagagggaattcaatcgttggcattgcctgaaaacaggaagccagaatctttttatcttgacgaacaaacctctattcattggtcctgacctgagccactttggtgaatccagataccctgaaggtgtgacaagacctgcctcacttatcccccagccttcagtgctggtcccacagagagccatatgcttgagctgaactgcagttaagcagtgacagctaccctctgtccaggctctgaggccagccttctgctccgtgagtcactgacagtgagtctctacagagactttttctttctgtagcagccaaggtaccctgcaagcaacccacgccattgccatatgtcttagtttgtttgtgttgctataaagcaatacctgaggctgggtaatttataaagaaaagaggtttgttagtttcacagtttcacaggctgtaaaagaaacatggcaccaccacccgcttttgatgagggcctcaggaagcttccactcatggcagaagacaaaggagagccaatgtgtgcaagacagaggaagagagagaggtgggaggtgccaggctcttttccatgaccagttctcatgaaaacaaagactaagaactcactcagttccatgagactagcaccaagtcattcataaaggatctacccacatgacccagacacttcccaccaggccccacctccaacattggggatcaaatttcaacactagattttatttatttatttatttattttgagatggagtctcgctctgtcgcccaggctggagtgcagtggcgtgatctcagctcactgtaatctccacctccccagttcaagtgattctcctgcctcagcctccccagtagctgggactacaggagcatgccaccatgcctggctaatttttgtatttttagtagagacgaggtttcactgtgttggccaggctggtcttgaacacctgacctcaggtgatccgcccgcctcagcctcccaaagtgctgggattacaggcatgagccaacgcacccagcccaacattagatttagatgggacaaatatccaaactatatcaccagggtaagattcccctttaaagatggaccccatgtctaatgtttcttcatagtgcctaacatcaagattctgcactggtcatcatttcacaaacatgagcagcatggctgctccaagacacacagagggaataacccccattcacatcaccaggaaatccttgcatggaggctaaatgaacagttggtaagagtggaccctgaggtgtcattccatctcccccagacttcctgcttgaccacacaatattcccagaagccagtgacccagaaggctcttcttggctttctgtccttttacctgtgaaaaattcgaagaactataaagtttagggcccatcacagtttactacccttctttggaggcctctttaaacccttgagtcttaccaattaccagtagcactaggagctttgcaagcctggcctt

SEQ ID NO: 914019 - DNA, 4001 bp, Homo sapiens
gaggtggcctctgtgtgactttccgcattgtcctcactttgtgtccacacagggcctccaagaagcatcacacgtaaagacaataacaccctcatcgacttccctcaactggtttgactggaactgatgagggagtgtgtgactaagtcccaagccatctggacacatccagtgacctgaccttttacagagacaaatctagctcctagctcttgtccacatgggaacggtctgttggggcagggagggggcggtggtgactcacaggcatcaccaacatcaatgaacaaaaatcttggcccccaaggtcagattcaggggcagagccttgtctgggaagggctgggtggtacgtcaggcctctctcactgacagcgcagcccccacctcttgggcctgctccacctcgcctctgaccttttgctccccaaatgccaagagcctgtgcttggaaagtacagaccctaaccctgttcacaccacagagctctgcccataccatgctggctgagtgaccgtggtggtcagacgcttgccccagccactggcccccaccatttcatgccctcctctggccattatcccagttttggaaacgaccctccacaccccccctccccacccacatacacacagtttaaatggacaagagtcgttagtgtgcagaggcagaacttcatccatctttgggacacaaagacctccagacgccctgggtcaaggggtacctggggccaaatgcagagctgactggacatggacacagtaatttctgtatcacgtgatcactctttgctggtgttcattcaactcacctatacgctcattcactctaaaatacaagcagagagctgtattctttctttgagtttcctggattgaaactctgatggaatggtcacgactcaagacaaaccaatatcataattctgcaagtataattgcctaatctttctggaaaggtttgcatgcctggaaggaatttaggtcaggtccagcgcggtctccatccggcttggctctgcctccccatcctgtgggttgcccggccttccccagatggtcccgggagctctcagaattggcaccgcgctcgcatctgtgctcaggagccctgtgaggtcgtcgaccctgcaaatcgcggcagtccagcctggaccacctgccagggtctccctgccgcatctccgacccccggcggctgctgcatcccgctccacctgcctccctgggaaggcgcgggcgcccgcccggctgcggggcagcatcctggcagagcgccggcccctcccagagttggcacaactcgagccactttcttcaaaggctccagcctccagcctcgagtgggcgcagccccccacgcgcggcctgcaccccctctctgtgtcgcccgctttcacgtacgccgccctgccgccggcccccgcgcactgtagccacccgcagacacgcgcgccctcctcctgtttaccgagagggagcgtgagcactgccactgtggtcgccaagttgggctggggactccgggtgaggggacgcgccacaggccggggtcgggggtcgtacgggccccagccgctggtactgggcgcgccgcgggggcggcggggccggggtccggactctgagccccggagcggcccctccctcccgcggcagcggccgaggcagcgccccggcctgcttgggcctcccggggtgcacagttccccacaggggcgcagggtccctgtccgcacgcgcgctcacctcgggggggccggtctggtcgcgcagatcgcgctgcagcggaggctccgcatctcccgggcgcctgcccgccgccctccggggcgcccggctgtcttcgccgggcgcgaagaagggtcgcggggacgcgcagaggccgtgggttcctgaagccgctcgcgccggctcctgccgcccgctgtccgcagcctagcaggaaatttgtccggccggccgcgtcccgccgccgcctcggctccagctccggctgtggctccgcggcgggggcgggggcctgggcgctgcgaggagcgggggcgacgcctggtgcccggcgcggggagcgcatccagggcgcccgccccacctgcgaggcgggtatggccctgaggccctgcggccctgccctgggagcacccagacactgtgggcatccgtttactcaaggctggtgccccttccggggaggcctggtccagccactccgccgggacccaggtgcgtagacagagggtcagggtatggcaggcactcacacctggtggagagcaaaggcaaggccctgcctctccctgccctatccctgtgcaccaggaagtggcctgactagggactcgccctggtcttgcagcaggtgtgggacacgcagggcaccccgtgcgcttctggtgcgaggaagctgggagagctgtgaggtcgctgggcctggtggcctcctctggaaagaggaggggataaggcgcctgtctgggggatgtagaagagggctcgcttgtcccgaaggcagtatctgtcaaagttaaaaacgcacaaagagaaagaagagcgacagagccaggcactgggcctgctgtctagccgacttcttccagggaatttcactcaagctatttagggagctttcagagaaaaggcagttccctggaaggagcagaaaagacactggtggcatgttggttctgaacctttgtgccgtgccctctggatggggccacggcccagccctcatgagggaagctgcattctgtggtagggacccagctcattaggcttatgaatgaatgaatggatggggagaaagtggcacttacggtgtgttaccccacgttgcaccgattgccagccgacgactcttagcatacttaaggcctgtttagacagagctacggaccccaaaggctgcagagcaatgggtgcctcctggcagaggccacccccacgtgatttgcccagagtgggacttcccctccacaggggccggagagctgcgaaaccagtggagaacttgagctccacctccctgccctgccctgcccatttctgtccctgggggccttgtctagccccaaagctttaaacaccatccgtatgggaatgactctaagcagcaccactctggggccctctcctccaagctcagctcctcctggctgtctcctgctgtctcagacctgcctcttgctcttacttagtttctctgcagtcgtccctgtccctgcctccgtgtcccacctcaagtccacctcccagagggcccaagtccacttcccactggcttctccatgcatcttgccctttcatctcactgcctgcgcccctccaaaacctgcagtggctccccagcttctgacccactctcccagatgatccattcttcacacttggtcccaggcacctcacaaagtgtaaaccgggtcctgctagccccctgcttaaaagcctccaggaatattaaaacccaaactcccacgaggctctgcctgacttccctggctgctctgagcctctcacccctgcccgctgggctccaatcacggctcctttctctcagtgccagagccaagctccttcctgcctgggactcctccaaccagtgcacctggttccttcttactggtggcttctggaagatcgccctgcatccatctcttctgccactctcttccacatcctccatcacagtttggaattatttgtgggtttattggctccttttgtgtctgtcgtgccctcttcccctacccccagggctgtaagctccagcagcctaggctctgttgatctccatggcttctcagactcaagctcctaaagcaacgtcagtagccaggaggtgctcagtgaaggcgtctgggctgtcagagcagaggaggatgggccccagccagcagcagcagacagcctggtcacctcggagcccagcagggcgggtggctccctcctgagtgcacctccaaggaacagcccaggttgaggtggggccaggtagc

SEQ ID NO: 914020 - DNA, 4001 bp, Homo sapiens
cagcatcaccctttgctgctctgtgggatcaaaagaaacatgggggccatttagccacattcctggataggcgactgagtaaccaagctgaccaacgacattcctgaagaaatgaccaggctggagctggaacagttctctcaaatcgcatagctgggctaagccgggtcccgagcagctgtatccaaacactcgcctcctgtgaggcatccacatcatttacaagtgacgggcgtccctctgcccagtgtcacctgctctcccccattggagacagcctgtccccctcccgaggccactcatccacccaccctcccacctctccttccctccagcccctgctccttccaaaaaggattcaagacggcctcactctccagctcagctttccaggtttggaaataagaaagagtaattacggcttctgggagcaaactcagaacgttctctctcagccttttcttcttcataacaaatattcctggttcctcaaaccccataagctccaagggaaaaccacccttgtctggggagggtgacaaggggcattgagaaggagaagtacgcgttataagggagttcttggacacattccttccccaagttcggagtgagaggcaagaacagttatggacatgtctttctcttcctggagaatgagctgatattgacaaggtcaacatgataacccagctgtcacacttgcaaaagggcctgtccccacctgcagagccattctgaagcccagccaaaaacttcacccaagactcattcctccaagtgacagatgggatcagaatgagtgatgctgagcttccctgctactcactagccgcaccctcctcccttccgttcctgctattgaaacattcagggcagggaaccggggactggaacgagggcaggaagacagcacctggtgccacattatcgtctaaccaggtctcgggtcccgcgagcgctgggaggctacatttcagctgggtccttgttggtgatattcttttaatgatctaagggtccgttttaagagtctattttagtctgacggcacgtgtgttcccccaaaccatagaactgactacagttaggtaggaagctgactccaggaagttgtagtcactggggtgtgaagcaatatttttgtggcctctgccttacacacgtttctcggtcatctcatctctatgtatggagagaaaaacaatgttcctttgtaagtagcgacaacaagttcgaaactgtacttcggatggaaaagttggaaatgctcccagctgactctgatgctctgtaaacatgaagcacttcaggagagcgagtctctttttccagctggatcctaaagcagtacaaacccagctgaatagtttctgagccagacagtcttatctgagaatgattgtaaggcctcactgaaaagtgttacatgtcaacaccctgtgaaaacgacaggatatgaacagtctctctaaaaaaagccacaaacaaaaatgtctcaaacgtccatgtcacacccgagagaaaaatgatccttaaagttttgaaatagtgaaattctaaatgacagcatcataccaggtagagtgagatgaaagtggcaaggcacacctcaaaatttactttgaacgttaaaggcagaaagcacctcagtgtctgctaaaaaagaacacattttcccccaagccccagccagagagcagcttctgtaccttgctcctccaagattccgttgggcatcttcttgtcgctggtgctgaccacagctttcctctgcttcctgaaccttagagacacaggatgcgttaggtttccacacttctaggttccccgagagccaacagcgctcggcacagtgatacccaccaggtgagccgggaaaagctactcctgttgctcatggctgagccgcgctaaggcctggcctctgtgtgtctcccaggcccagccacccagcctctcagctgccctctgctgcacagcccacgcccacagcatcagaaggctcatttcctcctctgagctggttggggcaagtcagtgccccgggacactcctacctgaagaagtaggcggcgagaaggagcacgaggaggaggagcagcagcggcagtagcagccaggccagcagcggctgggaggcgcccgggtccggagggcctgcaggagaagcagaaagaccctaacccctgacctcacttcacagtttgcaaaagagtctccctccataagcccttcttcctggacaccagaaccccaaactatattttgtaaagtggatccatcatcctgaaaaggccccacgaggtaacagagaagcgactttagttgttgctgttgactcagagaaagaatccgggactgaggagtgggtgaggtgacttgtccaaaatccctggggcaggcatgacaggggtgagttccccagacccccacacggcctggctgcctggctctcctgctaagaagctggagaagggtgaaggggccggtgtccactgcagggtcctaggacagcgcgggaggctgactcggcgtagctcagctcttagggccccttgggcttgggcaggagctcaggcacagggaggcggcctggccctggggctgggcagaggcctgtggccctggcgcactgtgaccccacctttcagagcctccaggtcccgattccacctgtcagaggccgagtgcccagccaccaccggcctcttactgtgtcctttgtacctgacaggttgaccttcctcacccagaaagagacccacagccccaggcccagctaagtggctttgttgctgctcaggacccacccctggctcatcagcccaaattccaagggacactggtggcctcgctgccacctttggaccccacccactctcccaacgtcgcactttgttcctgctcctcccccgctggccacacagccccctcatcaccaaaatgttcccactcctcgaggacaatctcaaaggcccccacctccaagaagcccactggactcctctcttgtggacccagaggggccctggatgcctcaaagcgcaaacctcgctctgccatgagtgaacaggcctcagcatgactgccttggctcccgggtttctggggaagcccctcgaaggcaacgaccgggcttccaactctttaagttcccagaagcaccaatcacttgccctgagcccagcgcagggtccatgcgcttcctcctgagggctggcacggcctcccgagggtgctccgggcactgggagggctccgcagccccagaggctccgctcacctcacacccctcatctggattctaaaagggaccctcatgccttccgccttgcaccctaggttataaactccccagggaaggtgtggcttttcctccctcatcccctaccctcccaggcctggcactgactctggcaccctatgagtggtccgcaccatcgtttctcataaatgatgaagttttagggacgtgggtgaccattagatgttgaagttcacagaggaaacagctggtctgtgatgcggaggtggccccagccgtgagagagggcactgttcacctggcccacccactaagtgcccaccttccaggtggggtccgtgcctcccccatctggctagcagtgtcagtagcctggcagcctggctgtcctctgcagcccccacactcaggtgtctgtgaccctggcccagaggagctggttctggccccacacaaggttcggttggtgctaggatgagtggctgggtgtggctgccacagtcccccgcctttgacctccaacctgcccacagcagagcttccctggggaagtgagctggcctgaggcttccacacttgcagctccagagagcacccctctccactctgccagggccctggagcaactccgacaggctgagtgggaagacccctgacacggagggaggggcagcctggagcccagccccacggagggcctggctgctgctcacactccagactcagccagaaa

SEQ ID NO: 914021 - DNA, 4001 bp, Homo sapiens
accacgccctgatgagaaactggcacctggggaaggcaggtcagcaccctgcggtccgaggcagggctggaaacaggagccctgggactcggaatacaagggcagagaaccggctggagactcaggctcaggggagatgagggagggggcgggggtccttccaggacaagcctcaggactggggctgggggagaggagaacagccggacagactcaggcacaggggagatgagggagggggcaggggtccttccaggacaagcctcaggactgggggtcggggagcctgctctaccttcagattccccacaaggacaagggggccagcccaaggcagcaaggttggctgctaagtggctgtgcccgcagaggcccagcgcccggctccgtgggcggctctggttacagctgaacgtggcaggcagggttgacacccatgcatcctacagctgccagttcccacgccgggggtcccatcgggcctggttttttccatgaaggggaggcggtggtgtagatttgcaaaccaggttagccatgggcctcagggaggagagcccgaggccactgcagatattctcagcctcccttgtcccgagtcaaggaacctgggaaatggggcaacccactgccgctcgtgcccctcttcagggaggaaaggccaggcaaggtggtgcaggtctggcaggggtgcggccctgctgaccaggaccaagcccaaccctgcccgccagaggaagctgaggccgatggtggaggggatggcagctcccaggtggcgattctcaccccccgagtgtccctccatcctgcccgtgcactcccagcggtagcccacacggagcgggcaggaaccacacgggagccatatgttaaatcacgtgacttgtggataaatggcttctggcacatctaatgaagagataacgtctgcgaaataattgtggaaggaacacggtcctctctgctaattcatgtcaccaggcaaaaatctgggctccacggatggaaaaagttgggcctttacaagaggagcctttccctgctcccagtttcaaaagaaagccctgcaggagcgcagcgaggccacagcctgattcatgcctaatcattgatctggcagcgacagctccctgccatgtgacgcggtgtccaggaggctcatctgcaccgcatgggtccctgcagcccgtgcacaggtgcctctcaggaggaaccgccccgccctgccctgcgccccccacccaggaagccagggctcccgggggatgtgcccacggctcccacagcttgtacctcttcacgcccccatgactcagggctccctggcctgaaactgttcttaaatcgcacagctgggcgcaactgctctccccgaatccaaacctcagccgcggagtcactcccagcagccaggggcccgtggccttcgacagggcacccccacctgtgaggaactgccagggcaaggccacggcgcatctgaccctcccctgctttaacgacaattctgccaacagtcgaattcaacagtggctctgaacaaagaaaagtgcattaattatggcagatgtgtggagttccgggaccccggccccgcgccccccgccccggcccgccccggcccggcgcccgccccgaaaagtcgcgacgactttgagaaccacttttgcccccccgagtggcggccgcgctcgcgcgccccgaaactcaggctcggcagaaaccgaaagcgggcgccggggccacgccacccccaacccggaggcgggtcccgggtctccgggcggcggaggcgggtgtcgcgtggggaccccgggggtgtcccggcccgcgcccccgctcactttttcgtgcagtccagcaggatccccgcgaagctccgctcgccgcagctcaccgtgaccaccagcgcgccgttgacgacctgctccacccgcaccggcagccggcagccggcgcgcggctccatgctcccgccgcgtcccaggccgcccccgccccgccgccgccgccgccgccgccgccgccgccgggtcagccccgcgcgtgacgccgccccgcggccgcctgacgtcacaaagctccgctggggcggccgccacagccgagccgagccgggccgggggcgcgcggccgcgggctccgctcccggggaccccgcccgccgccgccgcgtcccgggagaagccgcgcccgcccgcagaggtcggccggacgcgcggtgcggacccccgggctggagagggggctgcgcccgggctcgcggcccacgctggccgggagtgtcccctggctcgggaggacccgagagccacgagcccgggggcggcgggggggacacccgccgcggccggagccccgggaccccatccccccgctcccctgcctggggccggtcccgggcccccctccccctccgggcccagccctgcgccctccctccctccccggtggcccggatcctcccgcctggggtcggccgcccgcgtgtcccggcagcgccccgcgctgggctctggtggccccgggcactgcggcgaggaagtcccgggcggcgcgcgcaggaagccggggcaggcggaggggacgcggggcgcccgggggcagcggcctagtgtcgccctcgccgcgtggggggcgggacactgggtcgccccactgggctcggcgcctctcggggcgacaagcgggcgcgcgcccggctcagggccaccctgcgcgcctgggggtggccggcaccggggcccggggggttaactccctccggaggtctcgggcgtgtctcttcgggttgccgggcccaggggccaggcgcgcctccgccagtttacaaaggaaacagcctccttcccccgcggcaggggctccccgacccgcgggcgaggagtgggaggtgacggcgccggacccccttcccccaggcgcccggctcccgcgccttcaggcgtcaaagcccccgacttccccgagcaccagcacgtccgcacccggctcagaacgcaggggcccggcctgctgcggtgaccttggccccgggccgggcttctgagccggacttgcagcgcctgacgaggcctggaggcggggcgggggaccgcgtagttgtcctggcgacccagcgccgccgggcagggctcctcccagcctgggaattgaggaccaccgcccctggtgccactggggaccgtcgggtcgctggcgcctgtcgacctcgccctccggcggccgcgcggcagtgggagcctcagagaggagccagggcggagtgagggagcccgcggggcctgggacacctgaccgtccggctagaacaggggtagggaccgaggccgaatgagccagagttctggccggggacagtcccagaggaggcctggaagcccagtgagtgtctgtcctcctctgtgtggcctggggctcccgccaacactaagcccttcctggggcctcaggcacctcaaggcgccccgttctccagggtcagccagcccctgcccactggttgccaggcttgcagtggagcctgcctgctgtcctgcccacaggcctctgcagctgccccctccaggggtggggctgactttggaggaaaaatgccaggcagcagggaccccctcgccaccctgctccaggttgggctgagcggccatcctgaggctgcccacttgcttggctcttcttcctgcctgctggagaggcctgctgggcactgccctttctgagcattggggactgccagggtgaatcagcattcaggctggtggggccagcatggggtggggctaatgcacagggggctgtatgtgggtggagggatccagaaagagtgtccaggggagcaccagcattcaccagggccccaccaggtgggcaaaagcaagggcttccgaggtgggggtgggggtgggcaggatcctctgcaaggtgtctgcgtgcgcctggggctcctggtgacttcccacgccagcaggaggaacagtttggggtgtgctgaggga

SEQ ID NO: 914022 - DNA, 4001 bp, Homo sapiens
ctgtcatcagcaaatattacacagaagggctgaatttattttttgtggtcaggcttaagaaagtgatgggaaaatgctaataatgcagattaaacctaacagtgttagctgttatagcatgaataaatagcacaaaaattgaaggaaatattctagtattagaacaatattatcttatttgagtaacatcattcctgtcatttaaagaaggaggccgggcgcagtggctcacacctgtaatcccagccctttgggaggctgaggcaggtggatcacaaggccaggagtttgagatcagcctcgccaacatggtgaaaccccgtctctactaaaaatacaaaaattagccgggcgtggtggtgggcgcctgtagtcccagctactcgggaggctgaggcaagagaatcgcttgaacccaggaggcggaggttgcagtgagccgagattgcgccgctgcactccagcctgggcaacagagcaagactccatctcaataaatgaataaataaataaaataaaaataaattttaaaaaataaaggagtaaggttgggacataaatctttgttgtttcatttgtttcacgatcatcctactctttacagaaaatatggagcaccgttctctttggagctaccctcatttgtcatttgcaactataggttggctactgagtttggcaaaaatcaaagaaagcctttggtaagaatcactcgggtagactgcatttaaattgagagtattgtatctttatttgtaaaattgtgtgcagtgtatcttttatttcaatatttaaaataagcatgtgtatatgtgtatatatatgtacgtaacacatatacatatatatacacatatatgtgtgtatatatacatatatatacatgtacacacacacatacatcacacatttttccctggagaggtgagtgttgagtatctaccagctcgcaactgctctagtacatatgaaaatgaaggcatgccctcaaagctgcatgttgagtgccgtctgctttcggtcccgtcattatctctgtatagacccagttggcaatcatgcatttggggccctctgcaagtgtgaaaggaaggcactaaggaaagaccacctggtcctgggcctgcctcttcccctagcacccagtagactgtgatactctgagcccaggggttggcaaagtgtggcagatcactgcagatccccaaatgtcccagagctgcaaggcaatggggtccatctccctctgcagacacgcagtaggaactctgggactcagttctgttttatcctaactggcctttatgaaatgactgcagtttcttgtgacgaggggtggcctcagtggtaaggtagtggtgaccagaactcagggcactgagggggcggggtgctggatttcacttgtctgttggcccagggctctttccaacccttacaaaccataggctgagaatgtggtggaaactaggtcactttgcaagagatatagggaaacccctgagctcacctagtcttcctgtcattctccatgggaagatccaagcccagagaaggcaagcatttgccccaggccacacagcagagccagcaccggaatcccaggtgcctgcctgccagatggaagggctttccattgcagcccctgctagcgtataaacttctggctgggttatgccagaggagagagcagtggggcttggctccccctccccctccccaccaagctctgagcagggctgtcttcccgcccctcagctctggcccggcctgctttaccactttacctgctcctatcaccaccgcatcatactcaggcttcagacctcccctggcttccgtgttatctcgtctccacgccgggaagggagaggcggccacagccttgcagagacctcggccacttgcagccatttctgccccaggctgggccttgctaggcagggagtttgctagcgattggcttttgtgctgccctaggcacggggtggagcagggaggaagcaggaagaggaggagctgcagtccccctccaggccccctccaccatgcattcttggccacaggccagcctcctgctgccctggggctgtgctgggccgtcgggagtgttgcctattaaccaggcggtgtcacctccaggatgcaggggataatggcaaaactgacaatccactggggttcctatgtcaggctggcattgtgctgaaccctgtaggcaaaactccccattttacagatgagggcgctgaggctgcggggttagggaatgagtggtggaggcagagtggagctcgaaagggccctctcctcccctgtgcatctaccttctcagtcagaactgaaacgcctgggatggcaagtgctcgtgtcagactctgctccaactccatgctgagtctgccagtgcagagtggtgatgcctctacgcccacaggaggcgcccagggcggccatctagcgtcaccacgaccagggccttcagacaccgcagaggcagctgtgtctgtcgctgaggagcactggagtcctctcctaaatgctcaaacacaaacccacaacgagggcttaggggcaagttcgctgtctgtaattctctggtgttttagttttgaaggcctggccagttctcctcttttggcaccttgcccattttccaagaatccccaaggattcgaggtcacatctgtaaatacctccagctaaagttctttctgaccctcccttaggcctgccttgaattaggagcccctttgttctctgcccattacttagcagagtgttcccctaggaggaaaaaaccccttggagcggagagttcctgcactgctctgatatcgcagtgtgacggaaacctgctattggtaacgaatctcagaactgggagagtatgtggagatgatcctaagagggggttccgaggacccctccacacaccatggacagttaccccgcatgtgagcatctctgctaagatctgattcaggatgttcactcctgtgttatttattatatagaaagatcaaggggactggttaaactagacatatcacatccagccgctgctaaaaactaaagggaaatagtaggtgacaaaagcaggggtcctgaacagtggtgggctcaggggattggagttttttcctttatgtttttctgtattttccacaatccacgcttttcattgccattccatcagatgatgttaaggaggaacacagatccagtcacctgaggggatacttcctcactgccaccttctcagggtttagaccaacatgtgggttctagttcccccagccccaaagctgttccctgcaaggaagagatcagtctttgagcaaattttggctcaagactaaagacacagaaggcgaggctcctgcatgcacagcacacggccatctgatcctgtgctgcagtggacgctgactttcgccacgccgtcctctctggcccagcaccggcctcctggcctcagaggagcagacactcccagtcccagggctctcagggtctcttgtccctgggtccattctgggacaggaacttctcggttggaagagaggggctgtacccctcgggtggtggttctcaatccagggcgcaccacagaagctttgaaagacatcaaaggctgggctccacggccgccaagggaatccaaatctctgggccagggccaggggcttgagaaccccagccctagggcagacgccagccaagcatgaaggggctgggacttagcaagggcttatcagcactgacagaagggtctagaagcactagcatgttgggcttcagtgataacaatgaccaacatttattgagcacctaccacactgggtaatcctcacaccaccctgggacggaggtgccatcgctttaaacgtggggaatagaagaaacttgccaggaggtgcagagaggaagtggcagcgctggaattcaaacccaggcaaaggagcaccttttacctggggtaggagagagcttgctgg

SEQ ID NO: 914023 - DNA, 4001 bp, Homo sapiens
agctcaggcaatctgcctgcctcagcctcccaaagcgctaggattacaggcgtgaggcaccgcgtctggacacaaattattaaattattaaaaatactatataaaattacctttaggctatgtatataaggtatatatgaaacctaaatcaatttcatgtttagattggggtcccatcccaaagatatctaactatgtatatgcaaatataccaaaatctgaaatttgaaacactctggtaccaagcatttcagataaggatactccaacctgtagtaagacacagcaccaggacttgaactcaaatttgctcgaatttgtacactaagctaatgcaacttactgtcatcctctcttgttttttggaccattttcaagtattcttcaatcaataaattcagaataaacacagactaaaaatacctaactacactttcttacccctttaaaaattaatcgcagaggtcgggcacagtgggcacagtgtcaaacgcctgtaataccaacactttgggaggtcgaggcgggaggatcatttgagcccaggagttagaccaatctgggcgacatagtgaaatcctgattctacccaaaaaaaaaaaaaaaactgattgcagaattagcattctctgtaaggggaaaaataagacaataagcaacttgcttagtctcaaagcttaatgtcaaaaaaaattaaacagatgggatatttggctatttatattctgaatttcaactgtgacacaagacacaagacctgctggggacaggtattagttgtagtacaaccatatctgaggaacgtttactgctttatgcttgtacctgtgtgatactgaaggaaggttataacagcaagagatagttgtgtgtgctgaggaagaagagtctaaattctggtgggccttaaaatccagatgaagttttaaattgactccacaggtggtaacgccctaaggtcacctcttcactaggaacctggcataaaaacatctgtatggttcagattcgtttccaaagacactttccccctatttattaactaatttgatcttcgtatagacatgaacctggttttaaaactcaactgacctagactggagactgggggatggcaaggttatacccgaaacatactttagagttcaaagctttcgcaggaatatcacttctgctgaagcccacaaccctggaaggccgcagggcaaagaacattaaccccacttttcagacaacgaaaccgaggctgcgctaaacagactactgtacaaaagatcacaggtccagccaagtggcggactgagacttcccccaggatatcagactccaaatcctgtgctccttcccgtacacaactgagagggggctgcactcacaaactttaaagatcggacttggggtttttcgcaggcctgccaagaaaaagcaggaagtacatgctcctttatagattgctcactcccagcccgtagcccggggctcccgggcagcggaggaggctcaaaggcgaggctcgaagcgaagcccggaaaccgccggcagccctgggggcccacggccccgcagccccgagggggtaaccagggaccccgctcaatacctgttgaaacccagaaaaagcacgtcctttccgccaggatcatttggggcgagcgcccaaagcgagcacgagccccagtgagtgcaaaagagccccgggagggtccctctcaaccgcgggcccgcaggggtcagaaggcgggagcttcccagtaacctccgccccaggcagggggcggcccctcgcgtcacatgaggaaaaaaaataccagcaacaaacgacggaatggaagtcttgtcccgggctgtgaagggagaagtggggattaaaaatcctagcttgaggtacagagggaggggatacggggctggttgttaccggcgcgctgttgctctccgcttccgccgtctccgcgaagctctatctcttccgctcgcgccgctggggcgcgcgtcaggcctcggctccgcccccaacgccgtggggccttctgggggttgtagtttccgcgaggcccggccgcgcccactgagttcaggtcacgtaggggagaagctggcaaaatggcgagtgccggagagcatttctgctcctgtcccttcaacccttcctcattcctctcggctatatacgtgcgcaaatctccttacattccactcaattataccatctcacttcctccgttcacagccaagttttttgaaaaagataatctacactgtctctacttgctcatctgtgttcactcctcatcgcagcttccgcccccatggaaaatgccttgttgtcataagtgtccttgttgccaaactcattggaggtatttccggactcatctaactcaagctttagtcatttgacgctattgggcattatcacttattttctatgacactatccaggttttccttctctgaattcattctactttgtttcctctaacttacctctaaaatattggtgttttccagagttcttaaaattggggtgggagaggggacactccagtcccttctcacctgagctcattgtttgtattcccaacttcctagacaagacctctcctcatccatgcccacaggcatctccagtgtccttgaaaagtgaactactggggccaggaacagtggctcatgcctgtaatcccagcactttgggaggccaaggcaggtggatcacctgcggtcaggagttcgagaccagcctgaccaacatggtgaaaccctgtctctactaaaagtacagaaattagctgtgcgtggtggtgggcacctgtaatcccagctacccaggaggccgaggcaggagaattgcttgaaggagaatcgcttgaacccgggaggcggaggttgcagtaagccaaaattgcaccactgcactccagcctgggcaacacagggagactccgtcccccaaaaaaagaaaagtaaactactacccctcctccctactcattaatattcactctttaacctgattcctcctttctcacttcctcttcctccaatattcaaatggtcaccaaatcttggagattctattgtagcaggacgagccgcagacaaaacctctcagacaccaagttgtagaacgaagggctttattcagctgggagcatcggcaagctactgtcctaaaatccaagctccccgagtgcacaatttctgtcccttttaagggctcaccacactaaagatttcacatgaaagggtcgtgattgattgagcaatctggggtgtatgtgacaggggcttcatgcagtggtagtcagagtgaaacagaacagagtacaatgttcttccatacaatgcctggaatctatgctaagtcatgagttgatttttaactactaggtttaggccaggcaggcccaggcctggtttcaggtctggttttgggtctggtgcctggtgctgggctgcctgcctttggtttcacttccttgttttttttcttaaaacaggtactgagtataaaacaatataaaacaatatgagagggtctctttcttctctcactatctcccaagtactccttgaatctgttccttcttcaggactcctaactcatgactcagctgctcctgtggccccacccagaggtggactcagagcatgaggactgttttccacacccctatgatttcattcccaacccatcagcagcacccattccctagccccctgcccaccaaaatgtccataaaaaccctaacctctgaaccttcagggagtttgatttaagataactctgtcatcaattaaattctttactgctctgccatggtctcagtgaattggttttgtctgtgcagtgggcaggaaaaactcaccaggcaatcagaatccagtattgtggttgggaggttcagtgaaagaagatttataggaaatcttactgtagggtaggtggacatgggcattttttaaaaaattcccgaggaggcccactgtggtggctc

SEQ ID NO: 914024 - DNA, 4001 bp, Homo sapiens
atttctgatctctctacacttttactccacatatattaaatcttaggttaagacctgatttaaaatgaaacaaaaaaactccaatcaagagaagcctgagagtagaaatgtacagaaaagaacaagagagagtcgttttaaaatgtaaagaattaacataaacttcaagaaaaatatcattgtaagaaagttttttaaagagtaaataaattcaattataactgaacaaaacaccaacactattttggaaatggaaagtcctcttagaagttcaaccagtatttttctctcactaatttcattaatataatgtccttttaagtttatggaaggggtgagtatacttaactctaaaaacatattttttttcaatttaagacacaatatcctagtgttaatttatattatgattttttaaattaaaatgtatctaactcaagctcaaaagtcatactgaaaagaccactgaagatgttatcaaatcatttcatcacaaaaatttatcattctctccatcctacagcatttaatatggtctaaacacaatagctttggaaaatcaattctgaatacaataactctgatgtaattgcaaattcaaaggaaaatgtaagtgcattcgaagttgaggatgtctgtacatacttttaaaactttttttttttctaacaggtatagactcccatcaaggcacactgaccctgaaaaatggctgagctaaaataaaagctgtgtttataacgctgaaacgaaatactgagttctaaatctggtgatttatcttttgacagctacaaagtgcgacacatcaacattacattgccagatttaatttctcatcttccatttcattgataattgtaaggtttaaaatccataacaatttatatgaagttctagttggtcaatactgtgatccagtcctcatactgaaacaatgttaacttacttaaaatccaccacaaaatattcaattatttgacagatgtttaacagaaagaataagggatcattaatgattccatttaaaaaatatttcatcacgagtgctacttttacttcagattcatgcaaatatggtgcttaaaactggatcatatttcaatccaaaaaccaacgcccgaagtatacggataatttccaagaacagaaaaaccataaataagatataaactcccccaaattcaaaataaattacataacttactctgttttccttctttgtttgtcctcaaagatgtcattgagattgattgccacctgccctaaaaatttatccagacccaccagggacctgtgcataactataaggaaaagaatgtatttctctggacttccctgaattagcaatccaggtagctcgaaagaggcctcctccttccaaactggctcaagggttttctcagctacagaggtggagtacttttccttgcccagctgaattatagtgtatgtgtcattggtaccacttttgccttttggcttcagatctttggcttggagcactgtgacctgcacgtgggttggaaaccacttttgggcttgctcggacagcatcatcctgtcctgtttctctgcccccgagttccctagcacaggcagtgcccctcccggagggagagcctaattccttaatcactgcatcctaaggacacttaacggaaacaggcaggctcagggctccccgacttccctatggctgatgtcaaaacgcctcgcgggggcagcccaggggcacggccgctccgggggtcccctttcgtctggagaaacacagaggcccaccatcacctggccgcgccgtgcaggcctctgcgcggacccccgcccctgtctccaccttccccaggcctgcggggcacgtgaggcctggccacacggacccgggcggagggctgcgggggtgaagggagcccccgccccaattctgcacccctggcctcccgcctgcctccttgcggccgagcagcctccgctgcctccgcgcctcccgcccgcccggcgttcgtccgcaggctcggcccggctcctcctcccgaccccggtaatacgaaccgccggcggctaacgcggcctcgctccctctcgcaaacctctccctcctcctcctccccctcgcctcagctcctcctctcgggcgggagcgggtagccaggggtggagtgggggagggcggggaacgcggccgccccggcgccggcgggacgtggggcgggcagcgggctgcagggctgcgggcgcttggttcggcctggcccggccggcggctcctaacaccgggcgggcggctgcggcggcacttccgggttggccttctccatgttggtctcgggaacgtgaaggggcggggcctcgaggtcaggggtcagcacctccctggttgccgtggcgactggaggcgcgcgacgcgggcgcaatggcggggacccggggcttgatgctgcttgggcctggcccagtggcgggtcctagggacgtgggtacctgcagaggccggcaggtgagccctggggagggctggggaccgctcgtgagaggaggtcatcaaagacccggagacgcccctaactagggcgtctttgagggcaggggatctgtgttcgctgtgtcctggatgcccagtgcctggcaggagcaggtccataaatggtgttggaacgaatcaggcctcttcactgaccgaaaggaaacttttctccaatctcctatccacccttctctttttgaaaagtccgtaaattgactgaaaatgacatcccccacccagacgaagggcgatagggaagcaaatagtttccacagggagtagagatgtagggaggcactgggctggcatcagaagacctggttccggccgcgcctctgccgctatcagtgtgtgtgaccttggccgagtcatttcacctccatgagcctcagtgttttcacgagtaaaaaagccagttctacctcatgtctaagactccatcacgactctatgggctcgacgtcaaaaggacccccgtggggactcacactgtggtggactgtgcaaatcatgtggagaccatgccccaaacacgggtttcgagtttcaggggataatacatgtgcctttcctagcacaatgcggcacataaatctccttttgcccctctatttctcaattggaagagacgcttatgtaccaccccattgctgttaattctgttcgtgtcttaccttcccaaggaaattctaagttttgggactgccttgtctatcatgcagtcccttcatagtggctagcatgcagcagacaatttactgaattacttaatgccttttttccctttacaagactaattttgagagtaaaacaatatgatacatgtaaatgcacgtttttttaacttaaatggccataaacatgtaaagtatcgtgtttattattttcaagcaaggtttaaaacttctcattcaaggcagaatttttcatccctgggagacagtgtatgaaaaggccatgtgtggaaaacagaacaaaatcatcgtactgcgaatatagcatctggatcccagagtgcacagttgtcaactttaaagaaaaatattcttagggatttttaaacagtacgttggaacagtcaatggtggaatttcaccaggatctctaaggagaaataatttgacacctgaaacttacaaaaaccaaataaacatcatgaaatcaaatttaattaagtttagagttcttatacattttaaaagtcttcatgtctctattaaaggttgtaattaaacaatagaaaattataatagtggatgtgtatttctgaagagcttaaattggtaagctttattaatgattataaacttgtttacaaatataatttcactcatctctgaaatatagccatctctagggtagaagttggcagcagtagttcacagcaactcaataacatactccaacacaactcagagaatactctaaaggcaagagctgaacaattggaattactaacctctctttctgtagc

SEQ ID NO: 914025 - DNA, 4001 bp, Homo sapiens
acttcaaaaacactaatttcatatgcctgaacttaaatgagaacgatatctcaaggaaaaaaggagaaaagaaaaagaaagatcacaaggctgtgaaattcctattaagacaacgtttaactttttaacactcaaatatgtatgtgcaataatagatgatcatgtaaataattttactcatgccttttacacacacacagacaaatcatgctggtttgctaactcatagtatttcattattctattccttggtatgtgcaaatccttcattccagtagacacagaggacattacatgaggaacactatgaaaatgtgttgtcaaactggtggctcacgcctgtaatcctagcactttgggaggccgaggtgggcgggtcacgaggtcaaaagatggagaccatcctggccaacatggtgaaaccccatctctactaacagtacaaaagttagctgggcatgatagtgcgcgcctgtagtcccagctactcgggaggctgaagcaggagaatcgcttgaacccgggaggcggaggttgcagtgacccgagatcgcgccactgcactccagcctggcaacagagcgagactccgtctcaaaaaataaataaataaataagtaaataatatcagaatatattacataagctttcaaattctgaagaagcttttaaaaagtaagactttatgaagtgacttttacaagttatttgaggagagctttcattctagtttgtagaattaaggctatttcaatttatgaaatacaaaaaattatttgaaagatacgtgtatcagaaggtatagctaaaatatgaaactgattacagcccctggagtgcaaatgtggtttaaggatcaggacggccttgaacataacctactcataatcagatggcaagaatgacatcagctggagaactctcttccaagacctggatgaaatcacagccctctagcaacatccacctagatccatgtcttaccttatactcaactccactgtcaatattattttccccaaggaaaaagtaaaaaatgaaagcacaacactaatcttctgtctccacaggatgtggcaaaatgagaaataacaattacattttattttcaaaggtggcccacggctgaagcactcggaccttacactaaagcgaaattttccagcagtcacaagatccagttctttcacagccgactaataaaaaagtaaaagaatcgacattaagctgcgcccaaacaggccaggaatgggacctaaggcgtcacgaaacttcccgaggacattatgtatttagagaaggccccacagaaaccctcaagtgggaaagctatgtctcccgggtctcggggtggcaggcagcctgaaccccgagaggttcgaggcaaggcgcccccggccggattcgggcccaaaccagcccgccacgccctgagctccgcgcagcaaacctgccggccgagcggcggccctcggaatggtgttttctcggcgctacaggagggagagcgacccagagaacttgggcctggcaaaggccgggaaccaggcaggcgcgggtggggagaggaaagcaaacgtcgcgggagagcgcggcccagaggccgaggagggcgcgagcggagccggcccgagcccgccgctgcagtttacagttcccgtcgcggcccaggagacagcagccaccggggcagaaagagcccagccaccctcgtcacgacccgcacctccgcctcacctggacttgcccaccccactctcgccgatgatgaggatcttcagggtggttagcacgtcctcgtccatcctgaccccgttccgctccgagcccagctggccgcccgggtgcgcctctcagcccttcagcagagtgagctgctgcgcatgcgcgccgctccacgtctgccaccttcctttcacaccgggtgttcaggctgccgaagccctggactccccagttccgccttgaggtagctccacggctgcgcgacccagaatccccggcgtttttccggactgcgtgttcctcccctgcgcaagcgcaggtggggagcgctgtgtgtgactttgttggcttcttcttgaggtctagctccgccccagcctcaacctaaccctccttttgagtcagtgggaggactcagtcaggagaatatcaagctgttttatttcggcagctgctcataacagctgcactgcggtgggaaaagcactgtgcttgaagcagattatcttaaatttaggtccagctctaccttataactgccttgtcatactacccagctttcttagcctttctccatctctgagagacacagtaacacttcttagaacatctgcttcttattgttatgaaggttaagtgagttaatttgtgaagacatgttgttaaccaaagtgctctataaaaggtgtgatcaggtattatcttgctggcttcccctctgttatagtggagagcaccctctgcaccctaattcatcttgaaagggaggcgtagacttcaggtaggtcaggtgcattacttctggcggtgcaacttcaagtcaactctccttcctcataagaactgctacacccatactgcaggaagtgtatgtctacaccttgcctcctgcattaagttgtaaatcttagtgaaggtaccaaacctcattcataatacttagcacagtgcctggtacatggcaggcactcaataaacctcagttctcttgtcttatttccttatacctgcagctaatgtcatatacaatggatatttgattaaagactacatataaataaaatttcaaatgttaagaaattaatttgttaaatagctggaaaagccctttcaaaagatatcccaatggcttctcctccttcaggtcttcgctcaaatgttgcattcttaaagaggccttccctgtccattctactgaaatatgcaaatccctccagcattctctagacctctttacattgtttttctgcataggatttaaccactctctgatacactatatattttactactttattagaagtctcatgaaggcaaggatattttgttttgtctactggtatgtcttcagtatctagagtacttcatggcacataatatgtgctaaataaatgtatgctgaatgaattaattgaatgaatgttgtagagtccattcctaaccttagagaataatgtcaatgaaacaacctccacttctcatcagatagcccttgaaacttcagtcaagtctatctagcttacttttcattatgacaaaaagatcttatttatgaggttcacagtattgtcaagctctcctgccctggggtcccgagatccctagaaatccctgaaaacctttcaggggggttgcaagatcaaactattttcatagttaatatgttattttttcatgcacattctctgatgataatataatggagttttccagaggctatatattaataacatgtaatagcaaaacagattgaaggcagaacaagatatgtgaacttactggttttctatgatattaagccagatattaaagggatttcctaaaatgtaaaacattgccactgttctcaattttgttctgttttaaagtagttattttcataaacatttctattaactggtaataggtttattattgtttttaagtaaattaacatgtttgaaattttctcagttttaatttctagtaggataaataagagatgtaatctctttggggttcttacaatcaaaagctctttcaggtcctcaatgatttttaagagtatactataatttgtacaaccaaaaagtgtgagaaccattgcactgtgctattcacaccaagataaatacaaaaacaaaaacttcatcaataaatccagggctatctcttgcaacctgtaatactgttgacgtactttggcaatatcattttctcttggatttcctccatctcttggccatttcctctctttctttttcttttcttttcttttctttttttttaagagatgg

SEQ ID NO: 914026 - DNA, 4001 bp, Homo sapiens
ctggggtgggaagtgttgaactgtccctgctcccacctgctgtgcctgccatcttgcccacctctaagggcaacaccctccttcctgcgccagcctgaccttccccatctcaatgaaaacagcctacccaccagcacggcctccaggtgttgccttcagaatacccccagaatcagtccttccctcctcctccttctctgccatctcccaaggctgggattctcatctgtccccggaccactggggtggcactctgctagcttcacccctcccagcagcagccagcaatgccatggcagccccacggggagcacatcctgctccaccacctcccactgcagccccgtcacccccactggctcccccagccacgccacctcgctggcctcactgtcccacctcctcttgggctctgctcctgatgccccagtctccaatctggccccaacatgcaggcagcttccacttcaaagctctgccctggccttttcctggtatgccccccgcatagctccctccctcccctccttcagcaggtcctgtgcacacgtctcctctggccaccatacctaaggcacagacagccccctccttcactggtggtcagcacgctgggcaccaagtgtgtcagacccctggttgctgggggagcaggactgtcattggaggtccgaatgaaacggggtggggccgtggggtccacctgtctcacagcagtgactggagtactgggctggggcatttaaatgccagtgcagggccctccccactcccctactatgtgaccccgtcagcctgggtccctgaatgagggtggcctggaccagggctgacaccagtgagtggaaactgcaccatgttgtgagctgagggacttgggggctgctctatcgctgcagaatgacctgaactaccctcaccgatgaactcctcacaggccctgctagctctcctacattgcttcttctctagccctcagcaccaggtagcactccacccattttacctacacattgtgcttgttcctctgctgtgtgggcaccgtgaggacaacactctccgtgctgtggtgtttggttccctgctgaaccgcagtgcctgcacacagcaggggcccgataaatgcatgctgagtaagtgaaagaaggaagggacagatgagtcctgcatctttcacgtggccagggctggccggggctcagctccacgctgtgggcactcagaacccagggggctgccgcacccgaatcacaccgccttacgcctctggggatgggtctccataaacagcgtgggaaatgccagtgctccatgctcaggtcctctccaggaccagttctccgcctgcaccctacagcgccctcgccctggagcgcacactcctcgaagccccacggtgggctccactctccctaaacgcacaggcgcgcgtggggctcacaaggcacaggcacggctgcgctccctcccatgtgccgtgaataagcgcgcccgcgcttccgcagccctcccccgcctgcacctcacacagaccacacaccgcggaccacccctcgcccggcacatcctcctcagagcaacaggtggttctgcgcccctcaagtcgtccgggctcctacacgcccgtccccaccccttccaggctcgcaggagccactgtgctctcggcgtccgcgggccgcgccgcgaagggcagggcaggagcagaggcaggctgggcgccgcccaccgggcagtaggtgctccagcggggacgcacagagggcggcgcgcgggtcctcagggcgggcaccctcccgcacgggtcgggatgcaggggaccgtcgcacccctcccgagcccgacagcgcaagaaccctgccccgcggccttgcgcctgggcccgccgcagccctacctggggctccaggaacattctggccgccggctccccgcgccgtcctgcccggtccggcgtccagcgagcggcggctcctctgcccgcgagccaagcaagcacccactcctgcgccggcccctgccgctggacgcctccgctggaggggtgggaccccggaagcagggaaccgaggggctgggctggggaccgcggggtccgggcggggcagaggggccgcgaggccggccaggaacgcggggcggggccgaggctaggagcatggcgcggaggtggggcagggacccggggcggcctggagcgctgtcaggaggagctgcctgggccgggcgcgcgcctggcgctaggtgtgggggcgccgtaggtgccggggtgtgaggctggacggggcgtccgggatcggccgtgccgggggtcggtgctggcgcgcggggccggcgagggggcgcagcgtgggtcggggctcggcgcgggaaggggatgcctcttacccggccccggcctcacctgatcgtagacgtccactacggaactacagcaggtgttctgccagcattcgacttgaatgccttccctgacagggcgctcactccacacagctctggcctgagacaggcgtcgcacagaactccctgtccttccatttcattggaactcgggggacacggcagctgcttttgtgggagggctgatccgagccgcagcgaggggtgggctgggcacatggcacagtgaggctcctcccgcccccagagccccagcctcagaaggaatctgccaggtgatggggctacccctctgcgcattcctgtggtggaccccactccctcagatgatgcggacgggaaagatgcgcggagccgaagagcgccctctctgggggtctggattggagcacccagcacctgagctgggtgagagaccccttgggctctgggggagtccgagttggccggcggggcggccgctagggaggagcagggtatgctcagcttgaacctcacagagaggctctgacaactctggagagctctcaagccacgggctgatggacaatcgtgaccctgacaacatctggccgccccaggatgcccataccctcaccccacctccacccccacggctcttgcccaggccttgccagaggccctctgcctcccagcttgtttgcctgctcacttactagcagcaagagtacctactaggctggctcgatgggcagttgtctctgtcttgggaaagtaggggctgtgctgggttcattcactggcctccctcaagccagctcaagggcctggagacaggagtccttctcctggagtgctgccctctcaccagctcttctctaccagtgagtgttggcctggcctggaaccgcttcccactgctcagagcatgcactatacattactgcgtggtatgcagcgcctgtgggtgggcagtgcggggagtacgaggcaaccaggcagaaatggcacagtggccctccagctttcacaatgtcctcccccacttttgcttctgcatcttgtttcaggccagccagaagatgcgaagctcatggtgaccttggcaggcagacaggtggcatcaggatggtctgggcctgcagggccaccctgtcccttcaggtggcttcatggagagcaccaagaaggtgaaacctggtgtcttgcccctggggaagccttcgaggcacctgcccctgccttcctcagccctgtaccgtagccctgcagaacatctgggccctggggtggccccagtgttgtctcaggaagtccatgtgagcagttggccctgctgcctcctgaccccagagcaagcatcccctctgcctccctgaatgtgacactctagaggaggtggtggatgggtgggcagccccacaagccttcttatgcagtcacagggtcacttcctatcacgctcatcccagattgcaccagtgtcacccaaggaccttgataaggcagacgcttccccgggaggaatggggcccttgcccccatctctggctgacacagatggtgctgtctcctttacccaccagtgtgatctcagcattcatgtgtgacctgacccacatccttcctggtgcctg

SEQ ID NO: 914027 - DNA, 4001 bp, Homo sapiens
gttctattgccaaaaaccaaaggccaaccaaagctgtcccatcctgcccctggcatcattctacaggtggggaccggcgtgctcaggggctcctggccacactgtgtcccagtgcccactcgctctcctccctggctggcccctcccaccgctgggggccactgtgtgcgtggctctccccaccgcagccactgtccagcacaaatgccatttctccctcctcctcctcctcccctgcctgcagttgctaagttacaccaaaaaacccctctgctctgtgtgaactgttccatttccacgatttgccaggtggaagggagccatccggctggcagctcgaagatgcctcccagagaaaaacaaactcactggctggccttcaggccaaggcacacctgggatacctgcttggttcacaaacccaggggcatgtgcaggaggacacagcttctctacttcactagagagcctgggggatccacacagctcatgcccttctcaggagcagggagtgtgggcctgctgcacccgcctcgctgggtcactaccacccacagccctaaggacacacactggctggaggggcagagaacccacccacgtgtccctggccatccagccaaggtcctccatgtccccctgctccggatctccccttcctgggctggggtcctgaggttccaaagcaaagtgtcactggacatcagggtggaaatgtcctcagaggtcatcaaaaccgtgtcagtctacagatggggaaactgagtctcagaagcctgcagcctgcccgtggttcacgaatcaagacctgtagcctttcggctggaggccccctagagccgcttagagtccagggcaccgaggtggacaggctgggctggcaagactgcatccggagggggcgggagaaccctggggggacagagggaaccaaggcctctgggaggctcccctgcacccagcctgactcctgtgtttcaggatcctgcggccgacggccatcggggcccttcctgcgcaggacagtgggagaagagtggcagtggtggggagggtgaaccagggagaagctcactgctctgagcagggagggagggagccccggccaccaccaggtctctgcccccaggtggctcccaagaggcaggcagcggcctctctgtaaatatccaccaggtccagcacccagaggcagccagaaatgcagggcacaggaacctgccagcgcgtccctccacacacagcaggggactcccgcccccacctctcactcaccgaccctcggaccagaaccagctgcacctgccccgttcctggggccggcaaggcctggggcaaagagagcgtggtccttcaaatgacccttgcccagcagggagagggagacacctggcatggccctggacctctcccccaaatgcagagctcaagccccaattcctcgccaaacagcaagggcgtgagataccacggcggggcccagaatgcagaagagcaaatggaaacttccaactgcgcagccctgagctcctccgattccccagcccccacccccacgccaggccccgggcagcgaacctgcccgcagtgcccacgcccgcccgccgcgtgcgctcctgccacgcccggcccggcccggcccggcccgccaggtgccctgaaggggcggagggtgcagggggtcctggcgccgtccagcccggggcggagttctcagcaactccgcgcgccgggatcccggccgccctccccgcgcgcgtcccccgccccgcgcccggagcccgcgccccggccccacgacggccgcgccgggagggaccccgggcccgcgcacgccgcgccctgcccgcgccggcgaccggagggcacggccccaggcgcgggcgggggccccgaggcactgagggtccgcggccgctgcctacctcggtccgggccagcgtcgctcccgcgccgccctcgcgccgcagtcgggccccgagcagcgcgcggccggcgccggcggcggctcatgctcggcgcccgggcccgcggcacccgcccacccgcggccgcccccgcgctgcgccagctgcgggcagagcagctccctccgcagccggcgccggggagcgcgagcgagcgagcgaacgagcgagcgcggagcgagcgccgagcgggcacggagcgggcgcgagagcgcggggagcgggggagcgggcgggcgcgggacgcggagggaggagggtgcggggcaaaggtgcagggggaggtagggcgcgggacggggctcgagcagagggcactgggacagggcgggcgccgggagagggcggccaggctttcatttaaaaaggataaggcatcacgcctgtaatcccagcactttgggaggccgagacgggcggatcacgaggtcaggagatcgagaccatcccggctaacacggtgaaaccccatctctactaaaaatacaaaaaaaaaaattagccgggcgtggtggcgggcgcctgtagtcccagctactcgggaggctgagggaggagaatggtgtaaactcgggaggtggagcttgcagtgagccgagatcgcgccactgcactccagcctgggtaacagagtgagactccgtctcaaaaaaaaaaaaaaaaaaaaaaaaaaaaggatcaggcagcagacaagctaggaggcgatgcggccaccgcatttaaaaggccctctggggactcccgcagagctggcaaaatttttgtcagtggaatcagacggtgaaagcccttctgtgggcaagtcctggccccttgggtcactccccttaaccatcttaatcgccctgtaaggtcggtggtggatttgttcccattggacaggttagtaaactgatgcacagggagtgcggttaccctgcagggtctcagagcctataagtggcagagcaaggctccaaagccaccttgaaagatttcagaaccactaaagcaggacacaggtcttctggcgtccactggaacttcctgtcgctctgaagggtcaccttctcttgaacggacaccctgtggcctgaccccagggtggcccagagtgactcttgcaggcagtcagacgagggccagtgagaaacaggtctggggcgacgatgtccccaggtggaggggtctgtgtgaaaaaatggggaggagccccacagcaccccttgaagaggctgaggaccttgcttactcacttagtccttgtgtcttgaacacctgtatgccaggtgtaagatggggcactgggattcggctgtgaatgtctctgtctggttggagtttgcattcttgtgggaagtaggcagtgaataaaaatacacataaatagttcatgtgtcagatgctgcagatcccacagagaggcccagcagggagagggagccagcgaagggagggggaggggagcttgtagggtgggggattcttttttattttttaaggggaggtgtcactgtgtggcccaggctggagtgcagtggctattcacaggtgcaatcactatgctctacagcctggaacttcctgactctagtgagcctcctgcctcagcctcctgagtagctagaactgtagtttctcaccaccacccttccctgctgggttggggattttattttgggtgatcagggaaatcttggctgaaaggatcatatctgagctaagacctaactgaggcaagctatgctgaatccgaggaatgaacattttcagcaaagagaacagtacatgcaaaggccctgaggtggaggatgccttagaaggaggccaagtggagatgagtgagtgtggtagagaggagcctgcaggagctgccaggtggaccatatcgcgaagagcctggccagccatcagccctctgtggctttgactcagagggaggtggagggttttgcacaaagtaatatgatcttactattttttacaaacaatattttattatgtaagattttaaacgcttataatagtaacggctaaaaaggtatatacaataaa

SEQ ID NO: 914028 - DNA, 4001 bp, Homo sapiens
ccttaagcaagtccagttccctctctgaaccttgggctcctcatcaattaaataactataatcctcgatgacttctgtgaagacgaatgaggagacctgtaagatgggccttgtgttgggctcacccataatgaaaagaggctcccattactattcttattgacactgggagttgggggctctggagagactgtggagccccagagatgggaatgtgaggcctgcctgcaggagtggccatgaatgaggagagagtctgagctgacacctgaaaccaggccccagaccccaggggcccagggcagagggctttctggcagatcccctagttaggtctcccctttgaggctttgcacgtccagaatctgaactctgacacacacccaagtttcgttcatgttctttgttatctgtcatggtccacttggtcctgacccagggcgaccctggaccttgattctgttctcgacctccaggctacccactggagcttcatggtggaaatacaacccaatctcctgagtttcagacagacactttaatctgtagcatcaacctttttgttgtcaaatcaccagcactacacactgagagaattatggctagaactaatgacaacagccttcacatacactgacaaagtgctgaaacagcccatgacaatttccggccagcatttttttaacctaagtttaatgagtttcatctctcctcttccctcccttcctctttctcctctgaccctctcccttcctgtcttctcccctaacctgctgtcctggcagaagtagctaaggaaccacacagaggaacagaaggcaggatggtctacatttacctgttacttcaccaattcacttctaacttaaaaaaaaatggtttctggcaacaaatcctgattgacaccttagtactgtgggcagttaaactacagcaaagccagcgaggggctcctctgtgagtgcaaagcatagctttggagtctaacctgcttgggttcaaattccagaagcccagcccttatttgctgtgcgaccttatttaattcctatgtgaaatggggctcctgaagctgtccttactgtgttttaagaaagtgctggccctggcctgggcactgattctggtgtgagaggaggcctccctccctccgccgtgccaggttaatgaaaacactgaggcatgttttggaagtgggaagtgcaggatgggaccggagtcaggagcccagaagagcagggcagcaggcaggctgaccttcggagactaagggtgaagagcaagagactcaggggcacaacaagccctgggttcaaatcctggctccatcaccaactcatccggtaaaggtggacaattttataactctttaagcctcagttttcacatctgaaaaggggataacgaaagtaggactctcacttgctgtgaggagtaagaggcatatcgtgttaaagcacttggcccagagcaaggcgagccctctacagacagcgattgtgagacagaccccccctgctgctattatcttggcgttcgatttccatcagtgaaatcagagttgtgccagaggcctctaggctctctccccaactctaggatcagtgcttctaggaaactggttaaggacaaggtgaacaaaaaaggtgtagccagtggccgggctcatctgtcttgctcaggttgtagcccctaaattgcttaacagaggtgccaggcgcagtgccccctctcagcaatgagcccgaggcccgcaatgcgccaggctggcgggggagggaccctgcgcgctgcggccgaagggcacaagtgcccaggcttcagcgtccctgcctggtggcagtcctgggtcggaggggatgctccatggacgcccaagcactctcctgctcgttcatcactcaccgtccagtcatcgcgcagtccagaagccactgcatgtgtcgtgtcctcgcttgcaccggagctgcgcccgcagcgcctgctgaccccaggcttcagctgctcggggccaggcccgcccctcgccccgcccctcgcccctcgccccgccccgctccccgcctctcgcccggcacggccaaaggtgccgccccggtctctccgtcccgccccgagcacgcccctcactccgcaccggccaatggcaccgccccgtccgccccgctctgggaacgccggtaggttccgggtgcagggcggtggcctaggggcggcggggaagatttggggcctgcgacctgccaggtgtccccaggccattgttcagctcgccgcgcgctcccgagttcccgagggcgccccgggacgcgaggagaaagcagcccgactcagccccgagaggttcggtgtgcgggcagcggccagggactttgcggggtagcgcggactcctggacttccaacaagggccgctgcgcaggcgctgcaatcactgcaggcacttgtctgcatgcctggtggggcttggagtctggggaggcttatcagtaaagcccagagcatttgctatttattgctcaaggggcacctttgtacagtctggccgtttgcttggcatggcctcttagaactccttattgtttaagaaatccgatctggtgaataagaagttagtctttctctcccagtcactgcctcctggacgaatatttgccagcacggaggcagagaggacagaaaaccacaagccatttggggaactgggaacagttcagtgtttctggggtgtgggggtgtcaaggtgggggatggggttgatggaaaacatttgcaatttctgctttacctcacgattcccagctctgacctctggacctgttctctcccacccctaacataaatcattttagtttcattcagtgtgcgtttcctaatatttttagggtctcatggccattttagaatctgatatggatcttctagaaagtgcaggtggccatatgcaccaaaatcagcctgggatttgagtctcatgggtccctgaacttcgacttagaggggctgtgctaatgcttgtatggctgctgtatgacttatgttggaacccccacctgcaaaaagtgacaggactgaagatacccagtccaggggccctcccgtttctgcgtttgcttgaatttttggagaatggcccatcctttgacagctctgaggctccctgtggttggtgacttgtcatgacacatttgctcttccacagccctcatcaaagctgagacaaataatcgggtgcttccaaaggttttttaaaagtgggtaaaattcaatataactgtcaacctctgagcatgagatcctaagaatttaatcactcctgataggagaagtaaacatagcaccagggtgacataacagtttccctgggctctccagaactcgagtgtgaatcattctctctgacctaattaatgctgttcacagggccatgactggctctgagtgaggactgggtttgggacagcaaccccatgtgtcctgtgcacccattgtgggctcagacactatgctagtgctttacattggggatcccatgcaattcccccagcactcctgggcagttggtgttactgcttgcattttttaaaatttccatttttattttaaatttaggggatacacgtgcgggtttgttacaattgtacattgtgtggtactgaggtttgggattgatcctgtcacccagatggtgagcatagtacccaataggaagtttttcacccctcgccccgctgtctccctcccacttttgaagtccccagtgtctattgtttttatctttatgtctaggtgaacccgatatttagctcttttgcttgtaagcgagaacatgtggtgtttgcttttctatttctgcattagttcgcttaggataatggcatccagccacatccatcctgctgcaaaggacacgattttattctcttttatggctgtgagtgcttgcattttacatcagacacaggtgtccattgtcagcgtcctcccctcagaaggggaggg

SEQ ID NO: 914029 - DNA, 4001 bp, Homo sapiens
tggctcacgcctgtaatcccagcactttgggaggccgaggcaggaggatcacttgagatcaggagttcgagaccagcctggccaacatggtgaaaccccgtccctactgaaaatacaaaaattggccgagcatggttgcgagcgcctgtaattccagctactcaggaggttgaggccagagaaccatttgaacctgggaagtggaggttgcagtgagccgacttacaccgctgcactccagcctggactatagagtgagactctgtctcaggagaaaaaaatatatgtatataaatatatatataaaaatatataaatatatataaatatataaatatttatatatttatatacatatatatggcaaatatacccagaaaggaacaggaggggtggtgcactttggtgtccgcaaaaaatacagcttaaaaagcatctacctcaagtataagatctaccatgactttctaaagaattaaaaaaaaatttttcccatacctccatctgacgcccttgtcagtttaatctttccattcaatcccaccctctggctgttaccaaaatgccataggctagtattgcaaacacagtccactacagtcacctgtaatttaggcgaataacagaacttccttcactattgactattatgaaaggtttgagagatgactagcctgggatcatctgttccctgctgggaggaggtctgaaaaattcataggcaggggagaatgggaaggtaagttaaaacaaaccaggtaaaaagaaatccactttaaataaagctgcatttggaagtgtacaacaattctctcaagagcctccagaaaggctgcctttggttccgcagagctccacaaccgcacaacctgctctgttataaactggacagcacgcagcaccttgcttaactaactctaaaaataaagccctctcgtttagctcactaaactgttaccccatattccctaaaagctgtcattacgatcaaaatgtctgcagcctttacaactaaaaatgtggaaacttgtgttgcatccttttaaaaactccatctgctgcggggagccagtgcacatctacccatctatttgagtatatgcgaatcttgcccttatctagaatatcctatttcccatccatatgcctggctctagcaaaataaggaccctcaatggcgcttctttactgcttctcaagaaacctccatgttctgacctgactactcctggaaacacagcagcccctcctcaaacctttctttctgcctaacctgcagcttccagaacgcactacggggcttcgcttctgctactttcgcacttacttcctccgccggcagcctttttcccacctctcacatctaacaacgtaccttcaagactcaacataagcatgacctcctctctcaagagaggtccttccagaccccacttgcgtttctcaaatcaacccgggcctgggttttcacgcctgctttcccagaaaccaaactcctgcaagcaggggcagaacctcattccacctgcattctccgatcattacacattctcggggcaagaggcgaagctcaaagactgcctggggtcggacgtgagcgctgaaacaccgctcaaactgcacgagccgaggcgacgccggggttagggctgcattcctgtcccgggcagctccggagtctgagaaacgccaacgtctgcactcccagttctgagaccccgggaggaaccggctccgagccccagagaggggcaaccgtgcagggccaggggggacacgctacgggctactcggttctggtgaccagacaatttcgtcaggatgcggtgcacgagacggagaagaaacgctcttcagcaccaaacagcccgaggcagacatgaggaggaggaggaggaagggaagagggagaaggtcagggccagggtcaccagaggcggcggcgggcggagggtaccgggccgcagccgcgtggagagaccagcgcccgccgcggggactgagaccctcggaggctccggctgcgctggcccggcctccgcccctcgcgacgggcctaaagccgcgggcttgcgtctagcgcctcccgggaaggcgcgcccgcctcaggtcccgccaggccacccacccggggccgccggggcgccacttacccggcccgcccggccgactctgcccatgagccgcgccggcggcagagcggagccgggcggcactccgcggaaacccgccagcggcaggaggcctcggcggcgcccacccttcgctgagtcctcagggcgctcggcggcgcggggtcagggagcgcgggctgccgggagagcgcgcccgcgcctgcgccccgcctgcgcctgcgcctgcttcggcctctgcgcctgcgccgagggcgccttgccgcactgccccctgcccgcgggaggaccgcactgcacgctcccctccgccggcgtcttcttaccatcaagaggtgtcgccctggcgcacattttcgaaattccacaaggcttggggagcgcggcagcgcccccagatggtgaggaggagaagtggtccgaggccgggctttctgataggggaggtgggggaagtccctccaggcccctcgatctcattcattcaaagccactcctatataagcaaaaagttgaaaataagtctgcataggccagatgctgcaaaaggatggcaaggagcacgaggttaagcgtaagattatggaaacagatgccgcgattaggggtacagaaaagaatgtcaatgctataaagcctcggtctttaaaaacgacgtcgctgacagaagcagggagggaaagggaaagtgggacttcgggtaaatatgatttttacatctgtaattaattgggtgtcaaatagagttcaagccgataaatcaaatagtagagatttaagcagacgtcttagtccgaaggagtataccaagaaagttactataatccattaaaatccagtcattaagaaaacgggaaaagggggaaaaaagaaatacagtggagagacaaaagacaatctaaagaaatagaggattaaggacgtcatgggatggtatgattctgagggtaacccagaacaaaactacaaagctttcaaataatccacacatacatgcacccacacatacatgcatgcacacacacacacacacacacaaaaccacagcaaaaaaaatatatatatagggaaatattttaaaaagttacaaaacagaaagcgtaaccaaactatatgacagaacaagaccaaatgtctcacaagaagaaatatagacctaagcttacctactaaaaaactacaatctcagataggagcacaaaccatcatgcaactcagtgttgtatacaagaaagtgctaacgttattctgagtttgaaaatacaagattggaaaagatataccaggaatatgcaaaaaaattaaaaaaatcaggaatcacaaaccgcttactacaaagttgatttcagggcaaaaagcattaagtaagattaagaaggacattttataatcttgaggagcacaattcacaatcaagaaaaaaataggaaaaataggaaaatctttgcaccaaatcacataatctcattattcatagcaaacactgtaggagtgagtgaatagacagaaataattggcacactccttgccagacgaagagtacaaaaagtaaatggggattgagaagacctaaaaatacaattcctatgatagatctaatatatcaaacactgtcccctaaatagacattacatcttttccagtgtctaaggaatattcacaacaattagtcatattttaaaccacagagaaaaatcttaacatagtccaataagtagaatcatatcggtaatattatctgcagcaattcaataaaagtagaaattaatgaaaaaacagaaaataaaacatgcctaccccttgaaaatttttaaatgcttaaataacacttggactaaaaaggaaaacaaaatcaaaataacataatat

SEQ ID NO: 914030 - DNA, 4001 bp, Homo sapiens
atggcaaatatacccagaaaggaacaggaggggtggtgcactttggtgtccgcaaaaaatacagcttaaaaagcatctacctcaagtataagatctaccatgactttctaaagaattaaaaaaaaatttttcccatacctccatctgacgcccttgtcagtttaatctttccattcaatcccaccctctggctgttaccaaaatgccataggctagtattgcaaacacagtccactacagtcacctgtaatttaggcgaataacagaacttccttcactattgactattatgaaaggtttgagagatgactagcctgggatcatctgttccctgctgggaggaggtctgaaaaattcataggcaggggagaatgggaaggtaagttaaaacaaaccaggtaaaaagaaatccactttaaataaagctgcatttggaagtgtacaacaattctctcaagagcctccagaaaggctgcctttggttccgcagagctccacaaccgcacaacctgctctgttataaactggacagcacgcagcaccttgcttaactaactctaaaaataaagccctctcgtttagctcactaaactgttaccccatattccctaaaagctgtcattacgatcaaaatgtctgcagcctttacaactaaaaatgtggaaacttgtgttgcatccttttaaaaactccatctgctgcggggagccagtgcacatctacccatctatttgagtatatgcgaatcttgcccttatctagaatatcctatttcccatccatatgcctggctctagcaaaataaggaccctcaatggcgcttctttactgcttctcaagaaacctccatgttctgacctgactactcctggaaacacagcagcccctcctcaaacctttctttctgcctaacctgcagcttccagaacgcactacggggcttcgcttctgctactttcgcacttacttcctccgccggcagcctttttcccacctctcacatctaacaacgtaccttcaagactcaacataagcatgacctcctctctcaagagaggtccttccagaccccacttgcgtttctcaaatcaacccgggcctgggttttcacgcctgctttcccagaaaccaaactcctgcaagcaggggcagaacctcattccacctgcattctccgatcattacacattctcggggcaagaggcgaagctcaaagactgcctggggtcggacgtgagcgctgaaacaccgctcaaactgcacgagccgaggcgacgccggggttagggctgcattcctgtcccgggcagctccggagtctgagaaacgccaacgtctgcactcccagttctgagaccccgggaggaaccggctccgagccccagagaggggcaaccgtgcagggccaggggggacacgctacgggctactcggttctggtgaccagacaatttcgtcaggatgcggtgcacgagacggagaagaaacgctcttcagcaccaaacagcccgaggcagacatgaggaggaggaggaggaagggaagagggagaaggtcagggccagggtcaccagaggcggcggcgggcggagggtaccgggccgcagccgcgtggagagaccagcgcccgccgcggggactgagaccctcggaggctccggctgcgctggcccggcctccgcccctcgcgacgggcctaaagccgcgggcttgcgtctagcgcctcccgggaaggcgcgcccgcctcaggtcccgccaggccacccacccggggccgccggggcgccacttacccggcccgcccggccgactctgcccatgagccgcgccggcggcagagcggagccgggcggcactccgcggaaacccgccagcggcaggaggcctcggcggcgcccacccttcgctgagtcctcagggcgctcggcggcgcggggtcagggagcgcgggctgccgggagagcgcgcccgcgcctgcgccccgcctgcgcctgcgcctgcttcggcctctgcgcctgcgccgagggcgccttgccgcactgccccctgcccgcgggaggaccgcactgcacgctcccctccgccggcgtcttcttaccatcaagaggtgtcgccctggcgcacattttcgaaattccacaaggcttggggagcgcggcagcgcccccagatggtgaggaggagaagtggtccgaggccgggctttctgataggggaggtgggggaagtccctccaggcccctcgatctcattcattcaaagccactcctatataagcaaaaagttgaaaataagtctgcataggccagatgctgcaaaaggatggcaaggagcacgaggttaagcgtaagattatggaaacagatgccgcgattaggggtacagaaaagaatgtcaatgctataaagcctcggtctttaaaaacgacgtcgctgacagaagcagggagggaaagggaaagtgggacttcgggtaaatatgatttttacatctgtaattaattgggtgtcaaatagagttcaagccgataaatcaaatagtagagatttaagcagacgtcttagtccgaaggagtataccaagaaagttactataatccattaaaatccagtcattaagaaaacgggaaaagggggaaaaaagaaatacagtggagagacaaaagacaatctaaagaaatagaggattaaggacgtcatgggatggtatgattctgagggtaacccagaacaaaactacaaagctttcaaataatccacacatacatgcacccacacatacatgcatgcacacacacacacacacacacaaaaccacagcaaaaaaaatatatatatagggaaatattttaaaaagttacaaaacagaaagcgtaaccaaactatatgacagaacaagaccaaatgtctcacaagaagaaatatagacctaagcttacctactaaaaaactacaatctcagataggagcacaaaccatcatgcaactcagtgttgtatacaagaaagtgctaacgttattctgagtttgaaaatacaagattggaaaagatataccaggaatatgcaaaaaaattaaaaaaatcaggaatcacaaaccgcttactacaaagttgatttcagggcaaaaagcattaagtaagattaagaaggacattttataatcttgaggagcacaattcacaatcaagaaaaaaataggaaaaataggaaaatctttgcaccaaatcacataatctcattattcatagcaaacactgtaggagtgagtgaatagacagaaataattggcacactccttgccagacgaagagtacaaaaagtaaatggggattgagaagacctaaaaatacaattcctatgatagatctaatatatcaaacactgtcccctaaatagacattacatcttttccagtgtctaaggaatattcacaacaattagtcatattttaaaccacagagaaaaatcttaacatagtccaataagtagaatcatatcggtaatattatctgcagcaattcaataaaagtagaaattaatgaaaaaacagaaaataaaacatgcctaccccttgaaaatttttaaatgcttaaataacacttggactaaaaaggaaaacaaaatcaaaataacataatatctagaaaagtatgaaaatgacatactcatgggatttagctcagagagtactaagaggaaaattcatggttttaagtttttgtatcaattaaaaacttggaaaaagctaaatgaattaagcacttgtgcaagaaactggaaataaaataaaaatgtgagaagcagaaggacgtacttggtcaataaaagaagcagaaagtaatagcgtgtaaacagaaaaaggaagaagggcaaagatagaaggtgtctagactgggtctctccccaccccgtgatcaaagcaccggtgggggtgcaaaagccctgattaggaggtccagagctgcaggacttcctccaggttgaacctgctgtctacctg

SEQ ID NO: 914031 - DNA, 4001 bp, Homo sapiens
gatgggattttcaaaatgggggatgaatttagagggtaaattatttattatgtgaggcaaataaaatatactttaaatgatccatttccataaaatgatatttattttcaacctggcagtatttcataatcagacgcccttctacaaagacttttctgtgaatataaagttcccagttttcttctacttaaaagtaagtaatagaaaagtgcagggtaattacaataccgaagcaatttcaattaacttcatatgcagcctgatttcaagccgcaagacactggctccgtacgaagcacatcagatgtttccaaattaataattggccaaattggatttttcactaagtaaactttaaattttaaatagtttttctctgttgctttacatttatattaaggaataaagagaaattttaagtattgatgtacataaattgtcaatcatatttagtattggctgaataatttgcaaaacaatagaaaagaataatatgaaatattttcattttggaatagttggaaactgtttgtagttgaaagttatataaaatatccaattaaagcaaaaagttgtcacaagtggagactcagtattccaccagtcaacatagggaaccattttgttctgaaatatgataccagcgttttctaatgttaaacttgaattttcacaattctttctattagataaatcagtcttcaaaacaataaatacttaactgctatttacttccatttacacccatcactggttctttctgttactaagttttattaaatttacaggactcaaagcatcagcggagcagcagaaaacctctgctgtgttccataagggtaaattttgctgtacttgcgtgtatttatttagtgttgtcagtttcgcagaggtgcgcatcattcactttcctacacttattaaactagttttgaagacttcattacaaactgggtaaacccttaggagagcagagatccttcaaataaaccaacattctaggccttaaacggtcacacgaaatctcaaaagaacaaacaatacaaagcatcactgtttttacttgtatgttcctcaaacgggctgaaagagcctctcggggcttattaaccacccccaaccttctcaagcattgggaaggccgacctgagaattcacgacccaagtcgcacaggtcacccgagtcacaagatggtaacattaatggaaaacggttgcgtagctaaactcttcgaaaaggccttcttgaaaagtgtctacactttcagggcaaagtaaaacatgttgtttacaaactgtcacctccctttccactggttggtttcaggggcaccatgaagggtggtttaatttttggcattttacttacacaccctcacgcgcgcgcacacactcacgcacgactctccattccagcgtcctcttgggaccagaaagatgaaatacagtcgctgggccatttccccccaatctgagctattttagttcaaaatatctagtaccattcctgaagagaagagaaaggagataaggaaaaacaaaataattttccctaaagaacttggctcccctctttccagcctaacaaacagccagaaggacaccgactctgcccagagggggtacgagaaaacttcaaacccaaggggggcgagcgaagttcagcagggacgggaaatgaagccacaaagggggctctcggggcgtgtccccaggcgcacccgtggtccctgttcccttctcccttcttacttttggatgatctggggtaggccggcttggggcgggggcggtggctggggcggcggcggcggctgctgcatccctcgcgggccggagggtgccggggacgcccgggcaccaggcacactgcaggcaactctgtccggctgctccggaccgctggggtccgcgtcctggctcatggctgctgccagcaccatgcggggcgagacccgcccgggatcgcggcgagagagctcaagggaggggcggtcccgggccacgggcgctcactggccggggtccccgtgcccagtccccttgtccttcccggtggcgcggggaggagacgcgaggggcggggaggaggcagtcctggcggcgccgcctcctcccgctgctccagctcgtcccggccggccacgcgggggcgggggccagggggcgtctcccgaccggcgggagctgctctgcggccgggggctgctcagcgccaagctggacccaggaactctgcccgccgaccctgggcgcaggaagcggggagggagcgcggcgtacgccacccgccacagtgcaccctcagggtccgtagcccagcgttccacggcgcagcataccgcgtgaggaaggcgacacacgcagcccgcggtcggccgccgcgctctcgctccacccgggagccctgagtcctccggctgtccctggggacggtgcgcgcggcctctcgcagctcctgccaagccgggcggaccgagcgcgcccgggacgtccgcgcgcatcgcccgtgcaaagtgtgccgggcctggcatctgctcgcggctggagcccggccagcgccactggctcttgaggcacccgaccctgaggggaagaaagcctggactcgccccgaggtcagacttgtattgtaacccaggtctcagatgaccatccccggggctctccaaattgtcagttccagctgctgatttcaggtgtccccggaagcagccggtggggccaccgtgggtttctggtttctttttctcttcacttaaaagaccccgccacgaccccacgagcgcaaagacaaaaccatgcgtacattttattcttgttatttattggccaaatctccgtggaaatgtaaaggatgaaaagagagttcgccgacaacgtacggtcaccgtcacgccctctgaagccctgttaattaccctggcgcccgcgtgcgcccgtccacctgcactcaccggttcacagctgtggacgcggacatcctgcggcctttcaaggctgagagccaccaagcaaggttcggcttaatgccctggcgcgtgggtgcgaatatgcgaggcacctgacacagaaatgtctacggagcagagaaagaccagagaaagcggccgcccagtagaccttaccggctgtccggcatacaggagttctaagtcctgaggccagcgtccccgggaagtagagaaaagcgtgccttgcgtgcctgggaaaccagagcccaggatgccgcatggcctggagaggagtttgctcagggtctccactcaactcattttcctcccgcaaccacgcggaggaaaattctgaagatggattccctgagacctagcaactacttgaattccccaaaagacgctttcatgtctccccagactgagtttctagcctcaggaaactacgcctccgcctccgttgatttctgccatcattctctctttctctctccttccttccctctcccttttttatcttcctctctccctcctctaatataaaatgacactatcaattcctcgtattcataaagatcagtttgccacagttcgcaaaattgagcctcaccaaaacaaacaaaaacaaaacaaacaaaacaaaaacatgaaacaggtaggctggtccgaaggtaggtagttagctcaatagattgttccgttcgttacacatagaactccttgttctactctttcccccttctccttaatgcagctgacaagaaaaaaaaaaaacacctggtaaagaggtgttgattgtttttcccatttcacaaatgtggaggcattagggtgatctgtcgggaggatccacggctagtaagaggctgtaagaaccaagtccattctctgaatcgttatcatcttcagtttctatcactaaattcctaaccgtggtttccttaaatctccatcttccaccccatattcccacccccagacttccttagtgaaaggaaattacttaaaattaacattgcaactctcccagaaataaaagtttttcta

SEQ ID NO: 914032 - DNA, 4001 bp, Homo sapiens
cacttcctgggctttgtccagggcctcctcggccagcacgatggcatcgggcaccactccaccacccagccaggcctcgccgtgattgtcgatgaaggtgaggaccggcacggtgagcgcgaggctgccttcgggtgtgtccagcagcggcaccgtgcgggtgtgcagcaggttgcccgcggtgatctcacctaccagtgtggcccagcccagcgactgcataaggaaggcgaactcctccgcggccgtggcggtgcggtggctggtgagcagatacaccccacgttgggtgctgtagcgtgggcccgggagctccatgtggctgaagtgctcctgcgtgatgttggtgcggcgatcataggtggtgaagaggtgcacggggccggcctcagggccctggaagtaggacaggagcaggggcacagcagaggatggccctccagggttgtggcgcaggtccatgatgaggtgctccgtgtcctgtagcggctcccacacctggcgcaggacatatggggccaacacacccaggacggaggcgtcagcaaaactatcgaagcgcaggtagcccacattgcctggcagcaccgacacctggaacacagagtccaccagtgcttgccggatagcctcgtcctcaggcaactctggggccacccctggtgagtcttcggctgcagcgtcgggcgcgggccaagaaggagtttctgtgggcccgatggctcgcaccaggagcctgggatcctcagacgcagcctgcaggccggcattgagcttggtgaccagatcttcctcggagaccaccgtggagaagtccatgctggccaagtgctgcagcagggtgggcacacggtccaccagcgtgtagtagtccttcaggacctcctggaggcagtggactacccctggaagggcgctgcgcagagtgaggatggccagggctttctccagggcctgctcggccggagtccccacacagggcagcaccccgctgccctcccacgtctggctgcctccaccaaggggccccagggacctggacacgggcaccgtgaagaagaagtcagactcgcctatcctcagcttccggaggtccagggcccctcccccagtccgctcgcccaccacgatggccctgcgcatctgcttaaggatgtgcgcgatgtcctcggccacgcccctggtctggctgctggtgaggaccaccacatccttgtcggcaccgtacctttctcccaggacctggggcaaggtccagatctccgtggtggtgttggaggggcggttgtagatagtgtccacgtgcaggatggtgttccctgggtgcaggtaggagatgatgtagggaatgccagagacctggcctcctgtgcagtgccggagatccagcactaaggcggaggtgcccatgagattcccccacacgtgggccaccaggaactcccccatcatgctcagcacctcctggcccgggacgctgtccacccgcaggtagcccacattaccctccagaacctcatggcggaggcccctttgcagccaggcaagcagttcctcttctgagaggctggtgagtgctgggacttgtgggggaggctcgggggtgctgggctcataggagatgaccaggcgaggatcgttcagggagctctgcaccccggctgtcagcacactggccagcgtctgcgggtctgagatgctcagaatctcatggctcttgatggcctgctggatggcttcctgcatgcccagcaggttctccgggaagcagtagttatccaagaggaccttggccatgtccagcaccaggcttggctggaacaggtgtgtggggccagccaggccacagagcagcacggacatgagcagaacccattctctcatcatggggacccagggggaggcctggctcctgcacaaaagctccctggactgtgtgcaaggccgtggccctgctctgtgcagctgccttccgcccttgtccttctcagctggtggacagaaggtctggggctaaactcctgagttggggcaaggcttccagctccagtaagcctttaatcctgtctaattcaagcacatcaaccctgggtatcggggaggagtggccagggtggtttgacccagaaggtacattgcatcttatcttgctgtgttgtgtctgcatatcataacattaatcactgccattattttagttcctgctacatgccagacactgtgctccatcctttacaagctgacagtttccaccagagccttgcaaagtccagttattaacttgcaagtcctccttggagaactgttctgccactgtctctcccgtggcctcagggaaatgtcttaattacttattgtgtagattaaatgagaaaatatgtgtaaagcacttcttcccagtacccagtaagtaggaagcactcattactggtaagttatctgtattagatattacctctgtttcatagctaaaaaacaaaaaaacaaaaaaacaaaacaaaacaaagcaaagcaaaacaaaacaggccagagagttctgtaactaatagaagcccatcgttttaggtgtggacagatagggggtgcagcaagaagaagtccttggggctacaattggcccatacagtgcagaggctgagtctgaggctggcatcagcctcagagcttgagatttatttctatgtccctttaatgcctccagggaacagaacgggtccccctacagctttctaatgctgggaatgatgtgtctggaccaccatgtagggtgtggagtgtagaggcgcccaccttccagacatcacaggactagtgttcccattcaaatgaggttagctctgagagttaatggctagaggggactcctgcttcttgaaggctcagcccacagcctgcagttcgcagggagaatcaagcaggaagtcttgggtctccgtggtcccaggcttcacatggaatccagatcattcctcctgactgcataaagcacaagaaacagggaaaggtagactgctgaactcttcagatcccagctcctgccacttcttatagaaataatgtgggtgctgcttgcaactgactggctgtagaaatccaagaagtcctgctatggggtcggaacctggaagccctgctttgccgctgaatgcctctggagatgggcactttcctcacttaacagacagacaactacggcccagagagtggtcgcaaggccagggcagagcgttgggagagctgtcccaagctggctccagcaacaccgccttggctgagcgggcagcaggcaggcgcccctgtgtgcctcagtaggcagctggagaaggtggtctcagggacgtgggctttctctacacagctgagacccacaatctgctctttggaaatcattatctgaggatgtttaccaactgctttatgaaggccaaagaggtcaattagctaaaacaaacatatttttagctcattaggatttgtgtaatgctcaagtgacatatggtcacatcactccaccgtatgcagccaatggaagtgagcctgatttacgatgagaatggggtggggctgggatgctgccaacacctccggatgaatgcactccttgcatatccttagccctgctgggaagcctgggccttctcctctgcctccacttggagaatcacagttctgagcatgcacttccgtgtcctcagagggcacttgtctgccattgcttgagtccaggcaaagcttctggcccagaaagggcttgggggagaacaggagtaagactgtctttggggaaaggattccctggagtcttactaagatgtagtttcaggataggattgtctggacctatcactgggatttgatttgtgtggctagcccagagccttaagaaggacgtgagaaaaaatcagactgttgcaagtccctggggtgcctgagttggatggggcatgggtagagaagcagtgcttctcctgtgggtaaggcccaagcaggtggaagagcaa

SEQ ID NO: 914033 - DNA, 4001 bp, Homo sapiens
accctgtctctaaaaaaaaaataataataaattaaaattaaaaattaaataaaatttaaaaatgcaatttcatccaacacacaactttagaggaagtccaagagggtggtgtgccatatatggagagcaaagggttacaataaaggacacttctaccctggatcaccgagcagagagagtctccctgaacaacccttggtcctatctcacagaagagctcaaacaatactttgcaaaagctggtctggattaggagtccctgcagttcagggccacctgatcctggcctgagatttggaagcctggcttctgacattggctctaacaaacttgttgcatgtccttgggcaaagttctcttggcctcagtttattcatctacatattgaaccccctccaaaaggttaactctccctctctaagattccatgatatgtgtcccctggcctgcattattctctagctaccaagtagattcctgatttgaaacttaggataaatggggaaaaaaatgggaaaaagagcatgtagacactgttttctcatgattaggccaaattttaggatgttcttctacaagtcctcaacatcactcccctccacatctgattttcacagcttagtggaaagggaagaggccacagccacagcacactgtgcctggctcagaatctcagcatcagcaggccaggcacttgggaggcatccacccctatgcacagtgttccctccgtccttggatagggctctctcggcctctgtgggagccccagatagtcaagctgtctcagggattcagcccaaagagacggaggaaatgcagagctaggtggagtggtgatgtgaaagacaggaggagaaagcatggagaaagcacacaccttggcacagtggctggtggggaaaatgacacctgacaaaccgaaaggtccttttgagcttaggccaggtttcttgagctgaggtttggggagggggtaggtagctgctcccaatcttgttcccctaacctcaggtggtgctgcgggttcctgacacttccagacctttccgcaggccattcttcctaagggtaggtacctctggagaagaaacccagcgatttggcccggtaggcgccccattcccaagacagtcccacagagctgactactcacttcctttctggagaaaggaggctacgccccagtacttcatcttgaacttggcagggtcctcggtgtctgtgaaggtgcccaccatgtctgcgcacacgtcccagttactgcaaaagccaaggggatcctcagccaagccgggcaaagggcttcctccctccctccacccattcggtgctcccttcccttcacaatgcccacgtggcgatcagcaggcagggcccttggggaaccctggagcgcaaagggcgcagctgccccggcggccactgacttcaaaagacggactcggcccttggctgtggcgctcatctggccggtctcgtccacggagaactccgcgacgatgttgtcctgcagaaagaggccctcggggtccttcttggccatggcgtaccaggtcccagagaactgtgagaaggatgacagcaggggtttggcgtccgggggcgcacggcgggccgcggggagggcggggatggggtggggacctgggccgcctgggccccctgggccgatacctacgcgagccttgtcgaagttctccttgactcggaagctgctcactcggcagtcgcgctccgcgcggccgctgcccagcgccgccaacagcaagagcgcccacacccacttcatcttgcccaggaatccgccctgcgggagacgcgcctccgtcagtgcccggcagccgacccccgccgccgtatcccacctcaccccaccccaccccaccccggcccatcccgccgccggccccgaggccccggccgcgactcaccaccgggaggggaaccgcgcgcaagcctggccgccgagtccgggcgcgcgtggagcgagggaggcgagcgcgccgcggccgccccgctgctttatagcgccggggggagggggtcgcgctttcgtaaccgcgcggggtgaaagaccgaaggggaggcgccgggggcacttgcataacgcgccctgactcaccggagcccgggcacgggcagggtccctgtgggccggcctcacctccaggacagcctcgggcacagtggagcggccgcgcggggtggcctcggccaggccaaatgcgccagcggccctggctcagttaccctgcactcgtgccagcggccgccagctgcggtctagggtggcctccggggccagtggctctggcaggaggctcgagtcaacctggcgggaagaccgtggcctcacagagcgagagcggacccgcgaggctccctggtgcgtgagtgcccaggccctggccatgccaaattggcgcctccgtctgccttctgaggtccacttgtgcaggaattttggaataattcatccaagtagtttttcattttataaaggatgtattttactctctttcaggagcgttgtggtgccctctggtcaatatttgttctttagtttcaacatctttaaaagcgttaaaaccctccctgttaaatattctccagaaacgcaaccctggtcaggacaggaaatattttagcagcctcggtggtcgcctgcttactccgtggcacttccctgaaaccactttgaaaaacacctaccgattgtttatgatgcaattttatttcaaacccatgttggaattttcatttattttcaaaacagctaaggtcggttgttttgttggctggggagtagacaaaggagagaagagtaaacaacattctataacttcagtagccaattgaatcaaaacagtgtgactagtttaggtattttcctgtgtgatggcacaatttactgaccctgtttttctctttctgttcgaagttagagttccactcgtttgatcaaagcagccaatcaaaggatgagaatgacggaatgagaattcatgatgtggcaaagaagtatctcttcttgagattctttccatacaatatcgattgtgtctccatggcctaaattggaaagattcgagatcaatttgggccattttgctgcagcccgacctgaaataagaggagatcggggaagaggaaggtggctgccaaacagaaataaggagttgattggttctcagaccaatcctttatctatagggcattagggctaattctgagcatcctgaaaagatgacatctgtggcttccttcccccctgcttctccatctttttcccaccttccccttcactcttgcacccatttgagtcccagcagtgtctggggagccaacggtgatgcatttaactcctaaccgccgcagagctaggaaagcctgtttctggacaacaagctgactaggaaatcttctgattgggccagttttatagaagactgtgtaatcccaaacagctcaaataagttctgcttcagatcgtctcctgcaggaccctatggggtatatatctatgcaccctgggtgggaaaggattttagggcacctctctatctcctgcccaatacttggatcccctcttcggcattccagaggagaggtcttccagtttttgctccaggttctttagtgatagagagctcctagcttagcccagttgcctttggacagttattcctgccagaaacgttctcctaataccccctggccttgcagccatttctcctagaacacattctggtggcccttgcacacactgtaggttgaataatgaagggtatttcagttcatttcgatgatggttttgatgcagcaacaagttttcatttatttgttgggtgtttaaaggttgtttcagagtaaaaatttgaggtgaaaaaagaaaaaagaaagttggtgtaaccattcctctgcccctcctcttttaatgataaatcatggaccttagtgctccagataccagcagaggaaaacagtttactttggca

SEQ ID NO: 914034 - DNA, 4001 bp, Homo sapiens
actctactgggcctattctttaaggcccatctgaaacgtaatctcccttgccttttctgattctccaaccagatatcccttccttgtccaacactgggtattagagtgggtgtaacttttacaagagttgacatttggacctgtactgcagatatctgtgcacccaaactgtcaattcccatgatcaactacgtgttactgacctttgtgttataggtagcacctagaacagacattcatattcattggcaattatgaaaaacaaaagtctaaaagtgcttcacaattttctgtcagctgaagaactggtcaaagaaatccagaggcttttttttttttttttgtaaagtacagcttcttaatagggcacttgattttctaggtgtggacacaacagttgatagacatctactaggtcaagaaaggtatgcctgaattagataaatgacagactcaaaagagaggccaggaaaaggctgaaaaacaatctgaaggcatctgtggtatccttttgtttatatcttgatttttagtttcgtacaggggaacacaggaagctctgaggctttaaaactagaaactttgcgatttaatcaaatgaaaaattttgaatgctgtgctgcaaatctgattaaatagggctagtaattcacttccaaacaaaataaaccccaaactcagaaaatctagctccttttaacaaaaagtctggtaatgttatttttcctaaattctaaagcttatcagagaagcctgccccctcacataaacattttttcatatacctttatgaaaccttctgagataacactactacagaggtgaataatgaattcataggccctagctgtaactacgtcattgtttacttggtgactttttttttaatcggggagaggggtaaaatggagatgagagaaaatcagtttaaactgtattcaaatacatttacacgattaacaccaccaactcaaggaatttctttttcttacagacctgtagcacttgttggtaggagaacaatgaaatgaacccataatttgaacaaaggcaacaggcacctgcagcctttcaatcacttagcaaatatttccgccgagacagggccgaattcggggatctgggcgagcagccggtgtcacctttctcggtaagctgcaaatcttgggaaaactaggacccttcccagggatcctgggctgggagcggtctccggtttttagacaaatctctcctcctaccacacgtgaccgaatggcaatcagccgccaagagagacaccgcaacgcatcagccgcgggatacaaaggctcggcactgccgtcgcatcctcgggaggatcgcggagcctcccgcgctcggcgtctgcggagcctgcgcagggagcagctgcgaggcgcgccgctcccgggcccgcagggcggtgccgcgctgcgcggggagcaggagcggggagcgcgcgccgcctgccctgagcgcctgcccacccagcgccgccggagcaggggcgccgcgccgcaccgcacgcagccgagcagcgccacagccgccgccgccgtcgcagccgcagtcgccgcagctaggccctcggccgtcgcagggagctccgcagcgacgtggaccaaggtgaggaagccgagggctcccccagaccctcggcaggcccgaggccgggctaccccgtccccgcccaggcccaggccttccctttcctctcggctccttccccttcccacagctcccctgggcctcgcgccggctgcagggcgcagtgagaggcacttacaccacggctctggagatcatccaggacaccatcttcacgggggcttgggccccacgtccggggcgggtgggcgcagggcgctgcggaccaggccgccaacggcaggccgcgcgcttcgccggctcctcgcgctccccggggccgcgctggcgccctcaggagccgggcccggtgtgtgcgcgcggcggcctgggctgcgcagaggtcggtcccccgcccgtccccgcccgcccccgcccgccggcccggcagcctagtccggacagcaccccgcccctgcgctccgctgataggcggtggcggcggcgcgttggcccgggccagggctggggccaggcggccgggctccagggctgggctggcgggatcctagcccgcgctggacggcctcgctgccgcggccttggcccctgcgctctaaccaaccttaccctccttagctctttgggacgcccacactcgcggcgagagtggggcaggaggctgaggaagggtactggagggtagggattggcagtgcctgtgtgaaaagtgagatattcgcaggaactcggtgtccaataaaactctcgaccaggccctggttttggagagccaagactttgaggtgtgcctggccacatccggtatcctcagtgtttacggaggcccagcaccaaaggcgtccttatattaccacattttaaaggaatcgtcgagaggttcttgcacaggcctccgtgtgtgccacgagtctcgtggtgcaatgcagggagggacagaggaggatttcatgtttgcagtagtgggtgcagtgataccactgttctgggcctcttagggcaccttttcatcagagcatctgcaaagactgtttacagacacgaatctccattatttccctgaggcctgccagatgttcaaagtaaaggctgggtctaggattcctgacctgtcttaagatttacaactatattacagctgtaagatttacaactgtattttttggaggttgggttactgcttacaccttgctgttcttgcaaatatcatttcaagggcagacttttaaaactgttttttttttttttttgtgacagtaccaaattgagaaaatgatgttaaagtttagatatttttattttttccagttaagacgatagtaaaagataattctagtattcagatggtgcgaagaataaaagatgaaatgtaggcttggagcctttaattaaagtcctagaaaatatgatggcttttgtgaccatactgtaattttgtcttcttgttcctcagtttccctgtgataaaaagggggtaataatactgtagtctgtctcttgcctttcaagggtgatatgaggcactgctaaataatatgtttaggaaatactctgacttgcatggaagacaatcaaaggacacaacagattatcctaaattattttcagttctcagtcaataaattgggtaatatttcattatttaagaaacaagctcagaagctactttctactcttgggttaggttcttttcgcttattaattcatgtcaagactttttatttcaggaatttgagtaataatttgcatttaactctgaatcttttatttttggccattattcagcattatttgaggatcaggtgtgctgcataagcaccagttttttggcgaactctcttgttcaataaaactcaaatgaatttgaatatcattcagatcccttcatgaaaggtcctgaaatagctttacagcctttacttttactactttcacccccaactcctaatgtacccgttccctacctctcttctttcagccaacctgtattttcatgctcagtgcttttgcccagatttcgtttttcccttaacactttgctccccattctgtacctatcagaactctcatttttcagtggcctgtgccatgaagacatccttggttttcctcagggacaattattcctaattttgtctgtgctctcataatttattacttgaatttctatttcttatctgtgtcattctgcctctaccatgtctaatgtactgaatggtaaaatgtttgagaacagacatggtgtattagatttctttgtgttttccaactatctagcctcagatagggtaaacgtccaataaaaatttgaataatgtttgtgaaatacagtcactctttaggcatcagatttaaaaaatttcagccacgtacattggaagtctcttaaaaat

SEQ ID NO: 914035 - DNA, 4001 bp, Homo sapiens
ttggggtggttggggagcaccgaggggctcactggggcggtccttggcagctccaagagtgcggctcgaacctccggagctgtggctcctgggaaagagctctgcagcctcttcaaaggccccagctgtctactccagggagtggggctgcctcttcactcccagtgcctccaactgtggtgtccgggttatcccaggggctaggggctcaccatctctggattcgggaagctgtctgtgggccaggggtctgggcacggaaagctacctgcatgcctgctgagtgccacaagccggcccccagagcctggcccccacagcctcactggccaccccaactgaacgcaaggctgtggaagggtgtggggaagtcctctgcccagcacaccagcagcagttcacacctggccccctgcccacaacctcaaagccaaagccacagcccagaatcccaagacagcgtcagagcgccttgtttgcttctgccccgtgtcttccccctgcagcactgggaccccaaagtcctaacactcagaaaagatagaaaggcaagggcttctcccctgtccctcgctaggtggactggggacccgctctggcctcagcatatgctgagctgaggcgcaggtcacacaaatgaagtctcaggcaggcctggaaactcagtttgtgcagggcctggggccagagacagggtgactgaccatggcttcttctgttcccaaaggctgtggggagagaaagccctttgtaaggagtgagggaggatggccagggctccttccctcttagagggaaacttggttcatacacaagcgcttggaggggatcaagtcagggccagtttgagggacacttaaacgcgtgccaaggggtcaaagattccacagccttgcggctcactctgccagagtttgggtggggtcgatgaccatctttgcaaggccacacctaatgctgggatcctaaggcacctgaggtttcaccaggcccagcaccaacgctggctggcggcgcaaacccctgccccaccccaagccctgggcctcctatggccgcatcttcagcatctctgccaggcagcgccacacgactccagggctgccgggtgggacgcctatcacggcggcccctcggggggagccaccccagaaaccacggtttttaggtgtttaaagacagggcggcaaaaacgcacgagggaaaagcaatcttttcaaaagagcctccgaatccctcggctggccaggacggcagagctgggggaggaacgcacggacgctgagcgggaaaaggaaaccaggacggagccgtctcctgccgaaacagaactctccgcacgaatcgcgggctttcggggctccctgacccgtccgccaggtcggccccgaaacggctgtcccgtttgctccaggacgcggctttggcgcagggcgcggccagattgagacctgcggctatggctagggttctgagcaccgacccccgcggcccggcccgcgctccgctcccgcccgagacccgcccagccccggcccgaggcgcccggcccgaggcgtcctgcccttcgcccgccgcccgccgcagccactgcgctcccagccgaggccgggtggccggcgaccgcacagcccgctgcccacggcaaacagaaaggcgcttctgaacgcgcccgctccgctgctcggcgccaacttcgccctggcccctgcgggagccggcggccggcagaactcacctttgcctagcagcggcagcagcagcagcaacagcagacgcagccccgcggcaccggacgtcgccttcgccatcgcccgtgcgcgctggggccacggctggagggactgcggctagggccggcgggtctggatggcgggtgcggcgctcagtctggccgccccatccccgcccggggcgcggcggacgcgacggacactgggggcgcgacgcacgttccggggcactcagcgctgctgcgcgccctgcttcggtcgcgggactgaagcgaggtaagcgccggctgcgccggaggagcgggtaggggcggggcggggcgggggcggtccaggggtgggccaggcggggccggaggcgggtggggtgcgggaaggggcggggctccagtgcttgctctggctgcgcggggtgcggccggggcgcggcgcgtgtaggagctcagtgcgggacgcgcggcttgggccgggtggggcttggggaggagcggggtgcgggagcggggtgcggccgaaaagggcccggcaggagccgggtgcggaccccgaggtgcgcggcggggatggaacccaggagcccgggtccgcgcacctacgcagagccgctcttcctacccggtgcgcgcccgcttgcagtccctgccttttgccctttccgctgcacagagagggcagggatgctacgcgggatgcaggtctggccgactggctcggggtgcgaccccgcggactcagagaagggcgccccgcctccaggctctccgcggagcgcttgctgcgccatttctcagaggcgagaggcgcagtgggagcgcggcctctgctggggccggaggcaggaggcggggaagagctgagcaggggaagagaggcagaatagcctttttcagcatcctggggtagtagagagggtagggtcctggaagggcagtttgtgattcccccctccagcactggtccaacccttggaaaccggaaactggctccggcgtcctttcagagacctggtgctggtggcccttgcatcccttacacaggagaactctcaggagatgggctggcagagtcggagagcgagtagcgaggaggaggaaagaatccaattttcccccaaagaaatgatggaaatgatgcgcataaacacatttacccctaatagggagcagcaactggacctgagaaggggttctgggtgaggttggatgtgggctcagtggggaagtcctctgttctcgccccatccccggctgctttttgaggtctggcctgcacttaggcgcagagggatggaagaagggaagcccatgggcccttgaggaggaaaagccagggaacctgggcccagggcacccttgagccagccgctcccttgcttgctgtgtgcagaaccccgccctcttgcctggctgagctcagggctgaataagtgatctgcacatcactgcagatatgaagtcaaagtgaagtcaccctcacaggcaggagggggagctgccaagacagaggctggcttgcactcagccaaccgtgatgtccagacctggcttgctgaggggcaggtggccggggcacaggcctgccagcccaggagagacactgtgggccactggactccggctgcctgccacacccttccagtttatggagctagagttggccacaaggggctcccttgggttcagacaggttccatctctggtgccagtggctacctaggctacacactcaggcctgtgcccagggaagggacctgataggtagggaggggctgggggcatcttttggctacagacaagctcctgtgattgcctcctaggtgaatgaagagagaagtgggtaggcttaaatagccccacccctgcacctcccggggaccaccctggccagcccttggctgacattgatgtctggctgggctctgtgtggccatcttaaggggccatctggggctgtgctcctgcctagcctaccttaggcctttccacgctctcgctccaccctcacccttgggggtcctgagtgaacacctgacactatgagagggtgtcatttactccttggaaaaaggtctggggggccctcacatgggtgtaccctgtacacatgcatacatgcatacacctgtgttcccatacgtggacacacacgcacacagatgcatacctccctgctacgtgcacgcccagggatctgaccaaagggtcgctcagcagaggacagttgtgaggcccagagcctgctggcctcagggactgcggggaaaggaga

SEQ ID NO: 914036 - DNA, 4001 bp, Homo sapiens
taagctctctgaacctcagcttcccctatctaaagtgaggaacaggaaaaaatcctgccttcaaaactatgagaagcacttacctgcaggacagtgcatggaagagcattccaggagggaatagcatgtgcaaagacatgctatggtacaatgagataccaccttactcctataagaatgaccatcattaaaaagtcaaaaaacaatagatcaatgccatggatgtggtaaaaagggaatgcttatgcactgctggtgggaatatgtaaattaatacaacctctatggaaaacagtatagagattccttaaataactaaaagtagatctgccatttaatccagccaaaaacacacatgcacatctatgcttaccgaggcacaattcacaattgcaaagatacgaaatcaatgtaagtgcccactgaccaatgaatggataaagaaaatgtagtatatatacatcatggaataatagctgtaaaaaggaatgaaataatgtcttattacagcaatttggatggagctggaggccattattgtaagtgaagtaactcaggaatggaaaaccaaatgctgtttgttctcagttacaagtgggagctaaaccgtgagtacgcaaaggcattcagaggacacaatggactctggagactcagaaggggaagggtgggagagggagtgggattaaaaaaacctacaaatgaggcacaatgtacgctacttgggtgatgagtgcactaaagtcctagcatttgccacgatgtaattcatctatgtaaacaaaaatcacttgtatccccaaagctattgaaatttaaaacatattttaaataaaataaaaaccaaagcattgtgtatataatgacatttctagtcattaaacatgaaataaaaatgtaaatttaaaccccttccaaaaaataaagtggtaaaattttatggcatgtttgaggacctggaaggatgctagattgtagggttctcaggaaagggagacacgggctggggccaccagacagtcgtgtccagagccttcaggaccaatctaatgactgtcacttcctctccattgtcagttctcattaggtgagaaaacgtgctgatgatttctctgggtctgctttgaaccaaagctgcgttctccatcaatttagcttgggctggcccagattcaggattgacactgtctctagctctggcctcagcgagcatcttagggattctaggttgaggtaggtacctcgcagacccaggttgcctccagaggtgaagtgcttgggctcataggagtagacacagtgaaaatagtggtggggctggagaggatgggagtgaatgaacttaaataccctagagtctatttaggctagcactttatacccattatcccatttaatctttacaaccacccattcggaatgtcaaggcattgagggcagagagctgaagggacttggttccagccacacaagagcaggaggcagagctgtctgtccccagagccttttgggggactgatcttatgtgggattctcagcaggatttccaaggagtggattaaattttctcccggctggagggacatgaaaagtcctaaagcctggctcttgatcatctcctgggcagatgtcccctttcaaagtccctccctccctgacccttgcctggcttcctctctgctcccagcgggcagtgtgctgcacctcacaggttcaattgtcagaacaccccccgagtccgggcacagaggggaaggcagccaatgggaccggacacccagctgggtttggggacctctcctctccttgccagctccacactggtggcctgggtcctcagaacccactgggcccccgctgcaccccaggttctgcctggctcaccttccaccagtagcaccatccccacagccagcacctcgagctccccgaagccagtgggcagggcactggtctctgccatcctcactctccctcactgccagtggcccagctgtctctggcttcccacagccaggccctcccttttaaagggccatcccatgtgcgtggaggcacatgcaggttattatgttggaccttgggctgtttctggatgcctccccgctgcaaatggtcctcttggcccaagcagaaggaacccattcacgagttggacaatgcagcctttgtgaagccagaatggagccctgtctcattcatttcagccccattgcacaggattaaggtcggggaatccaaatggtgtgtggctgagagcctaattggaaaagagttgcataaccaggggaggggagcaggaggagggatttgagccgcagctgttcccaacaagcctggtgcctgtgtgtgtgtcctcaggctcacatgagtatactccaaagcgctggggaaaggatgaggcttgggaagtcgcctgctgtcagaggaagaaccccatctgggaccagaaaatggggttggggttctggttctgaatctgccactaactagttatgcgccttggagtgggaccactggactcttccgtttacttttctgcaatgtcaatgtcttttgtctgtggcctttatataagtcctggttagatatcacgaatataaacctcagggctgcatttcctgtctcccatagagcacctgagcataaaaaatgtcctaggacactgtcttagaacagaggggctgcctgccgtcttgtcagtctccgaccccgaacccgcccagccttgccggccccactaagagctttggctgctacaaatgacttcttgatacactggctctttatgcactgttatgctctggctcatgataaaatttacaccaggaaatactgatctaggacaacttagttcattttcagataaagaaaccaagctccagagcactatcagcaacatagctaatattgagtgaggtcaggccctgtgctaggggatcttctgatgagtcctacaacaactccatgagttagataccattatcctttccattttagatgaggaaactgtggctaaaaacagttaagaatctgcctgaggccatgcagtaatttatggatggagctggaacaaaagccgatctcctattcctcaggctcaggcatttttcaatggcatcttctgactcacctggtagagcaacccactctgttccaggaatgcccacttcccaggcctttcctctcatgagtcctcacttacatccaagcctaatccctctgcagggctgagcttatggctgcgccctccagagcgttccctgttctttctcaatttcttttttgtttttttgtttgtttttgagatggagtctcgctctgtcgcccaggctggagtgcaatggcgcaatctcggctcacgcaacctctacctccccagttcaagctattctcctgcctcagcctcccgagtagctgggattacaggcatgtgccaccatgctcggctaattttgtatttttattagagacagggtttctccatgttggtcaggctggtcttgaactcccgacctcaggtgatctgctggccttggactcccaaaatgctgggataacagtcatgagccaccctgcctggccttctgtctcaatttctaccttatggtgttggttaatacatatgtcagtccttttttcatgccttcgagatcacaaaagccttcatgagaggagataaagcagggcaaggccaagattaaagggtaaagttcatttgggcaaaagacacaaggaggaagaagcagagatgtgggaacaggcaagctgacggctgggtttggggaggtggaagtatagctgggaagcactgagaaaatcctactggctgcattggaaggaaggaaagaatgagaagccagtattgttgaaacagacctggctccgagctaggcattttatgtgtgcactggggccccagatatctttgcaggtcatacctcactggtctaggcctgcctggagccacaggcatgaaggactggggaaccttctagaaa

SEQ ID NO: 914037 - DNA, 4001 bp, Homo sapiens
tggttctatctgtcagtcttcaacccaaaagcaatctaaagtaataagtaacgcgtacagggctattcatagcagctctatttataacaggcaaaagggagaaaagctactaattattacacttttattatgtgccacacattgtactaggggcttcatatggttttgagtatttaatcccataaccctatgaaacccactttgcaggtggagaaaggtgctggaacatcagctctcctgagtcaaaatgaagccttcatttttagctttgttgattttcatgatgtaaatatcccatcataactactttcaagctacctatggtttacaaccagtttccaaactttttgaatatttggcaactggctcttgcaagccagtttgagccagctccagcacatcactgaaacggaggcacagagagatcaagtaatttgcccagtgttgctgaatgacagagtcaaggttagaaccaagagtttaattcgagtccaggctctgagcagcgctccacaggcctgtgccaaccatagagactggttaacattaacacccacaagggaattctttgactcacatgcaacacaaaaaggtttacatgaccactaacgctaacggagcacttagtacttgccgggcaacaatgtaagatcattacaacaaccctatgaaatcctacatattaaatacaataatttgcaaaacctgatggatggaagacaggttccaattaagtactttaaaaggcgagtagctactgttattcccactgtgcagaacctcattctgcagaaaggtcccacggctggtgaatatggcgaaggtgagattcggatccagccagtctggtcccagtctctaaaccacaatgtccctcataaaataccaggagcagaaaggaaatgcaccaacgcgttgggactctgagcgccaagcagaagtgaatcttggcgtgggaagcccggcaaagcccccgaacttcagagtcaggggaacctgggtttgaaagcctccccatcacctgcggagtgtgactggggcaagttacctaacagcgcctggcttccgctccctcctcactcaccgggttgtcctaggggtgaagggagagttcacccaacgcggtggacaaagcccttggcgcacccaaaggcctgcacaggtcgtagctattgtgatgagcaaaagggtggaaggaccggaatcaagggcacggctccaccttcaccgtggggtctttggcctatcaagttgcccgagatcgtggctcaggctggcccaaagtgacggccaaggcgaatccttcgtaacgtcagaacttcgctggctcggaccgcagaagtgcccttctccatcctggggttccgccaccctcgcgatcccaccttttggctcctcgcggcagaagcgaaggcccccgacgccccaggcccaggggcccagtcggatgcccgggtccagccgtgctcccccgggcgctcggcatccttccacccacgcccgcagcggaggcggagagcgtcacggagggagaagcccgcgcgccgttccgctttcggaatctggagccccatgtcacctccaaagtttggagatttggggcgctcctttttctcccagaccatcactaaaaagaaaactgcggctgttcctctttcagccaaacttcctccccggggctcccggaggagctctgcgctcccgtcgcggctgggaccgcgaaggtgcggtacccagcggggagaggtggtgcggtcggccggggctccagtctgggaggtaccaccgagccgcgcccgagcacaagagggagggcaggaggccgggcgggcgaaacggcgccccgaccccgagcccgcgggcccccgaagccgcttacctgacggcggccgcttcctgctcagccggctcacggcgcggttgaacatcgccgcgggcgcccgaggaggaagaaggagcagcccggcggcgcggcggctgagccggaggaaggcgaggaggaggaggagggcgaggaggaggaggaggagggcaaggaggaggagcgggctcagcaccgccccggagctctaggtccccgcccgccgccctcctcctagccaggcgccgcgtggcgcgctcagtgcgccctgcccgcccccgctggtgaggactcgcggttccgctccggggtgcccgggcggggcagggcagggcagccccgggtgacccccgatcgcccagagtgtgccccgcgcctgggataaggtgcactggcccagagggagcccgcgccgccgggaacttagtagccccgcggaggcggttagcgcgtcccggggtccctggccctcgcctgagatgccgccccggcccgccccgcccagcttcaagctcccgggcccatcgcggtctcccgccttctccctgtagccccggagaaactggcacggcgccgcgggcgcaccgcgcttcggggctctcagcgagccttcgcaggtggcgggcggggtcccctcccgggtcacaggctgggaagcctaggcctcgcggttctgcagagtccgggcgcggcccagcctgtggcctttgcctcctcgtcaccaggatccccgcctgctggggcctggctgctcctcgacttcgtgggcgctgcgccttcccgccccgcgaatgcgggtggggcgtccccagggcccgtgcgctgagctagccgagccgccgcgggtgggcgccctctccccggccgtgccgcgcgggcgccaggactcggggagatctgagaggattctgcaggaaccccccggttcctgcgccgggcggtgctctgtcccgcacaccgcgctctcgggacacttctctaactttggggacacgtgggcactgcctctggcagggccttcaggctccacgaccgggaccactcaagcccccacggcgtcacctgctgggcgctgcgcgctctacggtctcctattatttcatttcttctatggagcagccccagaggggatgtcattagcccccattttcttgaacatttggtttgcaagaaattgtctttctggcgagttttatttttctccttgtgtatctggctttgtctctaaattggtctttatttttagctgtactaattgctatttttccaaaccgttccccagtcgccctccccccatccccccgtccttttgcagtttttttcactacttggcactttcttttgtatcttctattctgagcttccagttctgctcactttccctctccctctacccaccccacagccccagttgcaccccaagtgtggccggtggttgcttgttgtttccctccccgctattccccctccaaaagtcgttttcctccgagcatttccaagcactctcccccttctgctgccaaaagaggatttccaggctcctgaagcgaacgcggtgaccaagaacagggttagacccagcgcggggagttctgcttttaaaactgctgttgttggcctactccgggcccagacaaacttccatctcattgtaatgggatcaagctgtgatacttaactataggcaagagtttcacctttcgtaagagcgggattttaaatgctggcagagtcctggatccaagtgaggtcactgcgttcttaaaacaataagggaattggtgcaacgcactcacccagaaaacttccccgagaccaaattacaagtaatcctaagacaggaaataagcacactggcacacaggggtaaaagttaggcacagcagctcagtgttttgctagttgccaagtccaccctagcgtgtcctgaaaaacactggtgtggcttaagacatgctatgaatccctcctgagctaagaaccccaggcatctcttaaataaagggaaaatataacagccttaaatcacttttactgtcctgttagcacatcagagagtaagtacaaaaattaagatgcatagttagggccaggcgctgtggctcacgtctgtaatcccagcactttgggaggcagaggc

SEQ ID NO: 914038 - DNA, 4001 bp, Homo sapiens
tcagccgagatcgtgccactacactccagcctgggtgacagagcgagactctgtctcaaaaaaaaaaaaaaaaaaaggttggcgcggtggctcacgcctgtaatcccagcactttgggaggctgaggcaggcagatcacgaggtcaagagatcgaaaccatcctagccaatgtgctgaaaccccatctatactaaaaatacaaaaaattagccaggtgtggtggtgcacgcctgtagttccagctactcgggaggctgaagcaggaggattgcttgaacctgggaggcggaggttgcagtgagccgagatcaagccactgcactccagcctggtgacagagcaagactctgtctcaaaaaaataaaaagaaaaaagaaaaacttgcaaatgatttacagtgtgctgggtaccgttccaagcttttacctgaattaaatgattcagttctcacaataacctactgacgtggttagtattatttccactttgcagacgaagaaactgaggcacggtaacttacaagcgtcccagctagaaaatgggaaatcacggcccaaacccaggtactcctgctccagagtacacgctctttaccaagggctctactgccatttttagcttttatatctgctgatctttatactcacagaggccagaacacaacagcctttaagagaccaagaacaatcacactttggggaaaaaacagaaaactgttaagagtccaatccatgcagaaaaaaaaaaaaaaaaagtcacataagaccaggtggaatcatccagcacacaaacacaatgtatatgcgttttccatttatgattatgctgtcctatgtggcttctggcgtcagtaaaagccattatttcaaggatgggtgaagcatcacagtgcagatggctggggctggttgcttgcagcttattttatgatgcattatttatagatgctatgatgtcatatctaacagagaccttctccagacattaattccttggaaatccatactcaaaaggcatctgtaacactcatcggagatgaatgctcacagcatggatttctgctgttaatttgcaggaaggtctgtgtaatcatcctgcatagacaatttctccaagtcaaataatattttagtaatatctcactatccagtttcctcaacagcagagtcaacttacatcctcagaaggtttgtcctaagtactcccccaaactcacagactattaaacattcgagtccaggaaaaggcagagatattaaccctaaattccaaagtggtttggtacaactcacatgcacaggcgtgcacacacacactgtactcctttaaaatactctactttgtaatgaagtttcaaagaaagtacacaccccacaaaacttatttaaaacctcttgtcacctataccacatcaagtgtagtacattttttaaaaagtcctcccaatttagaatcagagagtcattttgttacaactggtgatctgtgtaaggctccagagaaactgggtcatggaaacatggtatctaaatattacttaagtgtttatcggctccagtatctagctgctgagaataactaccccacctgcatgcaattcccttgccagagagatctgattgaactgcagttagcaggaaataacatcaaaagtgaaaaaagtttttcaataatcatagtaatagccagcatccaagtcaggagcaggaaagctggtggcagagggttggctccactcagaaagggcatcgtggcgttttcacacgagggttcgggactcacagaaagccaagtgctcctactggcccttccacagtcacctgtgcacctctgtgtcctcacagcacactcttcccagcccctgccccgcccagggccaaggcgacaggcaaactgcggacatggaaaggggtgggggcgattccttacgttccatgctctggtgtccacctgagaagttccacgcagaccaacaatccactgccttcccagagacgccttgtgtgagaaaggcagagactggagggctcccgagcacccttgggtccgaagaaaaaacaagcctcaacatcctcttttaagtggactaaacaacagatggccactggtttccagtttctactagagggaaggaaataagaacgccaaactgttatttgtagcctccctagactctccactttctaggcaaagtccagaaaaaagaaaatggcccagcagccctagcccgaaaacaaagaccctgtcatcgattttctccacttccagaagcccctgtgtgtcctctggggcctgacatttctgcgtaaagctgccctcaccctcctactctgcctcaatctgtcccgcaccctccctcgaggcaaagtaaatgactttttcctccagggtcagtcaggtggatggtgcatttcttgaaagcaagggctgagtcttcctcagggtcagcatgatgtctggcactcaagtatatattttatagtgataaacattttctaaggaatgagccaagccaggcaccaggctaagggtagagggcacagaaaggaggacggatagctattaaaaatagttgaggccaggcgtggtggctcacgcctgtaatcccagcactttgggaggccgaggcgggcagatcacctgaggtcgggagtttgagaccagcccgaccaatgtggagaaacctaaaaatacaaaattagccaggcgtggtggtgcatgcgtgtaatcccagctactcaggaggctgaggcaggagaatggcttgaaccccggaggtagaggttgccgtgagccgagattgcgccattgcactccagcgtgggcaacaagagtgaaactccgtctcaaaaaaaaaaaaaagaaaaagaaaagttgacatttactgagcacttactatatcccatcgaaactttgcaacaatccttgcaagctagtttcctcaagggccccattttacagatcaggaaactgaggcacagagacgataaataatttgctacaaagaagcaagcaaggaagtggatgagctgggatgcaaccccaggttgtctggctggagagaaaaacacagagaaagatgccagaaatgaaaggtgggggctattttctcacagaacttaaaatgaattgaggagaggaggccaggggttcccaggtggccgcctgcccacagtgccacgggctggtaggcggttttcttcactagtccacaaataaacgagaaggaagactaggaaatatttaccaagtgaactgtgctggtagaggaaggacagtcttgggttgcttgttttgcttttgctttgaaatagatcactatgtttctttacgtggggcacagtgcaggacatacaaaagggagtgtggtgtaatagtcttcctcacacctctgtccctcaggtgcccagtgtctctccccaggagcgacaacctctacaagattctgtggatcaggacagctctttacctgagattatatctttcctactattgggggtgttaaaatgtccttttctgtgtgaaatgataaaggtgtttgatgatggctttgtttgtttctaatgtcctgactacagaaaagaaggaagggagggaaggagggagggaagaaggaagggagggagggagtggaggagagagggatggaggaagggaggaaagttgtcagctccacattcattctctaaatatattttagcaaagtcgctaaatggttgttgtgtttaggtggccgtggacttgggtccaagacttgagttctctgccccttcagaaatgggtgcctccggacaagtccctgccccttagtggcctctgcagcccttgagggagaaatgaaatggttccctcctgctcagacaagctgctctgtcaagcatggagggtgggaggcagcgaggcctagaagggtgggtctgttggagcagggggacccaggctttgggacaggacaaaggacagctgggggagcaaaggcacagagggagtattgtccagt

SEQ ID NO: 914039 - DNA, 4001 bp, Homo sapiens
ctgttgtatttgtatagcttataatttgtattattgagccaataacatcaaactgttacatgtgtttctatttccacctgtgtgatcacagagcctgtgttatgcacttaaaaaattttacactatcttcaaactctgggaaaacaatcatgggcaaaattagtatattgactatgatattcctgcttcctaatgattttccaaagccttctgcactaggatcaactggttaaacctttttcccattaatatgtccaaatatgattcaggaatctcagaggaaaccatgtttaatataataatttactgcccactccacctggggagcagaatgcagacattatttatgctgaaaagagcttgtgtttattttctagcaaccagtgactctcttaggcatctacaaggttactggaaatgaaacgtagttccaaatttctaaacagggtttgtaaacaaacttaccagagtatgtttaaaaaggtctaagccttgctaagaccaaacaaacacagcctattgactatttactatctgctgctcgtcagaggacttatacaaagatgaaaccaccgataacggtatttttttttttttctgtttagagtatgttagtgcagaacgtacaccaccgcagcggttgggggtgggggagccccaaaccagtgaaatctcaagctgagcgtctggctggagttcaacaaggctcagtgaacagcacaggatggggaagttcaaagtcagggcgactcttctggtcttaacttcctagattttcctagatctgggtgcctctgtgtatatattaaccttcatgcatttttgcccccagcaattgtgtacagtcagctccaaaggcacagcttgtgtgctaacgtgcaaagcgaagtcaaaaccctgtgcttggcgctcccttctaactttctggcttgtccaagtctaaatattgacatcgctcctcagttgagatgtttgatactgctggggatggaaacggtgcagctaacagtaggatctaatgatatatttctacatagttgccttccacttcttttcggggggcagagggctggattctcctgtctgcacatcaccccttggttgttttccccaaagctgagcacacacagacaaggtaaggtgctctgcaagcccctcatggcagctcctcctgttgtcacagcaactcacaacagactccatagacacggggttgcgggggaggggaggggagcgactgtgggctggccagtcaactctcaagagggtgcaagcgccaaaggggctagcgtattcccctgtccgggtcctccggtccccgcccggcctccccatactggccttcgaaggggaagcgccttctcgtcggcgcggcaccaccccctccctggcgcagccagcctgctaagggtgcctgttgtacattttctcagctccaagttaggggtgcggctgtgcgggcgctcctagaaatctcttgtgcttgcctctgatgggagggtccccggcctctcagagaggcgagggaggcccccctagcggctcggtcccacaactctctctcggggcgctgctggcctcgtggcacggcccagggcccccacttgccacccgctggggccggggcggtgggggctccgcagcggctgctcggagaagtttcatagcatagagcactcacgacacagaacctaccctgaagccgagcgagacgcgagctctctccgccttcaagggccggggggagcgggggggcccccgccactcagcagcagccacggctgcgcgcggtcgcgggtgtgcggggcccctgcgcgcggcgcgccgcccgccgcccaactttgcacaaaggcagcatggcactgcctcgccctgccgcctcgcccggcgccgtggccgctcttcccagtcccgggcgagaggggctcgcccctttccacccgcagccctccccttcgcctgcccccaccccgctcccaggcggggcagccaggcggaacggagcacccggcacctcgctccgccgccgtggcggccgccgctcgcactgtgacgttagcagccttcgcggctatttatatccacacgattggatttcattcatgaaaccggggcctggtgtgtctgtgctctgggacacgggtggcaaaggttcctcggctctacgcagacccgacgggcccgggcacggaggcggatcgcccgggacaaaccgacacagagcatgggagaccccggccctttccccgcgctgccgggaggggagagtctgggccatctgtgtccccgtacccctgccccaacatcccacccactcccgtgcctttgctggccctttgtcccaggctctggaaaagtaagttgggccactaaccggctgggcagcatggctttcttccccctaggagctgaccggccgcggactccgagggaggacattggcttttgtttcaaaaccgagcccagctgctgactaagggctgcattagcccagcctcctcctccctgggcggctgcacgtgctggctggctcctccactctgggttaccttcctccgcgacttggcgggaggggtccccccagggggcgtagggacgcaccgctgaccccgacccgggtacagaggtgatttataacctcctgcaaatggctgagtgaggaggtgaaattgactgtggcctccatgggctgtcttggtcttccaagacagcccatgcctcctcacagaaacttctctctcttccaggctgaccgtgagttctgaggacagaaccaggggtagttttcatgcattcacataaatgcttatagagtgacaagatgccaggtgcctggccaagctctacggaggtgacagtgaaagcaaacaaccgggtgcctgccatcagggagctttcagtcagcctgctaaaattagtatgccttatgaaacccatcactcctagcctgtaaagagatcactggggaataaagacacaactgtgttcagctaccgagaggaatgaatatattcatttaataaacctttattgagtaggctgtgtgcagagagctagggatacaaagatggaaacaatgtcattcttggcctcaccggttctcaggtaatgtgttcctaagatactgaaggactgggaaaagagagtccatcctattataagggatgcttctttggcttatccccccaaaaacaggatgcgtgaaaaaattctaaaagcaaacacacttcttggtccctcagtttcttccaggaaaccgtcttcagtttcctgatgaattaccctccagccaagattcccaggtgacttccagtccagtggatatttctactcttcctcacttgcttgtattctcttgaagtcaaaggcttgcctggtgctctctaaatcccccagagaccccagaaaatagtggaatccaatgtttttacgaggaaagttatcaccggcaacctcatttgtttaagccattcccacggcagtatttttgaaaatggagttaccaaggccctagtctttgatatcagaaagagagggtagtgaaaagtcaagtacaggtgtctactccaagaacacatccaagaggtgggtgatcatttacttggcataaaactgacttcccggcccaggcgggtggctcacgcctgtaatcctagcgctttgggaggccgaggcgcgcggatcacgaggtcaggagttcgaaaccagcctggccaacatggtaaaaccccgtctctattaaaaatacaaaaattggctgggcgcggtggcgcacgcctgtagtcccagctacttgggagactgaggcagaagaatcgcttgaacctgggaggcggaggttgcagtgagccgagatcgcgccactgcactccagcctgggcgacagagcaagactccttctcagaaaaaaaaaaaacaaaaaactgacttcccttagtattttgcaaaatgactccatcttgaaagccttaaacaaaatacattcttttcaggtacaaatt

SEQ ID NO: 914040 - DNA, 4001 bp, Homo sapiens
tatctatattatagataaatagagacagccatgtagctcaatagagagatgcataaacattgttccggaaatatacactggaagcttatcaatgattactttggggaaggactagctattgatcagcaaatagagcacctaatatttataatttcctgtatagtattaatatgtaactatgtgtgtaacttgtttttaaatgctaattttaaaatttaggcagagaaaatcttactcccacctgattctttcaagtaatgcttaataattgaagaaattccttgaggtgccacaaagttacagtctccttctttcatcaccattccttcaataggcgagcttagaggcctcaaaacgccataggctaacagttcatcataaaaactgaaataaatcaatatgtatatttaatgtaattatataccatgaatagctctaaaagactatattttctttcaataattctcagaggttataattcaaaatcaaaattagatatcttcctatgaatattttgtattaaataaaatgtataatttgtgttaaataaaacttataatacaggtgaagaagagaaatattttgagaatccataggtcgtttgctgactttagtcaaaggcctatttctctgtaagcatattttaaaagtaaagttaatgaaaacaaacaaatgtatttagtatatcaattttaaatttggttcagaagattgactcccatcacagctagttgccttcttccataacaccaacatagcaattgatatttatcgagcccttactatgttccatttatcagctaatctaatcttcacaacaaccctatgacatcacacaactgctaagattgattccactccttgcaactaactcaccgttggtgttttttggcataatgaggagtgcaggtgatgtactgagcacccaagtcagctgtgcactgaggattatgaggactgcaggctgtagtcattcttcccccttgaattaatccacaggaaaatgtcttactgcatgacaatgagccttagcaattaattcaatgcaccttaggttaccccaaacagattacttcaaaaatatcttaagaaacttttttaagttgaagtatttgatcagattgtgagattttagaaggagtcatgaacaatgtaacagtgtccagcaccattatagtgcatatatttagtaataggagtcagtgaatggataaaactaaaaatgatgaaagaaatgtcagaataaatgagtcaactaatgctctttcattcatacagtcaatcttcatgagaatgacaggattctgcaaactagatcttcagaaaatcttggtctatgatcactttgggagtctcataatctgcagaaagctgcaaagccaacagacagaccaagacaaaaaatctatttattagggacagcagtaggcccaagctttgcaaactcgggtcggggcccctcccacgccgctgtctcaggtctccctctgtagagcgcggggtactcctgccgggcccccaccctcgcccccaccctcgccccttcttgggccttttcccgggcggcggaagtccccgatcacgtgacgaggcgcgccactcggcgcatgggccgcgctacacggccgctcagggagctgagggtatagcgttttcgccttagactttcttgggtgcaggcccacaccacctcagcagcctgcccggcagtcctcttttcccaggttttggcgtttagacaacccacctgagtcctcagccttgtcccacacagcaaggtacaagggaccggacgtctgcctcctcagcagcgcagcgcacaagcttcctgtcatcccggcgcccacgatcagcacctgcgccatggcgagagggagcagcgatccgcgctgagtctctgcggcggggccgttcggcccgggctttctggaaaggcggccgaaccggcgctagcgctctttggttccgtgctccctgggccgacctgggccctgagctttcctccggccggcctgcagggggcggaaaggaggcggccggagctgagaggcccctccgtccttgaggagcaaacctggggctgcggagaaccggggctgtctgtcttctcgctttgggggccgggcgccctgcccctcgcccagaaaagcctggaaatggtgtgggctattgttgggagaacccgcctcgcaacagagctgacgttgaccacagcagagaagcagcttaacctatctactgcgataactctcatgcctgttgggatttttgctgttttactattctagatttgaaagtgggaagaagaatttaccagcgataccacgggcaacctttcctctaatgcttgaacggccactattagcataatagaaacatcttttggaatctgggagacatttttcttagacctgggactttgtgtaaccttcctgaacctcaatttctccatctgggaaatggaaacaataacgtatacctttcaaacttgtaaagattaaagacagttgattcatcagaaaattccaaattactcttcaataagttctatgtcagaacgcattccgtatgttctaaggaatataaagatgaacaacaagagaaggattggtgccattgccgttgtttttttccccctcctgacattgtactggaagttctcaatgaaacaacaaaggcaatggtaatactgaactattaaaaaacaaataattaagttacgctgacttgcagataaattattacctggaaaactaagaaaccgaataagtatcagaaccaataagaaaattgacaatggtagccaattataatggaaacatttaaaaatcagaatatttacttcatgtccacatcatgaaaaaaattaccatgtatcaaatgggtgacgaattaatactagatatatctaataaaagaactagaagaaaatgtagacgggcatatatgactaagaagacatttttaagcataaaaatgaaagatggaattgaacagaaaatacataatcatttacaacttgtgtgttacaaaatacacaaaacaaaatacaaatagtaaatttctgaaaggtgtatgaaagattaaagttaatattatttaaaaacattattcaaagtcttaaagacacaaatgacaaaagccaaaaggaaaatgtgtatatattggatagagttcttgaataaaaagaaatacgtaagtccaataagcatgtgtttaattttttatattcaaatacaaattaaaatgaggtactatttttcatttgttgagttttttgttttttctttcttgagacagggtcttgtgtcactcaggcaagagtgcagtggcacgatcagggctcactgcagccttgacctcttaggctcaagctattctcctgcctcagccacctgagtagctgggactacaggtgcccaccgccacgtgtggctcattttgtgggtgtgtatactttatgtagagataaggttttgccatgttccccgggttaggaattacttttgtaaatgtaaaaatgtctttttttcagggatacagcaaaatacacaatggtatattactgatggaagtgtactagacaaatttgtcataatacagtctgatactatgtcaaaagccttaaaaatatgccatttaaagcagacatttatcttggggaaatagtgtacaattatacattgaagtttatgatttttctgaaattaaaagttcagatttctctgaaattaaaagcttaatgtgattcacagccatagccctaaaatctcaaaatcgtcaatctggaaagtacatttgcagtaatctatttcaactgtcctctgccaccattttatacacgttaatacagacactaagttcaagtgagtttgcccaaggttacctatcatctcaacggtgaagcaagggcaggccttcatggtcttctgagtctgctctcctgctcttttccatcctttccagcttcctcatttctattaataatttgatcatcatgg

SEQ ID NO: 914041 - DNA, 4001 bp, Homo sapiens
agtagaattgccttagaattatcctgaggatttgttgacaacatatatgtaaaagtagccagcactgtacctggaagagacaaggccatgaaaagtgtatagcctttgaggagcccgtcaatcccttcagctcgtgctctggaaactgttagggaacacttttttttttttttaaatggggacaaaaatatctgctttattattaccacttacttatagaggtgatttacagatttaatgagaatatatcaaagtactttataactcacaaaaatataaacttatataatgctatctactttgtattgagcatattctaaattctgggactagtactagaaactttacatatatagtgttacctcttaattctcaacacaaccccacagttgttataattacatttaatgtataaatgacttcagagaaacacaaaaaagactgggtgatttgttaaaggtccagctagaaaagggcagtcagaattcaacccaatattacttccatacagaggtttttactttttcctttctactcagagctaacacaacagcattatttaacgtccttaagaatggtggggaggaatcactgaataacctgctttgacaaaaacaccctgataaaatctatgcttgtattttagaacccctgggtttcacgcattgtttttatagtttttacacattaagtgtaaggtgaaaagtgatagattttaagaaccaagaatatggtatgccatcccacccaaacttataaacaaatcacaaataacatgaaatagaaaaaagccataaagacttcctttgcttttggaaaacagctgagaaacaacaaaattcttttcagaagtacagacaaaatttgtttttgtagtgtagctaatatgccctccttaggcattaagacacttttctgtttgtaaccttaatgcagccgtatttttactctttataaaaatcaagtctctcaataaaaacagtatcttactcactaatcattaaattgcatcactaaaaatgtagttatacacaccaatttctgacctcttagaatattctgcacaatcagttttaatcactggaatgaataactgctcaaaaaagcagtacagcttcaatttcatgatgatttggtagtcaatattcctgttttccagtaaaagggagatttcatgaacagaaacattgggctccttatggtttcatcgatcaagagaacgtttctgagcagcttctgagcaaatatttcttaataggttgatcacagatctggggtcttcactcctcataatagcactgccagatacagtcatgttagctcctgcctctgcacacttatggacagtgtcagaacctactccaccatcgccctctatatccaaagatgggaactgggtcctcaaccagtgaacctttggcatcatatcttccatgaatttctgctctccaaaccccggttccactgtcataaccaaggccatatctatttgattagcccatggtgccaaatactcaactgaggttcctggtttgatggcaaggccaaccttcatcccattctcccgaatgtctttaatcaaagtccctgggttctcagtagcctcgagatgaaaggtgtactgattggcttctgctacagccattggctttacccactgttctggcttggacaccatcatgtgcatgtcaaagaaagggtcctggcctagctgctttcgaaggctttctaccacagggtgaccaaaggtgatgttgggaacaaaatgcccatccattacatccagatgcagataatcggccccagagtctagcatctggaggcacttggcccctaaattggccaggtcgctgttgaggatggacgggccaatcttgcagcccgacgccataccgctggctcccaagaacaagttaccccacgagtccccggcaagactagagcccactttttttttttttaaaaccaggaaattctaccaaagaaccacagtttggccaggcacagtggctcatgcctgtaatcccagcacttcaggaaaccaatgcagaaggatcacttgagcccaggtgtttgagaccagcctaggcaacataataggaacccgtttttacaaagtaaaaaatttgcctgtgtgatggcacatgcctgtggtcccaggtactcgggaggctgaggcaggagaattgcttgagccggggaggctgagacttcagtgagccatgattgcgccactgcactccagcctgggcgacagagtgaggccctgtctcaaacaagagacagaaaacaaacaaaaaagaaaccccgaaacatagtttggagagaactatataatagcagtcaagtacaggctgtgaattctgtaggtttaaaaaaatggtgagggatggccaggtgtggtggctcacgcctgtaatcccagcactttgggaggccaaggcaggtggatcagctgaggtcaggagttcgagatcagcctggccaacatggtgaaaccctgtctctactaagaatacaaaaattagctgggcgtggtggcacgtgcctgtaacctttgctactcgggagggtgagacaagagaatcacttgaagccgcgaggtggaggctgcagtgagcggagataatgccattgcactcagcctgggtgacagagcaagactccgtctcaaacaaacaaacaaaaatggtgcgggataccctgggaggcatggttcagggatcccttctggaagagttggatatgagaaggtctgaagatttagggtttggaagaggcaccagttggaaggtggaacagcataagcaaaagcagtaagagaaagttgagagcacagagaggagactgactcttccatcgtcaagggactggcctggggagtgtcttcagcggggaaggaaaaataccctccctggccgggtactttgggttttcctcacattctcggccagctcctgatcttacccaaccaaccccaggagcaccccaagcagcaaagactctgcacgtttcatgactaccaccaggaggcagtatggcccaacaacttggagcatcagggttcattcagttcctagtttgttccaagagctgatctaggagcatgaaagtgtccaccaatctaatatttgtggagcactttgcatggagttttcaaagtactttaaccccggtgatctgatagaatactaactacaaccctgtgtggtctctatgtgttggtattatctacctagaggaaccgatgttgaggatttaagtgaattattcaagttcatttagactgtgcgggaatctgaatttgaaccaagggccaaaatctctacctcgtgccctctactacaacttactgccttttgttaaggagacaggagcatacaaatatttagcataataataaaagcttatattaataactattaagaaccaatggcagtttcagtttgataagatgaaaaaattctggagatggatggtggtgatggttgcacaacaatatgaatacatttaatatcgctgaactgtatatttaaaagtggtcaaaatggcaattttttttttttgagagaagtctcactcttgtcccccagttttgagtgcaatggctttatgttggtttactgcaacctctgcctcccggattcaaacgattctcctgcctctgcctcccaagtagctgggattaaggcacctgccagcatgcctggctaagttttgtattttttagtagagagggggtttcaccatgttggccaggctggtctccaacttctgagctcagatgatccacccgcctcggcctcccaaagtgctgggattacaggcgtgagccactgcgcccggtcggtttttaggcagggtctcactctgtcccccaggctggagtgcagtggtggaatcttggcttactgcagcctcaaaatcctgggctcaagcgatcctcccacctcagccccccaaagtagctgggatcacaggcatgccaccacacccagcta

SEQ ID NO: 914042 - DNA, 4001 bp, Homo sapiens
tatatgccaacagtgaacaatctgaaacagaaatcaagaaagcaaccccattcacaatagctacaaataaaataaaatacctaggaattaacttaagcaaagaagtaaaagatctctacaatgaaaactataaaacattgcaagaaattgaagatactaaaaaatggaaaaagattccatgttcatggattggaagaatcaatattgttaaaatgtccatactacccaaaacaatctacagatttaatgtaattcctgtcaaaacatcaataacattcttcttcatggaaatagggaaaagaattctaaaatttatgtggaaccacaaaagacccagaatagccaaagttatccaaatgcaaaaagtacaaaactggaggaattacattacctgactttaaattacaccacagagctatagtaaccaaaatggcatggtatgggcaataaaacaaacacatagaccaatggaatagaatagagaacccagtaataaatccatacatctacagtgaactcatttttgacaaaggtgccaagaacctacactgggaaaaagacagtctcttcaataaatgatgctgggaaaactgaatatccatctacaaaagaatgaactagaactctatctctttccgtagacaaaaatcaaatcaaaataaagactaaagactaagacctccaactatgaagctaccaagagaaaatattggggaaactctccaggacattggaatgggcaaagatttcttgagtaataacccacaagcctaggcaaccaaagcaaaaatggacaaatgggatctcatcaagttaaaaagcttctgcacagcaaaggaagcagtcaacgaagtgaaaaggcaacctaaagaatgagagaaaatattttcaaactacccatctgacaagggattaataaccagaatacataaggagctcaaactctatatgaaaaatctaataatccaattaaaatatgggcaaaagatctgtataagcacttctcaaaagaagacatacaaatgacaaacaggtatatgaaaacgtgctcaatatcatagatcatcagagaaatgcaaatcaaaactacaacgaggtatcatcttaccccagttaaaatggctttttgttttccccaaaattcaggcaagaagaaatgctggagaggattgcaagcatctgtggagtcattctatttttaaattcaccttccaattgttttcttaaaaccattgacaaatatataaactggttaatctttctaaatattgtctcattacaaaagctttcattattttccagattaagtagaaatcattgaataaaaataactccaaattattaaacaaacaaacaaacaaaaatgatccaatgatctggaacattttcttcccaagcgaaaagagttgaaagttcattctttttttttttttttttttgtagcccagaggtcctttatttttttttttaacacctattatgccatgaattcatagggaataggttccagcagctcaggctccttcccattggttctcacaaagtgtgcttctctgggtggagcaggctggcgctttagttgaacccaggtacctttctctttggcttctttctttttctgatcattttccttcacacgtttcaggaagctatctcggctcttagagtgcttaatgtgctcaatacgcacattaattctcttggcaagaatcttgcccttaacttgtttgtttacaacaatgccaacagcatgctgggtaacattgtagactcttccagttttgccatggtaacacttgtggggcattcctttttgaacagtacccattcccttgatgtctacaatatcacctttcttatagattcgcatatatgtggccaaaggaacaactccatgttttctaaaaggcctagagaacatatatcgggtgcctctcctctttccctttgtgttcgtcattttggcgaattactggaagatggcggttccggccgaaagggaaagttcattcttgagctgaggcagacaaaccatttggctttcttcaaggcaaatcacaggtaaacatggatttagattatgtctgttctagcaaactttttattcacatgaaaagggcctacataaatatcagttcaaagcagagaaatatgctttggataaaccagggaagtttgtttctgcaacaatatcagtaggttgagtattagatagaccaaagaaggtgtcattcgtcacctggaaagttgagagagaaaaatccattgaaaactgaagatggaagagactgatactgctgttttgaatttatgagagtccagaggtgagagttataaccaggcattccctactgtagacatttgccaatttatgccctcatgttgcaatgaatcttcagaaggactaagcatggatgctattattaaagctaattaaatcgctctgaattacagctcatccagggtattagctaacagaatggtcatcatactgtctggaagaaataaataaaaggggattggttgagtaaggaattccactgatggggttttttgttatttttcattcaaaaataagctctctggaaatactagaaattaagacccactgtgcttcatctcttagaagtgttgtgtaatagtggtccgacccatgttcattgttgagaagcaggaactgattttcttgtctagttttttaaaaaatcacatttgccaaagtaattaaatgaaaggctaattgacaacaaacttcctattgccctatagtcacaacttacatatgaaatagcatattttgtttctctttttgcatttcaatatggcaaaaccattgatgtctgagggacaggcagagagcagattagtttccaggctctaaacaataaccagaaaatggcttgtaatgaaaatccaagttgaatatcaccattgtgacaagaaaagggagatgtaatgaacccaacagcatcatctataggaaaagtaatttaaaatgttcacataaagtacagctagtttggagtgcaaatgagcaggaaaagggtttttggaatccatttggatgcatgtggagtgcatttgaaagtgatgttgtatcatactagatatatatgtgtgtttgtatatgtgtgtgcacgaatggatgcctgagtcatatatatatgtgtatatatatgcatagatgtatatatgtatatctacatatgtaaagttacaagtatatttgacaaaatgaatgcagtggaggaatgtgattaatcaaattattttttataatccctgtagtttgaaaaataattcacttggctggattatggcatggaggaaatccttaaaaagaatcccagggacctgctacgtctctgtgagggtcagtttatgtgtcaacttgcctaggacatagtacccaattatttaaccaaaacagtagtttaggtgttgtcatgaaggtattttgtagatgtagttagcatctataagcaattggcttcaaataaggggatttccttaagagcaaaaactgagatttcccagagggaaaattctgtctcaatactgcagcatcagttcctgcctgagcttctatcctactgaccacgtcaatttcagacttgtgaggccccgcaatcaaatgagccaattccttaaaataaataaatctctttaattattatatgcatttgtatgtgtatacatgtgtatgtctatttatatctatcctactggctctatttctctggagagccttgactgatagtctcagataaccttcatatactagacagttccagccttccctgtacattgcctgatttgagtctcaactttcaatgacctcacttgatttatatttaaattatttcatattcatttaaacacagatattaaaacgtggttggaattctgatgaaagttttcactgagggaaagtagctgagataatggaatgatattccgtaccatacttattcttcagagatctgaagctgggatttctt

SEQ ID NO: 914043 - DNA, 4001 bp, Homo sapiens
ggcaattaagcaagtcattgtatataaatacatgttttttataagtaaggattctatggaagtacatagcacagtgaaacctggtgtaggggtcacaaaaggctccctgaagaaagttacccttaaaaacaaaaaaaaaatcacaagtatgcctgtaccttgggcttcaccttgcacccagttagtcaaatcaaccagccacacctcctccctattcttctttaccacactcccaaatctgctctaaacttccttgttatacccatttaggatatccttttggctactaaacaatgtccctaccgttctacagaaatgtcaactaggatctgtttctccacaaaactttttcctagactactcctcatctggcagcttaggagtacttacttccccaatcaggctttagggtattttaatttacacagtatatttctgaagcttattattggtttcttgtatcacatcagaaactgagaaccagggctctgtctttcctattctttgcaaatgtccactatttagttccagactcatcaaatagcagagcagtcctttgtctttgacttgtaagttgaggcaactttatatgccatgaattccatttaatttacaaacaaataaccactaacaatgtacatatattaccacacctcttccaagtgtattttaaactgggggaaattctctaaagaaatcattattaacttttcttttttgtattaatttttttaatgtgttcagtttattccacaagcattaactgagtaactgccatgtactggtgcctgcagagtgaacgtgttaagcacagtaaataaaaggataagacatggcaattctcttaggaagctcatgatttattcaaaaatgggatggcgtcaggaaaagcctcattgaggaggtaataattgcgacaaactacacctaggaaaacttattttacaggatcaaagaacattagcgccaaatggcccagatcatcatgtctactttcgtcttcgtgctgatgagcaaagtaccacagagataacgttcatttagtggcagcagtggaaagggacagtcatttcgccacggatacttcataaagagaacaataaaaaagtggtgtgattcactttgccaagaagtggttgtcatttctagcaccacctctgaacagtatcagtaatcagaactcacaatgagctgaaaactgtctctgaggagcagatgttactacacgaacctcttgattctttttaatctctctattccaacactttacagtctacggaatacagaacccatgactaactccaatagttaaaacaggttctcgtctctcaaggctttcgcttcccttcgatttgggccatgctatcctcctcctccacctccactccgctgtgtatgtcctctgcccccacctaccctctctctgtctagatagtattgttccaacactcccacgtcctcctccttctccgagcctccacggcgcttcctgtccgtgccccaaattccagtatttgtttagacactgtcgtgagaatcaggaagggctgatagtaacttagaagcttagaagattgtacccttggagtccagctccggcttctgtcacctatcagctgtaggcccctatgcaaatccctcgccctcgttaggcctcagttccctcattgcaggaaagtagctgaaccagataacaacccccagaaccttcgagtttcccgcgctaggaatcagaccaacacctcggcgggcatcagcctccagggacatcccagagactctgggagacctgaccgagacccatcaggaaatagttactccggagtgtggcccgatggtctgggtggcatgaggttggccaggcgcgaagccggggcaactcacggtgagcggctgtctccacaagtccgcgcagagccttcaggtcagaacccgctcgcaggtccaaatctgcaaacaccgccatgctgaagtcccatgaccgtccgcgcgcgccagtctgcgcagccgctgagcccgcccctcaggcatgctgggagctgtagttaacctgcgcagtccgtctctacctccagttgactagggattcggagaaacttacttgctttgctttcatctaccaccagaatttgtgtgttgaaatcaacagcttcatttcaatctctctttgtcttcttctgaacgacaatgtttggttccccctggaggggttccaattcccaactattcaatactcctataaaatagtgtagaaatgaattcattcaaaatgcacgcacacggtatctacttagtgctgctcatgaatcagagaattctgctaatgggtgaaaacgctatttaaagagtcttaaagaacacgttttcctttcctttccctaaagtccattccgttgtttacaatggacttaccgggaagaaggcgtttgtgtgtgacggactctaggacttcaaaagagaactaccccaagacgagggtctttttacccaatcagaactgttgatgtcaaagcccgctattctctgtggcagtcaacatcttcaaccacaagatggcgggactcgctctaggacgagcggttagagccaacattgatttagccaaagacatgtttgaaaagggaggtgcaaaattgagatgttttacacttttccagctgagaaatgtacaaggtgacgcatatcccacatatctgatgtttccacttttttccgacttagtgtaaatgatctattgaggataataatcaattatactacaaaagtgtgactatagtttacatcagtgctctcaaactacctgtgatgaaggatcagtttctccctccttttcctctacccccaaactcttcgcgaaccaggatgtggtcctttatgcattaccagtaagcagcctggcctcatgggaatcacaaatttgacaacactcgaactgccctatacctggctgaatagaatctgctgatcaggagcttggattatcaggacaatgccaaagtactgtaaactttctaaacatcttcactttttgtttgtttgtttgttttattaacgtgcgcacagcaacaacaatcacagaattagaggctcggtcatttgacctagggagtatcctagttggtggcctgctgagttttcgtttcgttttgttttgtttttagagagagtatctcgttattgaccaggatggactctaacgcaagcaatcctctctcctagctgtgattacaggagcccacccacatgcttcacccatcaatttctcttatttactgatcacaaacagttcacagatagtctctcgtctatggaccacaccttaactagtactcctttatgcgattttcttgtcggtctcagaagggaggaaggatctgttccatgcagtagcatgcaattctcttcttggttaacttttgtaaagaagagatattttgccttttccagtacttgatatttcctaagtgggagtagaagagaatattacttctgcaaatagaataaggtcatatgaagcaaacgctttgtttttcatgagaatatctagtgttaattttgcagggtcacacaggcatcatcacctatgaccataacaatctagattggtcagaaatatgaccaatgtgtggtgaaggtgaataaggtgatagttcaattattttttcatttttagttgacacattgtaattatacatatttatagggtacaatttcatgttctgatacatgtatatgttgtataatgaacaaatcaaggtaattagcatattcatcacctcatgcatttttggtgataacattaaaaaaaactcttctagctgtttcgtgatatataaacaataccttactgttaaccatagtcaccttgtgtgcaatacaacatcagaacttattcctcctatctaactttgtacctgttgaccaacctctccccatcctcctccctcaatccctccctcaataccaatcagttggctataggtgcatgcatttatttttgg

SEQ ID NO: 914044 - DNA, 4001 bp, Homo sapiens
ctgcctggaataccactcccaccctcagccgcaggccccttcctttcttcaacaaatatttatcgattatccacgatgtgccaggccataaagattaagtattttttctcacagacctcatgagcttagagtccacgaggaaaaaatattagcaagtaattatacaataaagcctgatgcacatgaaggtcagggaacagtatgcttagggaacatccagcagaggcctagcttagttgaggggggtgggaaaaggcagtcctcacagaggaacttttttttttttttttttttttgagacggagtctcattctgtcgccaggctgaagtgcagtggcacaatctcggctcactgcatcctccgcctccagggttcaagcgattctcctgcctcagactcccgagtagctgggactacaggcacgggccatcacgcccggctaattcttgtatttttagtagagacggggtttcaccatgttggccaggatggtctcgatctcctgactttgtgatccgcccgcctcggcctcccaaagtgctgggactacaggcgtgagccaccgcgccgggccggacctcttaacctacatctaaacaatgcctaccaaaggaagtatggagtaaagaaaggtatctcagtattaaaagaaataagttggctggcgaggtggctcacgcctgtaatcccagcactttgggaagcccaggcgggcggatcacttgaggtcagtagatcgagactagcctgaccaacgtggtgacccgtctctactaaaaatacgaaaattagccgggcgtggtggcaggcgcctgtagtcccagctactcgggaggctgaggcaggagaatcgcttgaacccggcaggcggaggttgcagtgagccggaatcgcgccactgcactccagcctgggcgactgctatgtctcaaaaaaaaaaaaaaaaaaaaaaacacgttcaaataagttcaatgtggctggggcagagatgctagagaaagcggtgagaaactaggaaaggtgggtaaggaccagataatgaagacctttgcaagcgttccagtgtgaagcaactttaacatctaaagcagaggtgtcgtgattagaaagacgttatagatctttgtggatctgggcaaaggaagagtccccgagcagcaaagacgctcctggagtcgtccaggttagaaatgacggtggcctgcactagagacgccgcagaaaggactggagaaaaatacatgttagtcggaaaagaaggtagaatctcccgacacagtagtgaccagctggaagtaaagttgagaacggtattggtggtgactcccggtttctggatcccgccggtagccgaggggcgacggccgacccaaagctcacctccccactgcacgccgcccctggatcgagtaccttggtgctttactatttagcacacggaagtgttgttctgttgtccgtgtctccttggagaccgtggagaacagaagggccggcgggggttttcgctttgtactcctggtgcccagccggcgctgcaatccagcagaggagccggactagaaacgcggaagctctgggtgcacgcgcccggcccgggactgggcggcccaaccgggagggcggcgggtcctgcggccacgcaacaggcgttggggaagcagcagagaccctgcgtgcgcgcgggcttcggcctccagattccgcagagtcccgggcccgatccccccggggctggcctcctgccctacgtgggccccgcgcgcccacctggaactcacgatggcgaatccgtggtcacctgaaggcaacagcaccggcgcccagtgcgcctgcgccgcgcgtgcgcagagccctcgcctcccggcctcgcctcgcagacgcgacgggccggggaggaagcgctcggagcagtgcaggtttcgttatcctgtgttaggtcactccggagaggggaaagcggcccacagcgtcgcgcgacccggaaacgacacaacgaggcccaatcttttagactcgagtttaggccccggggtggagtctccggaccgggtccccccacccccgctacaggggcagtgcgcaggcgcgaggtatgtatcgcgagaccatgcggttgcccgggtaaccagacgctcaggacttggaccgtccagttgttcggaggccagcctatagccaatggtatcccgagggctcgctctctccgggcgtttgtgctcccctctctcttctaacccagtttctacctttcagtgctttggaatcttagccctctgtctctattcgcttttctgtatttgccttgcctcagggacgcacaaccccagcccctgtcccagtgagcccgtcgccatggaatccctgcagactccccagcaccgcgaaaatcaagataaaagggagaaggagtatggggtaaaacacatgcctatgggcaataatgcagggaatcttgagcccgaaaagagaaaggcagtaagagttgccttgagttcagcaacagctgcacagaatatcccgtccagtgtccactgtggctgctccaagcaatggagactcaggctaccatcggagtcgctgcaaagtcggggacaagtgatgaagcggccgaataacattttaaagctcaggaatctggatctgttgatctacccttggccagaacttagaagacggcaggttgcttctgacctaatgagcctcctccttctccccgctttttccggccttacttgggcccccttccttttcctctttacgtatctgcctccttttctcaatctcctcactgttggttttgtatcctattttctggtatagtttctgtgatttctttcttttatttattattattattgttgttgagacagagttttgcccttgttgcccaggctggagtgcaatggcgcgaacctggctcactccagccagcgcctcacaggttcaggtgattctcctgcctcagcctccggagtagctggggttacaggcacgggccaccagcccagctaatttttgtatttttagtacagacggtgtttcaccatgttagtcaggctggtctcgaactcctgacctcaggtgatccgcccacctcggccttccaaagtgctgggattacaggcatgagctactgtgcccagcctctatgatttcaattttcatgtttaagtacctatgtagaacctaactgtccataagtaaacacaacaaaaaaaagatttggcttttggtcaaagatcattggaggttacacagggtaaagtgcagtatgatttttatcacaattagaaagattaaaaagagatgacagtgagtttgtgagaacaggtttgtgtttcataaaatgaattgtgtgagttagctatgatgaactgcaagcagcttgcatttccaaagacaaatagagacacaggaatctaattaaaatgctaaagtaatgggaaggagacatccatacgtttttgtccccctaaggttccagatttatagtttgagcatcatctcggcttacattttctctgtggaaaacatcagccattacattacttggctctgggttgaaatcctaacttcatcaactgaagatcttatgacctaggcaagtttattaacctcctctatgacgtgataaaaatagtatctcttgtgcggattagaagacatgttcctctatgctaagatgattattatgtgcggaacacatagttaagtgcttgataaattgaactatggcaaatccagtctcaaccgtggcaaaactaagttaataaaaatgaaacataacctttattattttagtgcttgtgttttattttaaaactagcagtataatttccacgaggattttgctaaaattaacaagtacatttcgaaagtaatttctgtccctcttgtatcacacaaacattacaaccaaaaagtaaaaaacattctcccatgacccaatcacacccatttttttctttagtgttcccttctactttgtttcacatat

SEQ ID NO: 914045 - DNA, 4001 bp, Homo sapiens
aggtcttcaggagctgatcaacaaatgaaaagacacctactcttgcaagtctatgtttgggttcatttttctttgcataatccagggaatcataaatcatgccaaagccagttgtcttgccaccaccaaaatgagttctgaatccaaatacaaagatgacatccggtgtggtcttgtacattttggctagtttttcccgaatttctgtcttaggcactgtcgccttcccggggtgaaggacatcaatgacctaaaaggagatatcaagtttagcattcagtatgataaaatacatctttagagtaaaggacaattaagcaaagattgatgtgcccttccttaccatttgtttcctctgaagtagtcggttggtcatgaactttctagtgcggatagttacggtgtcgttctgaaaacataaacactctggttaataaaactactccaacttttcttggccttgctgtgattttccaagacctagaatgttgcagtccaatttgtagccattagtcatgtagcgaactaaagtaaataaaacccactgggcaaggccaaactcacaggatacacctaaggaatacataaaataccaggaaaacacaatggttttacacatgaatctgtacaacttacttcactaggttatgtgtatctctggggcagggtttctcaacctcagcactactgatatttccatatggataattccatatggatatgttgtggggactgtatgttttagaataactataaaaatcccagccctctaaccactagatgccggaagcacttcccacctttcccagttgtgacaatcaaaaatgtctccagacttagccaactgttcccttaggagaaaaatcactccgggttgagaatcacttctctggggtaaaaactgctgtggctcatataaaggtcactcaatgaactgtgtttatcatgtcttgcacaaatgtgccccaaaccttgtactcactacctacatgtaatctatccttctagaatggccatagcagagatcagagaaaacgatattcccttctgaaggactgaactgcacctttacttaatacctaacaaaaaatgtgggcattaagcaatttatgctaacaattttaccaaaaaggaggcgcaagagactttcatggcagcaaataacttcctagactttctccattttactttgagaaaccacaccaaattaaatccacgtcagtggtactcaattcttgaaagtaacggatcaaaggtaaggagaaaaaaaaaagattgctggtaaagttaaaaacggatgctggaggagctaataacgcatgacttagggcaggactacctttttataacatctctttccagggcctgtttccccactatgaaacatgaagatccatccagctgacaagttttctagcttacacgtgggaatggtttcacttgccgcaactcgcccaggcgctgcccgcaccttcttcacctcttgtactgccatcacctgcaagccgcctacctagcccaatgaggaactgcagacgagatgtgcctcccagtgtccatctatcccgcccgccccctacccccatccaccgtgctccacgaagtcaacaagcgcaacagctcctgcactgcccaggcgctggagcccgaagcccagcgtgtccgggtctacagcgcagcccgccagcccggacgccctgccaacagccccgagcccctcgacaaccatcctctgacagaaacggccagagaagagcaaccgggcttcgcgtgcctatagctcaagtactgggacccagggaccacggatggctcggatacgcggcagatgactgcacgggcccagggagactcaccatgatggcgatctatcttcagacagccaaggaggaaaagagaaccacgattcgccggccaatcatatcaacgcgcacggaaggaccccgggaagagccggcgtgggggcgtgggcgcgccacgaggctgaccgcgccgatgcctgatttaggctgcctacggccccgcctcacagacttttggccacacccctggaactctagactgaccaatccagaaccagaacaactcgagccgactaggtttacgcaagcaggtgttcaatttcagttcaattcattatgttgaattgtacgtatttgaattccggtaaaccaaattagtttaaattgccttcttccgagttagaggtgggtaaacttggaaagcattttaggatatcctctctaacagtctcctcgttatatggctagggaaactgcagaaaccctgactctaaaacctttgttatttcaagtacttaacattgcccattctaatttattattcatgagtattatttctgtgacttttatgacgaatctttactttaaaagatctctttaatttgtatttttctgcaaatcttggtcattatgcaaaattagattttgaaaaatatttggccgggcgcgatggccacgcctgtaatcccagcactttgggagggcaaggcgggcggatcacctgaggtcaggagttcgataccagcctggccaacatggcgaaaccacgtatctacgaaaataaataaataaataaatacaaaatacaaaattagcggggcgtggtggctcatgcctgtaatcccagctactcgggaggctgaggcaggagaatcgccagaacccgggaagcaaaggttgcagtgggccgagatcacaccattgcactccagcctgggcaacaggagcgaaaatccgtctcagaaaaaaaaaaaaaagaaaagaaaaaaaaggaaaaaaaaattggaagccaggggcagtggctcacgcctataatcccaacactttgggaggccgaagcaggtagatgacctgaggtcagaagttcgataccagcctgggcaaaatggcgaaaccccgtctctactacaaaaaaaaaaaaattggccgggcgtggtggtgcatgcctctaatcccagctatctgggaggctgagacaggagaatcgcttgaacccgggaggcggaggttgcagtgggccgagatcgcaccattgcactccgcctgggcaataagagcgaaactccgtctcagaaaaaaaaaaaaaaaaaggaaaaaaaaattgattgctccagaaatattttctttaacgtgaaacagacatgtaaagaatgtaaatatatatgttccggagaaataataagaagaatttcccaaatgttagtgcagacgaggtgtccaaggtgcaggctttgcgggcagctttcctattttctttttttttttttcctgagacagagtctagctcttgtcacccaggttggagagcaatggcttcatcgcggctcactgcaacctcgacctcccggattcaagcgattctcctggctcagcttccagagtaactaaaattacaggcctgcgccacaatgcccagctaatttttgtatttttaggagagacggggtttcaccatgttggccaggctggtctccaactcctgaccgcaagtgatccgcccccgcctcggcctctcaaagtgctgggattataggcgtgagccaccgtccccggccgactatttttcttttttttcgttttttgtttttttttttttttttgagaccgcatctcgctctgtcacccaggctggagtgcagtggcgggatctcgggtcactgcaacatccgcctcccaagttcaagcgattcttctgcctcagcctcccgaggtgaccaactatccttattcttaagaaaatagtcagccggctgggcacggtggctcatgcctgtaatcccagcactctggaaggccgaggcaggcagatcacgaggtcaggagttcaagaccagcctagccaatatggtgaaaccccgtctctactaaaaatacaaaaattagccaggcatggtggtgcgcacctgtagtcccagctactcgggaggctgaggcagaagaatatttattgagtgattgtaatgtgcctgttacattcta

SEQ ID NO: 914046 - DNA, 4001 bp, Homo sapiens
gattactattggacagagctggtccaggaagacagacaatgacccattaacaggagctctgtgaatgattcaagttgggggatctaccatcacattatattattcttatatcattttgatatcatttagaattttgacattttttatttcaataacaaaaaatatatataactttatagtatagataaaataataaaagtaaggccaggcacggtggctcatgcctgtaatcccagcattttaggaggccaaggtgggcggattacctgagttcaggagtttgagaccagcctggctaacatggtgaaaccccgtctctactaaaaatacacacacacaaaaaattagctacttgaataatgcactatttaaatatactaaaaaaaaaaaaaaaaaaattagccgggcgtggtggcacatgcctgtaatggcagctacttgggaggctgaggcaggaggattgcttgggcctgggagatggaggttgcagtgagtgaagattgcgctactgcactccagcctggccaacagaacgagactctgtctcaaaataaatacatgaattaagttaaattaaagtaaataaatttagttcttgctagataaaacgtttcctaatcactgttactcagcatttatttactcaacatatgtttattgaaaatactctgtgtaaaagtgctgtgttaggtatagctgaggagagaaatgtttggaaaatatttctaccctcaagtacttaagcagaggagatgttcttataaaaagcagaaagtagaacctgccctaggaggagacataaaggggaggagcgatgacgcatcatccagaaataccagctgttgtcatcggagacctgtcggccagagctgaagaaaaggcatgagttggcctctcctcactatcctatggccctcccgaccctcgcccctacctccttgtgggcagccgagttggactcccagaagcgctgtactttgctgaaggtgacgtttgtgcagtcggaaaggccactcaggaaggtacccgaggacttctcggtgagaaccagctccgcctcttcttccatgggcgtctccggggcttcgcttttgcccaagcgcaaggaccctgactgcagctcattatgtaacttcacagcatcgactgtcaggtcactccttcctgagagccagaggcacaagataaggtccaagcctccttttggtcaagagaacagaacaacccctgggaaacaaaccagcccaggccaaatctccaacccgagaggctgaattctgaacacagccagtctcataaaaccactgtatgcctaaaaacttgaaaaaccaaggagaaagggaatcctccatgtaaaagtttctgcttccctgtagcagcggcataaacgccactgggaatcggctgggagctacattcagagggcctgcaaaataaatgaaggtgaacgcgctctgtaaagagctacccaaggtccaagccatctgtctcaactctgacacccgcggtaccttacacaagacatttccctactgcggacctcagtttctgtatctgctaaattggaaggactgcccttcagagagggctccagatccgacatcctaagagacgaaaggtccaatgcctggccccgcactctcccagaggccccagactcatctggacccaggtctgcctggaaccccgcccccggctgcgctcgggtctcaacccagctacctgacggccggctgaagaagcggctgcgggcggcctgacggtggcggcagatggcggggttgctgtcgctgctgtggcctttcttccagcgcttcaacttagctgagacaccagaaggcaactttcccgagcgacccatgttgactaagccgtggcgaggaatgagcttaaatgaccggcttccagggacgtagaaacacgctcagaacccacgtggataccctgtagccttcacttcctcttcttctggcgtcacttccggattcgtgtgcattactatggtaaaacagtcaacatccggttttacacctcctcctggcttcggatggggaggagctccaaggagatccgttgctagggaggaagttaggttgctaagggttctatggggttcttactccagccaggaccaggtttcagggccacaggcgtaagccttataaaactggagtttggctgagcgtggtggctcatgcctgtaatcccaatactttgggaggctgaggcgggtggatcatttgaggtcaggagtttgagaccagcctgatcaccagggtgaaaccccgtctctactaaaataaaaaaattagctgggcttggtggcgcgcgcctgtaatcccaactactcgggaggatgaggcacaagaatcacttgaactcgggaggcggagtttgcagtaagccgagatcacgcctcggcactccagcctggacaacagagtaagactgtctcaaaaaaacaaaacaaagcaaacaaaaaactggagttcttttgcagttaaacaacaacaaaaagtacatttatattacatttgaaaatctattttcaaaattaagcatagaaacacatttatatgaaagtcatataccttcatataaaagtatatatgtaatcccagcactctgggaggccgaggcgggcagatcacctgaggtcacgatgttcgagaccagcctgaccaacatggagaaaccctgtctctactaaaaatacaaaataagccgggcgtggtcgcgcatgcctgtaatcccaactactggggaggctgaggcagaagaatcgcttgaacctgggaggcagaggttgcggtgagctgagatcacgccattgcactccagcctgggcaacaagagtgaaactccatctcaaaaaaagaaaaaaagaaaaaaaagaaaagtcaaaacttatggagacttgaaagtgtgaaaattagcttgacttgaaaagagaaaaaagcagtcagtggtgttctagacaagctttgctattttcatttattactggagatactcagttgctaagccaccttgccttatgacagcattccatccctaattaatccctggttctccaatttctctctctctctctcttttttttttttttttttgagacagagtcttgctctggtgcccaggctggagtgcagtggcacgatctcggctcactgcaacctccacatttcaggttcaagcagttctcctgcctcagcctcccaagtagctgaaattacaagcatgcaccaccgcgcccggctaatttttttttttgtattttcagtacacgcagagtttcaccatgttggccaggttggtctcgaactcctttcctcaggtgatctgcccacctcccaaagtgctgggattacaggcatgagccaccgcacctggcatccggccaattcccagttctcctaattccacctcagaaccagcaaccgatccagtttatccccactcccctgagaccctccttaaaatccttcaaccagatcccaaaccttacaaaagacacatttctcttccctcttgcccagcagctttattctaaacctttagcagcattctttggaagaagatatatagaactaacaaagtacatctataatatataaagaattcctaccaatcaataagaacaaggcagacaatccaataaaaagaatgggcaaaagggacaggtgggtgcagtggctgatgcttggcctggaattccaacaccgtaggaggccggggggcagggagtagaggggaggaaggattgctccagcccaggagttcaagaccagcttgagcaacatcatgagacccagtctctacaaaacatacaaaaattagctgagcatggtggtgtgaacctgtagtccagctactcaggaggctgaggtgggagcccagagaaagtcaaggctgcagtgagccgtgattgcaccactgcaccccagcttgggtgacagtgtgagaccctgtctcaaaaaagaaaaaaaattaaaaaaaaa

SEQ ID NO: 914047 - DNA, 4001 bp, Homo sapiens
ctttcagggtctcctgaacatctcccttcttctctcttgtcacatcctggagttgatatcccaaactcacaggcctaatccatcattctttcattttcttcattcctcaactatttttgagcatctactgtgctccaggcactattattaaaaaaatgcaagcatgaatattgcacagcttttgtcttcccaatgtcccagcagagaagagagacttctagattaaaaaagaaaaaaatcagtacaatcctatgtgagaggagtcacaaagcaatacacacgaccaccttcacagaggagggaagggatatgttagcctggtgcagacggataaggttttacacaggtggtgatgtctaagctgactcttagaagtaaaaggatttcaggtgcaaacgactgagaaagagggaaaacagaatttgtaaaggcaccaagatctgaacgagtaggctctggtccaggaagggcaacaggttcagaatggctggaatgccagctgcatggaagggtaaggttgtgttcagattcagaaaggccttgtacatcacgccaagaaacctggagcattaccgtcgataatggacaacctggagaagtgcggagagggtttaaaccaaagccacgtcagcctgaagaactgctttagctcacttatcacaggtttttcaaatattagaattagtagccaacatctaaaaattagcaaatttcacataaaaatatagaatcttggttcctttaagaaaataatctggcacattgggccaacattcctatggtgacatgtgtctgagtagcaggtgcagcagctggccccttcaagtgggacacctatcacctagttcataaccgcccctgaccgccctcacttggaggcatgtgaatctgcaatccctggttttaagggagagggtaacaccatagacaggggttacaggaaaatgacactgaaagtgacccagtgattaaactgggcagtgaaactgaaggcaagagggcaagttaggaggatttcaccacagcatgaggaggtgacaaaagcctgaaccaagttcggagaataaatactcagaagaatgtaaagattcaagaaatgcttaaaacgctccaggcacaagaatgcttattaaccatggaacttttctgtgtcatttgttcatggacaaagactgtattaggagacaggaagaaggactcaaaattaattttcaatttataattaaagtgactattaagcaaactgtggaaaatccacctcaatgccatacagcagagacaaccgatgaggcacagctgtctgtgtgattctcatcgtggactctcaggatcgttttccaggtggaacagaacaaatcctactgcaaaccctctgcgcgaagcccctgacaagtgaggtttacaagcaggggctggggtctaaaccagtacaatcgctcacagcaggaccagcagtgaattggcaaacttagaaagccttccagctcatccacgggagagtcctgcccgagaactcacagaggccgttgacatccagcatgttggagatgccccggtcactcatgtccacctcgggctggttcttctcccggctctcctccaccaacttcttcagagacttggacatggtctgcaccgaacaacaacaaagcacgtgggcgatgacagcaagcgcagaggcggaaaggcaagaggccttcgctgccactctgaggcttccccagggttggagcgggtgggcgtccgagggcgtcccaggggctggtccgggtgcggggaggggatggagtgggaagggttcagccccgctgcggccacgcagcgagaagcaaccccaagtgcaacaccgcacacactcaccacggaaggtagcccctaagacgatgggcgtgcaaccacaagcttcggcagaacgcactccagctgccctcactccctgcaacaccggcactgaacagcgaacacgccctgtctcggcgccccgcgcaggcgcacacagcgccgctgccagctccacgcccgaccctacccatattaggagaacagctctccagacgtgtctccagggccaggctccgcccttaaaagtctgtggaagaggctggctaatcacgttcgttattcggcttcgagaccccgccccacgctgaggatagtttatcccggtggcgtccaccccacggtttgggacgctgattgggccgaagttggcgcgtgcgcagtagacttggcgcaagctcagttgatgggtcgaagcccagagggctgtgggcggaagtggggaagtttgtggcgtgactgtgtaagggagggtggtggctcagggtgggtgttgcgaaagctggaagtaaattgcttccgaatgtttcgcttgtgtaatagccgctccactcgccagaagttgctaccctgagcccgtctccacaatgtgcctctgagggaccttgtggggcacgcagtttcccgccctattaagagcttctccaggcggggattccggcgcggtctgcgtttccccagcgccctgctggaaatcttttttgacaggtttctaaggctggcttttagcctttttacttgtagctagaacctacaagtaaaaccctactattttaaaagtcatttgaaaacaccactaaagcgatgtgtctttcccaactaggacttttacatttgtgaaacatgacgttctggcttccaggaatctcttgctttctcttccaaaagcaaccaaattttaaattctagagaaactgttgccctctgcctccctatttcctgacccagtctcagtcacccagcaacatcctgtgcttctctcaccaaaaaccctgtcctgagagactattttatactatggaataaaaattggcaccaggcacttttcttctactggtcacctaaattgatgataagacggatgccacacatatgcatttatatattgtagattgtagcagggatcaaagccttaaggagatgtggtaaaataatgtaattatatctccgaaccaattggataaaaaaaggatctgcactcttaaattcgaaagcaggtatttcttgcttaaaaaacattccagatgaaagagttattcctccattagtcttctttgatctggaaccgtccttggcttttatgtttattgaactagacattatttaagaatacagaccaggtattgtgtggaatatccttcaaagtaagtttgatgttccctttcaggttatgaatttttggagaaacaccactaaagcgatgtgtcttttccagtgcatgatatcaaggtacagatggcatcggtttctcccagtataggtgatgttcacttaaataaggtagtgtctgccaggtttcttcaccataaagttactatttttttctttatgattaaaaataatgctggggggaggtgctacttgattacaccccattcctcatctaatttttacccacaagttttagcatccactgatgattttctaacttcataatttcatcaatacgtattagtaggtaatctcctaatacatttatttcttgaatcattaactcttttaaagcaaaagtcctgttttgaagcaatcagaatttttcttattctatcaatttctaatagtgaatcttgcctaggtaggctgaagacatacagtacctgtgttagtcggctagggctgtcgtaacaatataccacagcctggatggcttaaacaacagaaatttctcacaatcctggaagttctagatcaaggtgccagcagatttgatttatcctgtggcctctcccctgcctcgtggacgactgtcttctcttggtgtccctccagggcattttctctatgcagtcacacccttggtgtctcttcttctaaggacaccagtcctattggactgccggcctataataacaccctgcatttgtttcatgaatgtactctcttctcaggtatcaccgaggataatagtttttaaacctctcttctgttcactcaattatgtt

SEQ ID NO: 914048 - DNA, 4001 bp, Homo sapiens
tattcaaggttgcacaacaagaagagtttggtttgacctgaatctgactccaaagccaatactctatgctgtgaggagtcgcagaggactccagggtttcagcagaggtgtttgaccagtgtgtgaccacctcaaaatctttggccttatctcgattacgtggcagcttcattcatgtatcaaaggaaataccaaataaaaattcagtgttagtcaagtataaaattatctgactctcaatattcctgttaggttgcaacctactactattttgtgttttttcttcaaatccaaactgaggaagtaattccacatttcaatcattttgattttgtcctgcctaagaaattaagtattgtatcttcccacatgtaaataacccaggctttatgtatatttaaacatttattttcattccatgcaactaaacttcatgattttatcctcttgtcgcttctgtaccattcctattcttgcagcctgcagctcaataaatacacctggacagctacacctacacctatatgataggtgcaagaacatcaatagaatggcaattcactataaatcaagattttgttagcaatcaggacagccaaagtacataacaggacaggactgaaaaaaagtacatcaaaatctttgaaatttttgaaaatgctggcataaaacagcataagtattactgataaagacactggacttcttttgcataatgaatcttaatgtcttgctttatttttcacagtattattgaaaactaataattttgtgtctgctaaggaaatcccagatttttaaacaaagatatcaggtgcctccatatgaatgaaattgcaaatattctaccaattttgacctacaaaactggcaatttcatatggcttaacctatttctgaagtaggtaaaagaaggtagagattaaaatagaagtgaaggtccagcttaaagacatcagagttttcttttaagaccctaaagttatggttaagagtgaaaagtggtaacattttaataactgatgctgccaagaaataatgttggtttagtaaaaagtaaaataaaaaggtttctaacgcattttacatggctcaaaagcaaacatcaaacttctatccaatgtcacgtgtactccctctttcctttcaaatgatttgagaaagaacccagtatcaaaccttcaactttttctaaagtgcagaggttgctgtttgcctctactccgctccgaaccccctccccccaaccagttctgtgttgtgtgtagacatcgctccattactgtgcttcccattaaatccgtaataagccagctgtccactggcctcgctgggtttcttgggaatcgaggggctcccatttccccggcatcacctacacctgcaaaaagacaggcgtccaaagcctggggagggcagcggacaggtgcgcccgcaaacgcgcgcctggaccccggcaccgccttcccaatccggacctcagctgcctgagaaactcgggggttccgatgtccaggccctttagagccccaagagcgcagtctcctaatccctccctttgtttctggccaccgctgaaatagaggagcgggggagaggctttcccgactcctccacaaagcaaatgcgcgaggaacagaaccccggctccctcaccttccgcggcagggtccctcccgcaactcacctgctgggtgggaagccccgccaggcggagcgcaggacccctcaggctcggcccctccatctccaacgcgaactgtccgggccgtcgccactccttcaaagggaagatttgaaaagcccgcccctggcaggagccgcagaggacgccaaccgcccggccgtaccaagtcccagtcgcaggggccgggggcgcaggaggagccgggccgaagcgcacgcgcagtgggcgcgccttgcgctctgcagctcccgccgccggaagttgccgagaccccaggctctagcgcggcggggcgggggagagggcggcggtgccggacttaagtcccggacagggatgtgggcgggcctgggacgggagtgggaggggccgcggggaaagcttcggcggcggagcgcacctgtcccagctcaggtttctggctggtggttttcgtggcacgccctttgcactgggagctttctgcccgcatcccaccgaaggccttccaaagtgatcgtagctggacagactcgaggctgcagtccctgtactcccagacaactcaggaacccacagcgtcactaagagcccacggtctcgttcctaaagaaccaataacattactctcaaacacagcgctctctgtttcctctcacctttcccagcgttgtcaccagggtcacccagatatcatggttttattcatcaggttcgtgagatactatgtcaggcatttcacaaggtcttgtctttgcccccagtgtttataatcccagatgttccccgccaactactctgtccacttactttgttttcttgcgaaggatttctttcagctctctcgccctctctttccctctccaacatctaaggtgatagcaaaatggggtactatttctcaagagcctcatttcttgctgccctaaagattagcacaaagacccattttaattcatggattttgttaattataaagggaaacatgggatttttaaaaatcaaaatgaaagcagcaaagatatcacacccttgaaaagtccttaaaattcattgtccctagtttatctttatttcccccttgaaaaggcaagaggaagcctcttcttgaagagtctaccaaatcaaccctccagccctcatcgcctagaaacccttgggcatttttcctccataaataggtgcccatgttttttcatttgcctgggacagaccctgtctgggtctgttgtcccaatgttgcaccaatcttgcacttatcccgtagtggatattatgtggtcattttaactgcaagacccttttaaaagcagttggtttgagaatgtactttaaaaatataatggatacccttcctcaaataggtaaaatgcctctttaagaccttttggactaggtgatactagaagcttcccagttgggaatgatggtccccttgcattatgaatgacccatatccttacaacaataaaatatgtgttcaaaattatcaacacggagctcacctcgttttctacaaacacaggtctgaatttcagaatcattatgtgccctttcctccaatgcacatctctgtcttatgctaccactttgtggtataattatctcctactcagtatgaggctgcatgagcctagctgtagtacctgactcaaaagaaaaacacaccgcgagcccatcatcagacacatagtacttacaacacatacagctctcagttgcagatcaaaatacatgtagaagccagcacttcattaaaacagaggtgagtcaaccagtttagaattggacactgatagaggagtatttgatgagttaaaaccagatatttaactggagatacatttatttatgatactagaagaaagagattaggcaagatcatatttagtaattatctgtagaatacagttgttacaagagacctttctcttgggagaagaagttatgatgtggtcctgtttttattatacaccgggagaggtccccaggaattgcttaagtacttaattattatatgatgattaaaataccttggagtaggacttatgtttccttatttatcctcaagtccttacttgttactgctaatttcatcagccagttttctctggtgtatgtaatgcacataaaatatactcatccatggaaactacaaaatttaaagagttcatatgcagtggcttcattagcttgaggatttctctatcaatctatttattttacagttcccagaaagtgagaagtactacgttttaccatctcaaatatctgagagagaacatttgggcatctcttaacccatcatccctgggctcttacagaaggtcgatat

SEQ ID NO: 914049 - DNA, 4001 bp, Homo sapiens
gagcgaatctccgtctcacaaaaaaaaaaaaaagaaaaagaaagaaagaaagaaaaaagaaaatttccatgaccactccagccaaagttaatgaattattctcaagatcctgcaaatctgccattctcctgtatttaactttcctggtacctcttcatagagaatgagttttttaaaatgatcttctatggagataaatttggggtgagagacaacaggtttaagggcctcatgcaaaaggtagatagcaggtacggtcttaggatgaattccaaggcaaaaatgttcagaataaactggcaataaaataaaaggtagttaaaattctaggattccagtgtcatccacaacaaacatgacaggtaaaatacactgacaaggggacacagaagaagccgtccaattctttcgtctaccctctttctgtctggcttcttcattctgactgtagttctgtattgcatgactgttttattttcaaagagaaaataaaagcagagaccagttttacattaatgttcctcacccatccacacagttgaggatgcccacagcgccagtctgaataccaagttaatagatgcaaattctaaaaggcctgatttttaattgatatttttaagacacagtatcatcaagtaagatattttcaattcacaaaaatattgtcctccttcccgcaaattttattctcagtttacttagaaattcagacgcttccccatcatctcatcactgttgtgactggtgggaataccttcaacaaacacagatgacaaaactaaggtgtggaaaaacgaagcacttagtataacatttcataatctctgacaaatttacaagtaatcaatgtgcccgtttttccttcactgaacaacaacaacaacaaaaaacccagagtctccaatgatctagtattccagctccgatttctagatagctaggcatgaagcctgacactgaatcctaagcaacctaaaatgcaaacagccacaactgctatggccaaactgcctggtggaaaaatgtccacacacgaattccttcaaatctgcatcgtggtctgactcccactatttttcgggagtgaaaccacttcatgtttcataatccgtggcaactctcatttttaacacagcccatcataattcctaacgtgcgatgcgacaaccacacaaagggtgttttgcagctgctgggaggcagatcggtgctgggcaccggcagttcccacgccgaggggcgttcacaccgcggccacgccccggctgcgctacaggacttctccggcccgtacgcgacccccaaacccggccgcaggcgcgcaaggagtaccagggccagtgcccgcaccttgccggggcctagagccccttccctgcctctcttcctgccccctccccccagcaaggctgcccagaggcctgggggccccccaggaccatcgcggcgggctcacccaggctcctgcgcgtcagcattccccgtctcccgccctcggcgtcaggcacccaggccaaaacctgagatgcgtcttccctccgccacccccaaacctgaaaagtcatcgcccctccccgcctgctccccgacccgggagtgacaccctgcctggccctgtcctcgctcctggacgccgtggcacctcgagccctcggccactatgcctcagaacccgggcgggaacgggccggaacaagggagggggcgcgttgccatgacgaccccgggagcccccgagtcccaggcagtccccgcccatcctgggttcgggccccagttccgactggcggcctcggcgtctcccccagctcccagtccaccccgcctggccgcggccctcagcccgggactgagggcctagcgttcggtttcggcccgctcgccttacccatggcggcggcggctgcgcggtctcgggcggaggctccctcggcctgtccagcagctccttccaggcgctcggcggccaccaccgcatctgcagccaggcccgctgcagcccacagcgcccccggcggcgggagggcgcccgggcggccccagggggagcggcgccccgggcggggcggggacccgcggaccctgcggcgggcgggagagaagcccgccgtctctaagcctcctcgcatccgctgggaccgcgaggagaaggaaaggaacgtgaaggagaccacatgtgtgaggagccagagtgctgggccctcggtcccgtgtcccgggggcttcgctggagcgcgaaggccggatttcaaggggcggccggccacacgcaaacgttgcttccaccgggctggtggggcctgatctaacacgcctgactactgcccattcaccttcacaaacacaaaggggaccaaaagaatttagaaaatctgaagcaattaacagtaggcagaaacctaataaaactagttagtcccaaattacgacttttttttgttttttgggttgtttttttttttttttttttgagatggagtctcgctctgtcaccaggctggagtgcagtggcgtgatcttggctcactgcaaactctgcctcccgggttcaagggattctcctgcctcagcctcctgagtagctgggatgacaggcgcgcgccaccccgcccggctaatttttgtatttttagtaaagacggggtttcaccatgttggccagggtggtctcgatctcttcacctggtgatccgcccatctcgacctcccaaagtgctaggataacgcctgagccacacagcccgccctaaaacaatttggtaaagctcattacaaaaagctaaagtgaaaaaagagagaaaacaattcaaaaatatttcattatgtgccacagcaatatccacacaagcactaaaattcagacctcggctgggtatggtggctcatgcctgtaatcccagcactttgagaggctgagctggatagatcacgaggtcaggagttcgagaccagcctgaccaacatggtgaaactccgtctctactaaaaatacaaaatttaggcagacgtagtggcatgttcctgtagtcccagctactcgggaggccaaggcgggcggatcacccggtcagaagttcgagaccagtctggctaacatggtgaaacctcatatctactaaaaatacaaaaattagccgggcgtggtggcgcgtgcctgtaatcccaagattccgtctcaaaaaaaaaaaaaaaaaagtcagacttcatccctggatccatcttggttcacatttcccaggattatgagccctagtcatcgtaagggccagtagtgactcaagtggaattagataggcatatcctattagctagaagagattttttatttttttcagacagggtctcactctgtcactcatgctggagtgcagtggcgcgatctcagctcactgcaacctctgcctcccaggctcaagtgatcctcccacctcagcctccctagtagctgggaccacaggcgctcattgccacacccagctaacatttgtatttttgtgcttaattttttaaaaaaagttacatatatatgacatatacttatgatcccagttttagtttatcaataaatacagcaatatgaaggtatatctatatatctatatatagatatatatacatagttagaaaaataaatgcataggtaagagactgagtaaagtacatgaaaatgttaatagttatgatgtgtgggtgggggcattgtgattacttttttccctaaactattgtgtgtgtgtgtgtgtgtgtgtttgtttaggcttttattttaggtttgagggtacatgtgaaggttggttgcataggtgaactcatgtcatgggggtttgttgtacagattatttcatcacccagttaagtccagtatccgatggttatcttttctgctcctctccctcctcccatcctccaccttcaagtagactccagtgtctgttgttcccttctttttttttttctttttttaagacagggtttcaccatgttggccaggatggtct

SEQ ID NO: 914050 - DNA, 4001 bp, Homo sapiens
gtagtcccagctactcgggaggctgaagcaggagagtcacttgaacccaggaggcggagattgcagtgagctgagatagcgccactgcactccaatctggtgacagagcgaatctccgtctcacaaaaaaaaaaaaaagaaaaagaaagaaagaaagaaaaaagaaaatttccatgaccactccagccaaagttaatgaattattctcaagatcctgcaaatctgccattctcctgtatttaactttcctggtacctcttcatagagaatgagttttttaaaatgatcttctatggagataaatttggggtgagagacaacaggtttaagggcctcatgcaaaaggtagatagcaggtacggtcttaggatgaattccaaggcaaaaatgttcagaataaactggcaataaaataaaaggtagttaaaattctaggattccagtgtcatccacaacaaacatgacaggtaaaatacactgacaaggggacacagaagaagccgtccaattctttcgtctaccctctttctgtctggcttcttcattctgactgtagttctgtattgcatgactgttttattttcaaagagaaaataaaagcagagaccagttttacattaatgttcctcacccatccacacagttgaggatgcccacagcgccagtctgaataccaagttaatagatgcaaattctaaaaggcctgatttttaattgatatttttaagacacagtatcatcaagtaagatattttcaattcacaaaaatattgtcctccttcccgcaaattttattctcagtttacttagaaattcagacgcttccccatcatctcatcactgttgtgactggtgggaataccttcaacaaacacagatgacaaaactaaggtgtggaaaaacgaagcacttagtataacatttcataatctctgacaaatttacaagtaatcaatgtgcccgtttttccttcactgaacaacaacaacaacaaaaaacccagagtctccaatgatctagtattccagctccgatttctagatagctaggcatgaagcctgacactgaatcctaagcaacctaaaatgcaaacagccacaactgctatggccaaactgcctggtggaaaaatgtccacacacgaattccttcaaatctgcatcgtggtctgactcccactatttttcgggagtgaaaccacttcatgtttcataatccgtggcaactctcatttttaacacagcccatcataattcctaacgtgcgatgcgacaaccacacaaagggtgttttgcagctgctgggaggcagatcggtgctgggcaccggcagttcccacgccgaggggcgttcacaccgcggccacgccccggctgcgctacaggacttctccggcccgtacgcgacccccaaacccggccgcaggcgcgcaaggagtaccagggccagtgcccgcaccttgccggggcctagagccccttccctgcctctcttcctgccccctccccccagcaaggctgcccagaggcctgggggccccccaggaccatcgcggcgggctcacccaggctcctgcgcgtcagcattccccgtctcccgccctcggcgtcaggcacccaggccaaaacctgagatgcgtcttccctccgccacccccaaacctgaaaagtcatcgcccctccccgcctgctccccgacccgggagtgacaccctgcctggccctgtcctcgctcctggacgccgtggcacctcgagccctcggccactatgcctcagaacccgggcgggaacgggccggaacaagggagggggcgcgttgccatgacgaccccgggagcccccgagtcccaggcagtccccgcccatcctgggttcgggccccagttccgactggcggcctcggcgtctcccccagctcccagtccaccccgcctggccgcggccctcagcccgggactgagggcctagcgttcggtttcggcccgctcgccttacccatggcggcggcggctgcgcggtctcgggcggaggctccctcggcctgtccagcagctccttccaggcgctcggcggccaccaccgcatctgcagccaggcccgctgcagcccacagcgcccccggcggcgggagggcgcccgggcggccccagggggagcggcgccccgggcggggcggggacccgcggaccctgcggcgggcgggagagaagcccgccgtctctaagcctcctcgcatccgctgggaccgcgaggagaaggaaaggaacgtgaaggagaccacatgtgtgaggagccagagtgctgggccctcggtcccgtgtcccgggggcttcgctggagcgcgaaggccggatttcaaggggcggccggccacacgcaaacgttgcttccaccgggctggtggggcctgatctaacacgcctgactactgcccattcaccttcacaaacacaaaggggaccaaaagaatttagaaaatctgaagcaattaacagtaggcagaaacctaataaaactagttagtcccaaattacgacttttttttgttttttgggttgtttttttttttttttttttgagatggagtctcgctctgtcaccaggctggagtgcagtggcgtgatcttggctcactgcaaactctgcctcccgggttcaagggattctcctgcctcagcctcctgagtagctgggatgacaggcgcgcgccaccccgcccggctaatttttgtatttttagtaaagacggggtttcaccatgttggccagggtggtctcgatctcttcacctggtgatccgcccatctcgacctcccaaagtgctaggataacgcctgagccacacagcccgccctaaaacaatttggtaaagctcattacaaaaagctaaagtgaaaaaagagagaaaacaattcaaaaatatttcattatgtgccacagcaatatccacacaagcactaaaattcagacctcggctgggtatggtggctcatgcctgtaatcccagcactttgagaggctgagctggatagatcacgaggtcaggagttcgagaccagcctgaccaacatggtgaaactccgtctctactaaaaatacaaaatttaggcagacgtagtggcatgttcctgtagtcccagctactcgggaggccaaggcgggcggatcacccggtcagaagttcgagaccagtctggctaacatggtgaaacctcatatctactaaaaatacaaaaattagccgggcgtggtggcgcgtgcctgtaatcccaagattccgtctcaaaaaaaaaaaaaaaaaagtcagacttcatccctggatccatcttggttcacatttcccaggattatgagccctagtcatcgtaagggccagtagtgactcaagtggaattagataggcatatcctattagctagaagagattttttatttttttcagacagggtctcactctgtcactcatgctggagtgcagtggcgcgatctcagctcactgcaacctctgcctcccaggctcaagtgatcctcccacctcagcctccctagtagctgggaccacaggcgctcattgccacacccagctaacatttgtatttttgtgcttaattttttaaaaaaagttacatatatatgacatatacttatgatcccagttttagtttatcaataaatacagcaatatgaaggtatatctatatatctatatatagatatatatacatagttagaaaaataaatgcataggtaagagactgagtaaagtacatgaaaatgttaatagttatgatgtgtgggtgggggcattgtgattacttttttccctaaactattgtgtgtgtgtgtgtgtgtgtgtttgtttaggcttttattttaggtttgagggtacatgtgaaggttggttgcataggtgaactcatgtcatgggggtttgttgtacagattatttcatcacccagttaagtccagtatccgatggttatcttttctgctcctctcc

SEQ ID NO: 914051 - DNA, 4001 bp, Homo sapiens
agcccatacacataaactaatttaaaagctgttgcaaatcaaattatcatctcatgaagattaaacagtagatatccatttagatttaatcaagcatttagaaaacgcttgatgctaacaaaaattagccagccatggtggcgcccacctgcagtcccagctactcccagctacttgggaggctgaggtgggaggatcacttaagcctgggcaacacagcgaatctctgtctcaaaaaaaaaaaagaaaggaaagaaaagaaaagaaggaagagaaaagaaatggccaacaactttacaaacctataatcacataaaaagttgtaaaacatatgagacatgtggctaaagtcaaagacttcatggaaccatgttatgacttaacaatcacaaaaggaagtcaatttatctctactaaagtgaatataaatattgcaatcattctttttctggcataattatgttttggaactatgtcttctataaaaagcatctgtatacccacctgtcccagttgtgttggctgccaactacaagcatcctctgtccttatttttccaaatcactctactaaaaatactattcacacaatacctgcaaaatagtatttcaatattggttttgccaatcagtcaaaggtacctctccaattttcaagagataagtccaatcctggggttatcagtgagaggaagatttggtattgcgcctagactgtggcaagttcactgtgcccccttcacccagaaacttgcattgaccatacatttactatgtggcaaatacatgtgtcaacttaaaactttgaaagtggaaccagtccatgttgagtatctgtaaaatccaagtgtccaaattcttgtttcaagtttaatttttaaaatctgagtatccaaagtcttgtttcaagtttttaaaacttaaaggtaatatagtaaatttttaggatcttaacatgtctggtatttaaacttagctacgaaaaaattacaatgaaaaaaaggacaccattactgtcaataaatccaaatgatatcttcattttcagaatcacgtcttccactaccttcttcaaacatcacttcctctccactacttcccccagtcctttaggcaaatcagtgattcacaccgccccttccacccaagattcttaaaatgatccactgtgcacgaacgagaaagccccacgatccaagtacattgccctagtgatctttgatgttttaaaaggcacctgtaaaaatgccaaagcccaaaattagatccccaagggctccttttctttcttgaccacacttctctttttcagtgcctccctcaccccttgaggccagacgatttcccatccaacagccctcctccttctagtcaaacctaaatcctgccctccatcaccaccagccccacccggggtgggaggcggataagagggctccgtaagaggagaaccccatgagagggctccagtcccagccccgatcgccctccctcgccctgggaagggaacaccggcccaggtcttgctcctctgactcctcatccccgctgccaaacccagagcatctcttcttccgggtccacattcccgcaggaccttcgatctttttcccccactgcgcagctttcaaaagcccccaagctctgggctcttcaagcctccccctctcgctctctccctctcgttcctcggcctccacttatccctcagccttcaggccctcagttcgacaacctccatttgcttcagattccattccagagctgactatcccggttccctcaaccgtctccccggggcccctccaggtcgcggtccctcggcagcccccggctccatcccagactccccactcacccttggcagcaggcgccccccaagctcccctctcctcagcctcagctcccgctcacctccgcggtccgagtcgggctccccggacccacctccgagtcggcgtccgagccgccgtcggagtccggggccctccccgcctcgccggagtgaagcgcctcaagcggcgggggcggagcccggggcggggagccggagtggaggcgggggcggtggcgactgcgcgcaggcatcgtcccggccgccgtcaccgccgcgccggcagctgctcggagccgaaccggaactgcttcgggaggcggggccctaccggccggggacggggttctaccggcagggggcggggcccacactggaaaagacgcgaggctccagatgggcccgagaggagaaccgagatgctgccgcggaggagcccgagggcgcatgcgtcatgccggaggccaaagcgacaggaggaagcggggctagcggagccggggcggggcctgtgggatcagtaaatggggttagggcctagaaggaggtaatccgaattcctctggagagagccagctcttctccaatagccagcccccaatgatcattgttataatttattgcccatttactctttgacagtgtctatgccaaacgccatataaacatctcatttaatccttgtgctaaggccgggagcggaggctcacgtctgtaatcccagcactttgggaggctgaggcgggatcacctgaggtcaggagttcgagaccagcctggccagcatggggaaacctcgtctgtactaaaaatacaaaaattagccgggcgtggtggtgcatacctgtaatcccagctactcgggaggctgaggcaggagaatcgcttgaacccgggaaatggaggttgcaatgagccgagatcacgccatggcactccagcctgggcgacaagagcaaactccatctcaaaaaaaaaatcctagtgctaattctgcaagggggatcctatagcacagaaaagtaaagaaacatactgcctgacatattgcaaactgatattccaacccaaatctctctaacatcagatcctgtattttcctcactccaccatgctgcaccaccctgagggaaggtctcctcccaagccaggtctagcattggcataaaccaagtccaaacccagctgtaacctggacacgagcccctccttggtcttgcctccccacacagtgccgggccgacttcaatggttctgaatgggatagacatgagtgtagactgcttccatgggatgccctggtgtggcctttcccttcaaactggtcttaaggccaagggcagctgggaacctccccactgcagctcatacccttcccagctccattagggccactgagaagtcacatgagagagggtgagacatctcatctctcttgctgataaccagctctggcagaaggacaggttgacctttctcagtttctattttgggacccaaagcccttataggcagaggaatctccctcccactgtttctgatgacagttagcccctttggctctcaaagtctagggcaacactcacctcccgtctccccatttgacatacaaggccctcttcagccttctcttctgagaagttagccatcttcactacaggaccattgttcaaaccttgccccattggcccggcacggcggctcacacctgtaatcccagtactttgggaggccgaggcaggctgatcacttgaggtaggagttcaagaccagtcagaccaacatggcaaaaccccatctctactaaaaacacaaaaattagtgtggcatggtggcacatgcctgtaatcctagctactcaggaagctaaagcaggagaatcacttgaacctgggaggtggtagtggcagtgagccaagatgatgccactgcactccagcctgggtgacagagtgagaccctgtctaaacaaaacaaaacaaaaaaaaacaccttccccctccccccatgaatcttgtgggcaccctttaaaggaagctctccatgtctcttacccatatttctctgactctacaactcagaaaactgtccctgacctccgtaattcagagactcatccaacagacatccaatccagctcctgcccaatttgtggcccacctagactg

SEQ ID NO: 914052 - DNA, 4001 bp, Homo sapiens
tgtagtgagccgaggtcatgacattgcactccagtctggacaacaagagcaaaaactccatctcaaaaaaaagaaagaaagaaaaatttctaaagtgatgtaaacattttttacaagtctgtaaagtattgactgaaaaccagtgtagtacaaatgtatatagaagtgttgggttgtaaaggagtgatgagagtggaggctgactgaagaaactcttcaggtgagctaaaaataataaaaacccttactagatccaaagagtcgggttgcactgctacccaaagttaagaaaatgcccccgccccccttttcttaagacagaccaagactctgtctccaaggctgaagtgcagtgttgccatcatggctcactgcagcctcaacctcccaggctcaagagatcctcccacctcagcctcctcagcagctgaaaatggccttggtggctcctctctccttaagatcttaggatttgtaccaactcatcagtagttttacaatctgcacagtacttgtacatctcatttcatccccacaccaaccctaccaggcaaggatcactggcctcatttaacaagataaagatgaggatactcctagttttgctgagtcctttaagacggctcagttgaaaaagtaatagtgccagggcttaaaccctcatctctaacaccaaagcctaagctcttcctgttaacagtacataaaattcaaacccaaaccacaaaattgctggggaaaaaaaaaaaaactaaaacttctttaacccaccaactacacagaggatgatcttccgaagttctcttccttacaactcatcacatcttttgaatggtattttaataactagcattctatttattttctattcttggtccattgtaccaccttacgagaagttaagagtaatctaaaatttaaggtaggtctctaaactatcaacaaaacactattaatgtacctaaaatgaaaacttgcgaattccagggctaaatgattcaaacaaatgttaatagaaaaggagggcaccaatctgaccattagccaatttaaaaatttacgcattacttgttatacataatcagggcaactttaagacgccattccaggcagatttggggtagtaggcggctggcttttagctaactctgcttagctgcggggtaaatgtcaaaggtcagccccatggcgaatctccctaagccccctgtcgcaaccgaagccgatggaatcaacaagacaaagatgctcctgacccactggctagaatcgtgaagaaaacgctaatccatgtcaaatgcacataaggaaatttttccatgcagagaccagacaggggaaaaggggaagggagaaggagaaaatacagggttcgacccgggccatcggaagacaaccaagcgctgacttgggggtaagccctggactaggggcctgtagaccaggttcgagcgctcacactcgctaactgcggagccttggccagcctcagtctccgagtctacaaaacaaggataatcataaagggctcccacccgcctcaccgagggctgtgaggctcttccgagacagaggacatggagccatttcgtaaaccggagcgcacggtacagacaagaaactgttatccggcccagcagctgcgagacccccgagcggaatgcaagtggaccccaggcaaagaggacagcaggggacggagcagatctggccaagttgtcccgtccccgcccagaatcagccccgcggccccacagaaccgcctgcgtgtcacttcccccccacccaaccccgccagggccagcctccgctccgacctccccgccttccgtcccagcccctcgagccccaactcccctccccgacgcgaccctcagactcacggcctgaggggctcctccggcaaaacagcggctggctcggaccctccctcagagcacactaaccagcagcacccgggaccgccagctactcgccggatgtacgtcacacccctccccgggacttccgggcgcgtaatgggccccgccccctcacagcgttacgcctctctgccccggtgccgtcccaccagcgactcgggccgcggaggggcgggcataaggcgtgacaaagcgcgctcggggtctggccccgcctcggccccgcctgctcccgtctggctagctgaccgcgcgagacgtggcagcgccggaaccctgggtccggggctgggtcctggagtccctgagcggcctggtacactcgggatcgcggcttcccattccagacgcaccaggaaagtcagaagtgggtaccgacggtgacataggtcctgggaaagatgagttgaccttggggccctccacttgaggtggatccctccaagcttttgctttttttcttccttgctttttttttttttttttttttttttgaggcggagtctcactttgtcgcccaggctggagtgcagtggcgcgatctcggctcactgcaacctccacctcccggattcaagcgattctcatacctcggcctcccgagtagctggaactacaggcgcatgtcaccacacctggctaatttttttgtatttttacagagacaggtttcaccgtgttggccaggctggtctcgaacttctgacctcaagtgatccgctggcctcggccttccaaaatgctgggatgagaggcgtgagccaccgcgcccagctgcttttgctttgagtcgcacttccttgccctggggtggcctatgttttagaaaaacagaaaaacagctaatatttattgtgcacttatgttccaggcagagcactgggtactttgcacgctttgtctaatttcaccgtcattggagtcctgtgactccagatgctagtattatccttattgacaaatgagagagcaatgttcagaataacctaccatgcccaagttcacacagctaagtggcaaagcaacgtgttcaccccagtatatttcgcatgcattttctcatttaattctcaggacagtcccacgagattggtactattattactctcattttacaaataaaacagtctaatggaaagatgaatgacgtctgtgggttcatgaagatctcaattctcctttagtaaaatttaaatttaacataatcccaataaaagtactaataggattaataggtcgtgtgtggtttcgttctttttttttaattaccctatttgttcctaaaattcgtatagaaaaccaaacaaaactagtccagaaacaggctttcaaaatgaagaacaaggaggtgggaactaaccctgttggatattaaaacatattatagagcctaagttattaaaactggtgtgcgtgcacatgcacaaacacacacacacaaaaaacacaatggaacagagcaaagtacagaaatgactaaagtacatgcagaaataaaactaaagtagcacctgggactccagcaatactcagggagctgagtgggcaagctcaccaccctctaccctccgctcatcctggggtcttagatgttgaatttgaaccctgtcctgtcacagaaaggtgtcaggccacttctgaggcttctcaccagctttagctaaaccagggacaatgtgtccatggggcttggaaccccttgtgcatcctggagacacagatgcaagcccagtgcaagccaacacattggattactggctttgttgagagcctggctgcacgaggtggaggtgtctgaaccacaggatggcttgggaggctggggaaggagggaacatgcaggcagattctcagaaaagccgcaaactctacttacctaaaggcttgagcaagttgacgaatgccccagaccaccatgtacccactgtaaaatgggtgaaacaggcattgttgtgcacatagtttttccagagtactgttttcaataaatgattctgttatgtgttgttaaataaattaataaataataaaaggggttgagacaattgggtagtcaaaaaaacctacaggttgaatctc

SEQ ID NO: 914053 - DNA, 4001 bp, Homo sapiens
tgatttcattctaagagcattttgttgactggtatgtgcagcaccctggaatgtagagtaacagagcaacacacacctgtgtgacttgggttgcacgggagcttcatcttcctctgtaacgaagaagcctggtctggccaaggggtcaggtcaaaatagttttgtggataacaacctctcttttcctctctttccaatgagctctctcctccctttccaataaactctctccctgagtagtttcccttgtgctagcctatgattgctcaacacaaaccctagaaagccaatggtttagtaccatgttcccatgcctcccaggtagaggggtttgattcttttgtggctggcaggggtgggacaggcagccaagcaaatgactcaaacagaaaagctctttcagggaaagctgactctccagcacagcacacttcaaagcccacaagcacaaggttccaaagctctcaacccccagcattgacagtcctgcatctcagtacccccaggttcttcccagcccactaggcctgaagcaaccaaagagaaatgcctgagaaaaaccccaaccgggaggctgggaggggctggtgtcctctgtaagatcctaccttattaaaagagcagtgagtacctggaggactaggtcaggaggacagggaggctgcttaccccaaagccaggtgtagaacttgcaggtaggaatcaaagtgatcccatacagggctcccaagtgtagcagagacataaggatgatgtttctccagacatattcaaccttggggcttgggccttccttatccttgtaggtggggtcatatatatcatcttttatatcagggcgaatgtcgtcttccaagtagaggggcatcgtctccaacttatctcctccattctgcaggaccctggagggaggcgctgtaatggtggtggtggtggtataggagctagagatctggaagggggaggaagaggagagtcaggagaagagacacgtggaggcagctggggccactccgctctctaatcacgctgggggaagggtggacagtacggacccttccgcagcgccgtagttcactgagggtagggtgtatccgagacgcaacggagaaaagttccctgaaactgtacagatacattaggggcggagggcgagggggacgaggggcgcgaaacctatcgggaggcggcagtaggaaggagaagtaaagcactcacatccccacgaagacaaaggaaaacccgcataattcataaaagcaccagcacgaccggatttttctttaaagcttaagaaactaaagttggagactcaagtccccaaattacaatccacattcccaactcacggaaggcagcacaactcgaaaaagatgaccaagtcctccgcggagctctcccctctcttctgccaccaacccgtcccctggaagcccagcccgcgcctgcgacccggcggtacggggccaggctgggaaactcacatcgtcctgcagcaagtgggccggcatcttggctctcggatgccgggatcactttccagggggctgaggctccggagcggagttcggggtcgccggaggactgcggtttcgaagcccgccggtacgcgctgagccgcggcgccttgcacgctagctggttgtcggcgctagccgcggtgcgtggaggtccccgagccgggaatttaaaggctagagctggcaacgggtgaccgtgtccggtatttcctcagcccccttttatccgctgccaagcaggggcaaagtgcgaggagttgactggcgcgggcggtcccgcgtggaggtaagggcgggagggggaggagacagaggccgaggctcgcggcgaccgcagcagggcgccggggatgctgccgacaccgacaccacaccacccggcctctgcccctgcccctgcctctggggaaatgctaatgaggcttctgtaaactccggctcgtcattggccgaagggaatttggtgccacctcgtcctgccgttgccattggctcggcgcaatctgctgttccctctgccgccagctcctcgctccccctcccctctgtttctccttctcagcttctcttccacccgccgctgggcctctgcccggcatcccgcgtcgggagctttctctctggaaggggctggggacccggtttggggctggggcgcggagcctagcccaggaccggccctcgggcacacggagaacgggtgggtgggcactggggaagtttctcaggaaacagtggtgaaccctcggggggcgcccaccactaacatctccgtcccgtcttccgtccccccaggcgcgtggcagggagacgtggcagccaccccaggatctggagcttgggggacgcgggaagccccgcctccctcccgggcgagcgcgggggactcggtacgcctgcgaacaatggctctgccccgcccaccagccacgcgctgctcacccgggaccgcaccggactccggccgcacacacaggctggctggtgtgtgtgtgcctgcgcgcacgcatcctgttcaggacccgggcgggcagtcccatccccaagcccgcgcctccaggatgcgtgcgggatgttttggagattcttcagactggcaggttgtaattttggaatcttctttgtggaaaccgtcaggaaacactgacatgtgttttcacccagcagcaggcgaaagggcttggatgtggaataagaatagctggcaggtattgaattattactgcaagccaattcacaagaatcgttttctgtaagcctctctgtgaccctgggaggtgggtaccccattattccattttaaaagtgaggaaagagatatggagagatggaataacttgcccatggtcacagcaaccagtaagtgatggagctggcagttgagcccagaaacaccatatgagagcccaagctcttaatccctgctcaggaccatattgccctcggtccctgagatgctctgaccctactgatctgtccctgtgcccccatcttttccgtgtctgtaggagccttaccatgagagctcagaaccaggcaggctatgcattcacccggtgtccttccatgcccatgtctttcccaaatactgccctaggatccttcccctgggaagaggagaaaatacggagtgctgcgccaatgattcacttcccaggaagacaagcacctgggatttcctgggaggtagactaagcagctcctttgttggccactggtctcagggtcaggccaactctctggccagtgaccaggagactgcattccagtcctggctccctgtccggtgtgaaagttctgaacaagactggatgatttcagatgtggacagctcatccagtcatgcctcagaagtacttggcatgtggcacagaaatctgtacgtggtctgacccccttcaggttctctctgcaatgtctaatttgcttaattcttttgttttttgtttttttgagaggaagtctcgctctctcccccaggctggagtgcagtggtgtgatctcgcttcactgcaacctctgcctcccgggttcaagaaattctcctgcctcaccctcccaagtagctgggattacaggcatgcgccaccacacttagctaattttttgtatttttagtagagacggggtttcaccatgttggccaggctggttttgaactcctgacctcaggtgatccacatgccttggcctcccaaagtgctgggattacaggcatgagccaccacgcctggcccggagaatattttcattctatttctctttcgagcagagatcacctctactcctgaggccctggtcacactgtggttctcaagtgacagtggtcaaaccaacacactgatttggattctaagatttattttttttggtctgggggccctacctcagcaaaaggaacaatagttacaacaattatgacagcaaaaagtttgagaccagcttggccaacaaagtgaaatcccatctctactaaaaata

SEQ ID NO: 914054 - DNA, 4001 bp, Homo sapiens
acatctactgaataattggtctactaaataccacacaccattctaggcagtgggaatataatcgtgaataaaagtaagtttttgctttcatggtcttacatcctagtgcagtggaataaacaaatatgtgtacatgtcaggtagtgacaagcatcaagaagaaacataacacatgggcaggggaaccttcatgtacagctgttcccagtgtgcctgtcttcgcttctccatgaaactgtctttcatccttcaaacaagaataaattattcactggaaactcagcatccaaagaggatctatgtactaggccctaaataagatcctggagataaaaaggcaattaggtcatagctgctgaagaagactgcagtccaaatggagaggcaggtgtgtttatttcacaaacattaaatcacactgtctggcacgcactatacttagcgctttgcaaaaattaaagcatttctaattacaattctgtgaggctacacatacatagaaactgaagcacagagaggtaaagtaaaatgcctacagtcacacagcaagttactggcagggcaaggactggaatacagacagtctgtgctcttaaacactatgctctgggcaatgctacataatcatcaaaaagcaatctccctggacaataatacaaatatgaaaaaagagctaggagtgcacataggagtgggggcctaagagaacaagaaacagcttcttggaagaagtgatgtattgtcttgaaagatgaggaatgggtggggggttaaacctgtaatcccagcactttgggaggccagggcaggcggatcacttgaggtcaggagattgagaccatcctggccaacatggtggaaccctgtctctactacaaatacaaaaattagccaggcatggtggcagacgcctgtagtcccagctactcgggaggctgaggcaggagaatcacttgaacctggaaggtggaggctgcagtgagccgagatcgcgccactgcattccagcctgggcgacagagcaagactccgtctcaaaaaaaaaaaaaaaaaaaaaaagataaggaatgcattgtatatgtctacttcacaaatattacaggcttctagaagaggggcacagtccatcttataagatatcttactgtaacctagaagatattgtactgtatcacaacaatctcctagtaggagacagtgtaccgtatcctaggagaggggcacagtccatcctaggaggtatcttaccgtatcctaggagtctcctagtgggagacagactactgtaccctaggagagggccactgtttaatttatttgcatttcctgccagcacctggcgtaccaacaacgggtattcagcaaagatttgcggaatgccagggtacgaatgaatgtccagcactctggacaactcggaacagggggtttccgtgaagagcaagtctcatcacctgccacctccaagatcccaaagcccccgacccactcaaacctggccagtaatgatcctggcaagctatccagagggtagctcgaggcagaaggaaaaactcccgtctgacctttgtcattgcacgtcccccgcccgcctcccaccacacacggggccgccctccccttattacctcccggtaagagcagggaggccggagaagcggaggcctgggtgactgggatgaagggcacattgaagctgaactccgtggccgaggaggagaaaagtaagttagtgcccgatgaggaagtggaggcgccgccgctgccaccgttaggttttctctcggccatggctgcggcccaccgtccgatacacgtctccgggtacccggtaccacaccactgaccggaaaccgatcacgctcctggccagcgcacttccgcacttgcgcacaggagccgaaattacgggtagctagtcagccgccctctcccttcccctacacggcgacgccagatatcaacatggcgacactgtcttcacgcccgcgtctagcacgtgacaccctcggaggcggaggccgggcgggaggatggggacgtggtccccgcaggttctggatagacgtgcgaattgagacgcaattgaccctgaaagtcacaggttgtggcgggtatctatgggcttcctaaaggtaccgtcaggatggctctcctgacaaagattttggaggaacagcggaatcctgctggacgctaccggaaggaggaagggaggaagagcgttgtgcgggaatgggaattcgcatgctaggcggaaccaaacaccctctccaaaacccacttgtctttctggatggaaccgaacattgtggttgacccagaaatagaagtggtaaaacattttttaagtgtttaatccatagggagaaaaaaatatttcgttttatttttgttgttttttgttttgcatttgttttttgtttttttggttggttttgttttttgttttgagacaagtctgctgtgtcgcccaggctggagtgcagcggtgcagtctgggctcattgcaatctccgcctcccgggttcaagcgattctcctgcctcagcctccgagtagctgggactacaggcgtccgccaccacgcctggctaattttttgtatttttagtaaagacgaggtttcaccgggttggccaggatggtctcaatctcctgacctcgtgatctgcccgccttggcctcccaaactgctgggattataggcatgaaccaccacgcctggccaaaaaaaatatttaaaagagaaatcaaaccagacgccatggcgcaggcctgcaatcccagcactttgtgaggcagagcgggaggatagcttgagcccagaaggttgagaccaacctggccaacatggtgaaaccccgtctctactaaaaatacaaaaattagccgggcttggtggcatagcacctatattgccagctactcaggaggctgaggcgggaatattgcttgaggccaaattaaccctgatcttgccactcactgtgcagcgagaccctgtctccttaaaaaaaaaaaaaagaaaaaaaaagaaaccagggcattgaaattagagatctgacattttagatagctttctatatccacagtaagctgacttacttcaatccaggaggtactgtggataacttggacataattgtcatctttcatagttagagattttgaaggaaaatataacttaagccatatttcagcttcttggaggttgggagaggagataccaaaagaacgctcaaaataatgaaactctgctcagctgtttacacatatatagaacctaagtttattaattcaataacgatttcatgtgcttactgtcaagaaaaattttttaagtgggacactcgttaaagcagtaaattagattttatttaatgaaaactattgctagggaattgggtccagcatgaactgaacacaactttgctgaaacaaaaatttggaggctttttagaggctgtggtgtgctaagggaaaggtgctgaggagtgtgaagggttggttcgtcctgcaactaggccatctgggtgtgttaatccatgcttatccagaggagacataatttttctgtcttcatgacaagcagtggtgtaagagagcaaggtagccacagggactgggaatgagaatgagaaccacctccttgaaggcttgcaattcaagagacaaacccccaggtccttgagaagacagttctcagtggtcatgtgtccggagttggttccttccggtgggttcttggcctcactgacttcaagaatgaagccgcggacctttgtggtgagtgttacagctcttcaaggtggcacagacccagagtgagcagcagcaagatttattgtgaagagcgaaagaacaaagcttccgtagcgtggaaggggacctgactgggttgctgctgctggctcgggtggccagcttttatttatttatttgtcactgccctcatcctgctgcttggtccattttacagagcgctgattggtccattg

SEQ ID NO: 914055 - DNA, 4001 bp, Homo sapiens
gtgctgaacaattgatttaaaatcaatcaggctaaaaatctaaaacagatctgctaaaatccttccccctcaatgacaaaatttaggctgagttacagaaatgacattctttagctaaactgccataatacaaatgatactccaacccaagtctttccaccaaaagagtgtatggaccttaaaactgaaggttttttttttttttttttttttttgagacggagtctcactctgttgccaggctggagtgcagtggcgcgatctcggctcactgcaaccttcacctcctgggttcaaacgattctcctgcctcagcctcccgagtagctgggattacaggcgcgtgccaccacacccagctagtttttgtatttttagtagagacaggttttcaccctgttagccaggctggtctcgatctcctgacctcgtgatccacccaccttggcctcccaaagtgctgggatcacaggtgtgagccaccacgcccggccaaaaccgaagcattaaaatcaataaaagttggccaggcacagtggctcatgcctgtaatcccagcactttggaaggccaagtcgggcagatcacttgaggtcaggagttcatgaccagcctggccaacacggtgaaacccagtctctactaaaaatacaaaaactagccgggcatggtggcacacgcctgtaatcccagctacttgggaggctgaggcaggagaaatcgcttgaacccgggaggcggagattgcaataagccgagatcgtgccactgcactccagcctgagcaatagagcaagacgccctttcaaaaaaataaaaaataaaggacacctgaaaactctagcaaggtaacagattaaaaccaagtgcagaacaggcaccaaaacttcttcacataatctgaggaaacagttcaagaatcaggggcaaagttagagttagatttcatggaaaaaaatcattcacctcatccctcaagcagaagactatgaatattctaaattccaatgcacttctccaactctcctgtttctgctccccttacgattgttatgaatctcagccaccatcaaaattattacaatcttgctcatcaacacagggatgaattagagggccttttctaaacagggtccttccaagaaaactatctcatcacatctactttcaacagctgtatcattccaattatcctgtagacagaaggggcccagaaagcaggagcactcagagttgctgcaaagggaacaatggacctctccccctttgctagaagggccaccttgactatagaaaaggagctgatcctggtctaaaactctttaaactcaaagttatctcaatagctgttcttccaaaccctaaaccttacagaggtaggtcactgacactaagtttaaaatatgtcctctccctttatgtttccaaagccggggggaggggtaaagaaaggagcttcttctccagaaaataatcccctcaaacacattcaagagcttggagtcagactgaagtctcgactccattctgggtggatagtcgagggtgacaacccaagggggcggggcaagcttcctagaactctgaaagtagtcaagccatggagcctcggagagccgaggatcaaaaccgagaagccaagtcggcttctagggccacgttaagagagggggctgctctgttaagcacagagaccaaacgtcttgcaccttttaacaggctcggggcaggaagcaggagccggaatctgggccgggagacgaagggatggtctaggacctgctcctggatggtggatgcgtgaggtgagggtctctacccaggccccgcccccaggctcctcccttctttctgaaaccggaccccaatctggccagtaataccctgacctctcctttgctttcctacccgccaacctcccgatgccactcctcacccggctccagatccaggttagacttcgttcctaacgtcaaggctcccaggctccacttccggttccgagggggccgtcccgtcacccccggaagttcctcctccacgctttagggccgggccacttcttctgccacgtctgcatttcggggacccggatgccgcgcatgcgcctctttcatcttcccatcatggccgccgcctgtgcgcctctgctgagtcgtatgtatttccctcctgacattttttttcagatgttccagtcactttatggcctcaccaacagaaatgagattaaaaagaatttgtcaaactatctttaataatgccccttcactctgcctgtgacgtattagtgacctctgagctagagtcttgtagtcacttcctggtgacccctgaccccgttgatttccgtccgctaggttgctctcacccatggcgtttgctggttatgagatttgcggaacgtgtggtggtggtaaagggcaccaactgttgtcaacctgcatgtgggggtctgaggtctggctctacagcttgtaaaatggaaataataatgcccagaggatgaaattaggccacataggccgcttggcatcatagtaagcactcagtaaaggtcaattgttattaaccatttttatacagcgcctttgtttaggtgcagagctttatcagagccaaaagatctctgcgctctgttggaaaagatagttcctgcagtaattattagtaccccatttaatggctaagtaattatagctaacagtgctaggatttctttttcatatatgacttcatttgaacttttcagtactatttgttgatttcataatttttcgagcactgctgttgaaactgcctttgcaaaattacaactgaggaaattatgatagtggaagaaatcagacttaaccgactccatcttgcttctaacctttaagctgtccttattcattcctgggtgtaggtggaactaactttggggaggaattcagtttatggtttgaaacaaaattgataatagccccttcccgaaaagacccccttcttgcctggggaccagtctgtctttacaggactaacaaattagctacaagattacaaattacagtttaggggacatgcagcctctcgctccaagagtctgaacctccccaaattgcttttaggaataacataactattgtaaaacctaagattagtgcttgagatgttttgcagaccctgcactcattggatcagctgactacctagaccagtaacctggctcaatcagttctgccattccacccaggaacagaaaacagcaagaaaacctcactttgactccctgtgattccgtcttcaacctgaccaatcagcactccccgcttcccaagctcctactcgccaaattatctttaagaactctgatcctcaaatgctcagggagactaatttgtgtaataataaaactctggtctcccacacagctggctctgcgtgaattactctttctccattgcaattccctggtcttgataaatcagctttgtcaaggcagcaggcagggtgaacccactgagcgctgacattgtgtgccaagccatgttcttgggtctggaaatagagcagtgaacaaaagtgtttgttctcatattattgacagtaaatatcagttattctgaggcacagagtggtttattcactgaaaaatttgcactttaggctgtgctggaaactatatattaggcattgagcatgctttactaaacaagcagattgttcttgtcctctgttttgttttgtgacagtcttgctctgtctccaggccggagtgcagtggcccaatcttggctcactgcaacttccgcctcctggtttcaagcgattcttatgcctcagactcccgagtagctgggattacaggcatgcgccaccaccccagctaatctttgtatgtttggtatagacagggtttcactatattggccaggatggtcttgatctcctgacgttgtgatccgccccccttggcctcccaaagtgctgggattacaggtgtgagccactgcgcccag

SEQ ID NO: 914056 - DNA, 4001 bp, Homo sapiens
agaagcctgaaaatccctcttgatccctccttctccctcattctcttctaatccatcatttagtctccttgatttaacctccaaaatatatctcaatctgtctacttttctctattttcgctgccaacagcctttttgattgtatcatctctcacctggagtactccaacaacctcccaactagctatcccctttctactcaagccattacccaattcgttctttacacagcagcaggagtgaacttctaaaataaaaaatgattttggcattccatgcttaaaatctttcaatgatttctatcacacacagaataaaattcaaacttctttgagccctgcccaaaggctccagcctaccacttcaacttcatcttttaatacttttctcattcattgtgcttcagccacactagcctttaatttcctgacattttccttccttagagcctttacaaatgctgttccctatactttgaatgctcttcccttcactttcgacatgactggctccttatatctttctgggctcagcttacttccccaaataagtgaactacccaatcacaaaaagcctcagtttttttcttcctagtaatttataattacatatttatttatattgacattgtcagtctcttccactaatatgcaagctccatgagagctgacactgtgtcggcttttgttcaccatgttgtaactagtttccaaacgaatgtctggcatatggtaaaagctcgaatgtggacatccattttaactctgtggtttctgatctaattccaatgtatattcaaggtcccatcccaacaggctagcaaacaggtagaaatgatttttaaaaattacactgaacttgaggagaaagcttgggacctactgtgacctgcttgagtaagctatagtcagatcagtctcacctacaaaaacaggagatagtattacttaatctctaaggtactttctagcgtgaagaaagtttaagcctgcccattaagccaagatttccaaagcacctttaaacacttgtggctactatcacgtattctgtgaccagctcaacactctactatacagtcaccagtgccacctgctggtcacagccattttaatgtttctgggaaaagattccctaacaacaaaaataggagctgcgataagcagctgtgcatttgatgtgcatatctcagttaattctctcagtggtcttatcaggtaagtactatgattatccccattttctagagatgacaactggctaggccgggatgtgaacccccatcagcatcaagagcccgtatttctaaccactgtactagtcgcaagtaaaccctagaaagtgttttaatcgctgacagtctaggaactgggaaaatgggctcttaattcacattgttaagaggcatctattcacaaaaaaagggcccccgctggggtcagattggccatgggggcgtgagggggagatgaccaatgaaatgctcgacagacctgccgtgcaggagggcaccagctacccttggcagtccagtccctagggaggacggtcagcacagcctctttcccgctgtcgccgaagcgcggcgcgccagggtcagcaatgacagaccttcccgcccagcccaaacgcagcgacaccggacggcctcggctgggccaggtcaggaccaaggcggatgggaaggcgcaaggcagcagtgaacagggagaccctcatccggctgggggttcccgtgcggcagggacagtagagccggatccaattcaagggtagacgtagtggaggcccccgaggcccggacccgcgggcagggcaggcgcgggccgggggctccgcagcaagcgggctcccctccgcgctctgccgagaaaggagcagtgctccgggtccccagcgcaatctctgctaccagggaccccagaccggcggggcgaaccaacctgtgcggaagaccccggacaagggtcaggcgcggcggccggagccgctcctctggcagggctctcgcgcggagccgggcgctgtggacggcggctgcggaggaccaaagcggcgcggaccccggcagggcaccgtcggaaacacgctccgcgggcgccgagcccgagacactgacagacccacggagaacgtttccaaacaggattatagcttttaaccgggcctccctcacctaccctgtgattgcgcagcgggtcagatctggaccagtaagttctggtctattcagtttgagccaggctctagggccagtctctgaaaagggaaaatactaactcattatctatgtattgaagcgggagaagacccggccctggccccaggagccctcagtggaatccatttagttgaaaacgtaaaaagcaatcgaggctgtaaatggcagtgagtgttgcactgcagcccagcagaaactggtgcccaaaacttggttgaattaagggctataagtgtatggagggtgagactacagggccaggggcttcctgaaatatttgaggaacataggaggggtgttatcctctggagctgcaagaacacaggtgatattccagccgataatgtattttttatgttgaagaaattgtgccacttccaaataaaaatgttctgtagacaggtcgggtgcagtggctcacacctgtaatcccagcactttgggaggccaaggtgggcatatcaccaaaggtcaggagttcgagaccagcctggccaacatggtgaaactccgtcgctaccaaaaatataaaaattagccgggcatggtggtgcaggcctgtagtcccagctactcacgaggctgaggcatgagaatagcttgaacccgggaggtggaggttgcagtgagctgagatcacgccactgcactccagcctgggtgacagagactccatctcaaaaaaaaaaaaaaaattctgtaggcagctttaaatcttagaaacttatgcttaacgcatgaattctctgtattcctgcctgatacacctccaaagatggggggccagttatcatgatggagcccaactcattgtgacacgactccagttcccttccatgtggatctggcaattttgaagttagacagaaggtaattcagtgcattatctgtgcctagcccacgcttcctacctactaagtactcaagtatttcctgaacttcttagctggcacaacagggaatgaagcctgaggaaaagtaaacagggttaaaaactaaacctgagagaaggaggcagaagagttactgatggaatactcctaaagaaatttgaaccagaagcttaagtcacagtttcgggtaggacatgattaagccaaattaaaagtgcactttctcaactcacacctcttaagaattcttgctgggagcagtggctcatgcctgtaatcctagcactttgggaggctgaggcgggcagatcactcgaggtcaggagttcaagaccagcctgaccaatatggtgaaactacatctctaccaaaaaataccgaaaaaattggctgggcgtggtggcatgtgcctgtaatcccagctactcgggaggctgaggcatgagaatcacttgaacctgggaggcagaggttgcagtgagctgagatcatgccactgcactccagcctgggtgacagagtgagaccatgtctcaaaaaaaaaaaaaaaaaattctttttggcctggcatagtggcccacacccataatcccaacactttgggagaccaaggcaggtggattgcttgagcccacaagtttaagaccagcctgggcaacatggtgaaaccctgtctctacaaaaaatacaaaaattagccaggtgtgttggtgcatccctgtggtcccagctgcttgggaggctacagtgagaggaccgcttgggcctgggaggtagaggctgcagtgagctgtgatcacaccactacactgcagcctgggcaacagcgtgagaccctgtctcaatagtaataatgataaagaattattttcactttgtattataac

SEQ ID NO: 914057 - DNA, 4001 bp, Homo sapiens
tgcctagttactctcccaggtaatagaaaagtacttgcttgtgtaaaataatcaacccagagaattaacaattacatttcatcagaaagtattgttttcccagactactcttataacatataaaggtaagataaatcaaggttctttaaggatagacactgtcttctggcacggcttaagtcaagtcctgccagagaactggagggtgaaaatgacaatctctcaagcttctgtcctttgccaaagggtctgcaatgtggagaaagacaagccgcagctaggtattagttaggctctgcggcttttcttcccctacagacactggattctatataccaacatcccaaaattgtcttaaagctgacgtgagtgattacgtttctgtagttgcctaaagttgactatattatcttttttaaaaaagcctctacaaatgatgggcagtcaccgatatatgtttgtttatttcgagacggagtttcgctctatcgcccaggctgaagtgcagtggcatgatctccattcactgcaacctccacctcccgggttcaagggattctcctgcctcagcctcctggggagctgggatgactggcgcccaccaccacaccaggctgatttttatatttttagtagagatggggtttcatcatgttggccaggctggtctcgaacacctgacctcgggtgatccgccctcctcggcctcccaaagtgctgggattacaggcgtgagcctctgcgccccaccagtcactgatgtttgacagaaggattaactaattgtcatgggcagatgtttgttacccaagtactattaggttggtgcaaaagtaactgcggtttttgagaagtaattgaaaaccgcaattacttttgcagcaacctaatattttggattttctggaaagtaaatctgaattatgaaagcattcattgctaacgcgaaacaagtatcaatcacatcaggaggcttcctagaacctctccatcccttttcctctccacctcaatccaagccactctcagatttcttgacactttatgatcatctgtaaggggtattcatgttcaagcaaagcttttggctgccccctgtctatccttgtgatgcaaaattttaccacgggtctctcctactcctttctaatttcccccaaatgtccactagttggccaatgggtgccctgcttgggtatgcacgacccatcatccaacgaacatcttcacagctatgcaagtagctacgtgcacatatgtggggttgagtgttacggggagggccctgaaaaacattcctataacataaggccttgtccctaaggcttataaaaccttacagttttcagtaaacgctacagaatgaacagtttaaggaaaacgctgttaccaatgcacactcctttcctccctaaaacacacgccatgcatcactttttttaaaattaaacgagttaggggagctttcttcaatgcaacatgccaaggaaagatgacgagggaataaaaacacgggatttctttaactcctgaaaaattaaaaagtggtccaggttcacccggtgccctaactccccgcccccaaaaccaatggcctcccagcgccatcctcgccctctatcaaacgcaaaccccgggcctccgggtcccggtacccgccgggcaaggcctcgcacggctaggggagcctcggcggaggcccccggcccgtgccctccgctgaggcccggagcggcccgcgcatccctggcccccacgactccgagcgagcgccagccccaccgcccgcagcccaggcggggcctgcgttcccagccagagtccccgctccagccgccgctactcactgcccatggctgctgctggggaggcccagggggaaaccgcggcctcggcgctgccttcgctcgactcccgcggctcgggcctcggtaccggctcccgacgcgatcctaccggccccgcgcaggctccgcccaaccccgcgcagactccgcccttcgccacctgacccgcgcgcccgaccggcccagccccgcccccagggcgggccgttggccgacgtccgctgcgttgccatggtgaccacgggcgccggggcagggcgggcccggtcccaggacccgggacccgggaggcggggctggcgcgcctgggggcagggctcgggcgggcagccgtggggcgtggaagccgcgcagaggccaaggctgcggggttcttcgtcgtctacaggctttcgcggctcagtgtggaaaacccgccgtttcctcgcgccccacgtccgacccaggcctcctgggcacccttcggggaggccgcgatctcggcgccgcccaagtagcgcggggaacacggttctggccccgaggcctgggactgagccgctgagagcggacgggaccgaaccaatcgtattttgcttccttctttttttttttttgaaacagagtctcgctctgtcgcccaggctggagtgcagtggcgctatctcggctcattgcaaactccgcctcccaggtaggttcacgccattctcctgcctcagcctcccgagtagctggggctacaggcgcccgccaccacgcccggctaattttttgtatttttagtagagacggggtttcaccgtgttagccaggatggtctcgatctcctgacctcgtgatccgcccgcctcggcctcccaaagtgctgggattacaggcgtgagccaccgcgcccggccgcttcttatcgttatctcttggaagtttgtaaacatttgtgacacgtcgttgtgtatagttaatagttatgaactcctctgtctcgacgtaagctagtcccctccgtcttctccaaaatacagagatcaggatcgtatgcctcctaccgtggaacagttttcctgaagccactgttatcttttttctttctttctttctttttttttaagagccggtcttgctctgtggctcaggctggaatggagtgcggtgacacaatcatagctcactgctgcctcgaactcccagtctcaagcgacctgcccacctcagcctcccgagtagctgggactagcaggtttccgccaccaaactcacccaatttttgtattttttgtagagatagagtcttgctatgttgcccaggctggtctcgaactcctgagctcaagcaatccagctgtctcagcctccccaagtgctgggattacaggcatgggccaccaaaaccggcctcaataatctgttctaatgttcagatctatgttcatgaaataaattatatatttcaggggggcgtgcaatttaggtccagcttgcatgagtctctgctgtacttgaggtcagctgggacagccccagggctggggactggaatgatcaggtggctccctcattccccagtctggcattgggtgctggtgtcagctccagcacctccagatggcttctccaagcggcctgggcttcctcacagcgtggcagctggggtccaagggatgtcctcagaactgaaccagcatcttttactgcattgtgtctgtaggggcagccacaagtcctagggacaccacctctaggggagattgtggcaagattctggaagaacatgtgggattcaaaataccgctgtgggaatttttggaaaatccaatctgccacagtaataatctcccatcctgttaattcatccttacctcactctactttgtattagtcatttttatacttgcctaatctcccctgatatgcagtaaacttctagatagagtggtcgttcttactttttctactatgtacaatagcctacaaaatgattgacttaagtgcagttttgacactcaattatgagctaatttcatgaatgcaatatcctttcaataaagatgcactaaattccagcctgggcaacacagtgagaccacgtctctatgaaaggtaaaaaaaacaaaaatcagccgggcatggtggtttgcgcctgttttcccagcttttcaggaggcctcaggaggc

SEQ ID NO: 914058 - DNA, 4001 bp, Homo sapiens
ggtaagtaacccatcgtaagtaagcatctgtagaggttacttactgttttttgttggtttgtttttttgagacagggttttgctctgtcatccaggctggaatgtgtggcttaattatagctcacgcagcctcaacctcccaggcccaagtgatactcccactcagcttcccaagtagctgggactacaggtgcacgccagcatacttggctaatttttgtattttttttgtagacagatctcgctgtgttgccaaggctgatcttgaactcctggactcaagttgtcctcctaccctcagcctcccaaagtgttgggattacagatgtgagccaccgcgttcagcctacttattgccattttgattatttgggatcccagaggagatgaagatgccactgcgggacaaactagtaggccaccagatggttgaattagaagtactgtgcccagatgccgggggcaatggcttacatctgtaatcccagcactttgggaggctaaggtagggggactgcttgaggccaggagttcaagaccagcctgggcaacatagcaagaccctgtttctacaaaaaataaaacacttagctgggcgtggcatgtgcccgtggtcctagctactcaggaggctgaagtggaaggatcccctgagcccaggagtttaaggccacagggagctatgatcatgtcactgtactccaacctggatgacagagtgagatccgacctcaaaaaaagaaaaaaaaaaaaatgctgtgcccatggcttgccactctggcaatacttacaatgtttactgtggttgctgagattgactggcaggtctgtacctacccatctgtgtccccaacaatcctggcatccctgattgaggaagaaggggaggaaaggagctggggacagggcagaccacatacctggttgtttttccctttttgatgacatttgctttgcatctctggggaggcttcccagtggatctagtggaggcaaagggaataggctgatgcactgaccccaatacctattactcataggaccaggcaataggaccccacagagttggggaaattggggtggggatcaatttcaggaggaacactgaatgcaaggaacacctgggctgggaagggcagtgctgtctgaccagggggctatggaaggctggcagggttttaaggaagttgaggtcccagggagctggataagcatagagaccctctgggtggtccaggttccagggcctgacctctttgtgagccccatctcctatgtcgttggcactgagagagaacagggcacctcgggctcccaccagcagccttgctgaggcctcctccagcagcagtgttgagtagttctgggcttggcccttgaagtgccgggtcccagagagctctggggagagcaggaacagtgagccctagttctggggtgcctccccacccccagccctggcttctgctgccttttgaggttgagggtctaaccttcatagggtatggtcatccgaggggtggcatctagttctctagacggtctccgcagtgagggtcctgggactgcagttgctgtgaggatgctgaggaggaggggccagagcctcccccacatcttcctggggaggcccagactaacaagacccccaaagggagccagagtcacaggttgtgggggcggggaatgggaagcacagtcacaggggtcaaagtccaaggaagtcacttggaaggtcaggggtcataaggtcataggagtcaaggaatcatggggccatggggggtcctggaatcggggggacatggagtcacagggttgtgtggccatggaatccccagctaagaggtcagaaggagggagggatcacatgcctttctgcatcaaatgcaaactccatggtgagagggagttgtgaagttctagaggggttgtaggttactgatggggtcaccctgcccccgacagtagagctagtcctggttttctgaggtccgttttctgaagaaaaaacggggaaaaaaaagccctttgatctgtatgtgggtggaagatggatggcgttacccagacttcagggggcactgaaagaaggaggcccagcatccacagaacgcccacgccaggatcgactcacaatcattctgtctatcgctttgctctgatgcaggaggctggggtggaacttaccttccttacaagaccctagatgcccacaacccgaaacccaaggtcatgaccctcttctggccaagtcagaagctccactaggccctcaagtcaaaggagctggggttcttggagagaatgcctgcttctcccaacaatgagatgcaactcggtcagcagctgcccctgctgcctgcgggggtgccttatgcaggagggcctaaccagagaggtttaatggacctttgtttattttgtcctgctttccctttgttttttcttttccctggcctgagagctccctctggaatttctctttaattataacttcttggtattcctctccaagggggtgcacatctctgcccacgccagtctgtattgcaccctctggctaggcatccacacgtgtccctatctgcaagtaggcattcacaggcattggggtgggtacctaggatccccctggttgcacaggtataatgtctgtgcagaaggctgtagtgtgcaaggccagttgagacataagcaacgtgaagaaggtaaatgatgggatccctgagcccttggcccctcccgacacatcttggaccctccctcaagccaaccagttggggatgggatgggggtgggtggcaggcctctcccaacccctgtaacaggcctcctaatcaccaaggggttccttgaagagttcctgggctgggtgaggtgtggagagacctaatacattccatctcatcagccacccacaggcagggccagagggtgccactggtgcctcctctcccaggtcaaatattaactatctggccttggaaagaggggaggaatcaggaactggccagagggataacaggagcaattattcaagaggtaaaggtcagcactgcaggggcagagccctgaggggtagagtcaaatatgaaagggagagaagaggattccctgaccctgaaagggcataggctccctgtttgggatctgggacagcaggaagcttcaggcaagccggccatgccccacccctccctgtggaggcacacctgtttacctttgggacctcctatttgctcagtgcaaaaggcatgtgtgtggggagcactatggctaggaggaacatgccccaggttagaggagccactcagtgtggtgcatgtcacacttatagtttaagagtcacatgggtgactattaggaaggtgatatacatgcacatgggtgcacacacacacacacacacatgttcacaaggaggactgtgaacacgtggattcacaggggtcattcacacatatactcacagggagttttgtgcacacatatgctcatacagagggccacagccacaggtaatcatacatattcacatgtgacgttgaatttacatgcccatccattcagcaggtcacacagcctcagacattgaggagagataaacccacacatgtgggtttgtgtcaaggactgtgcacctattcaacaggagggtcctatacatacacatgtatgtgtagggacatgcacacaaacccattgatatagtgggccaggcaatcatgttcacagaagggtcaagtacatgtgtgctcacacgcagttcttgaacacacaactacatccatgcagagacaagcacacatgcatacaggggtccagtttttgccataggcttggaggctgccagtgtccactggggtgagatgcagagcagaaccctgcctctgttcctgaaagtcccaattctaaggcccaatttcaagtgtgtgtttgtgtgtgggggtggtgagggggttgtgtgtgtgtgtgtgtgtggtgatgggggaggcttc

SEQ ID NO: 914059 - DNA, 4001 bp, Homo sapiens
aaacaccccaagttttaaggtcggtttcccctataaaatttatgattaagaacataattcccatttatagagttttccatcccttgggacgcacatcgctcatataaatctcacgaagcccgagtttgggcagtaatccaaaccgtcttcacaaaaacacggtttgggatgagcaatgatttcggtgggaaacgtaacaactgagcaggagtcagccttcgaacacgattccaagaagtctccctgcccaaaaagagcaggcgctggccgcaagtgacaagagacgagaattttgaagccatcttagagttatgggaaagtttgaataccactttgacttggaaggcgttttcaacaaaaacaacaaagtcctttcctcaaaaaacacctcgcatttaacacagcctcacccctaccaggaaaaaaaaaagaaaaagaaaaaatccaactcacgaggcatccagttattttcctacctcctatctattcctctcctggctcccaaaaaggtggggaggggaattgtgtggctatcacttccttttaaattactatcttctcaagagttttaagggtggaaaaaagtttaaaacaccttgtatcaggaaggcgctcagatttaaaattccaaatggtactaaggacacaaatcagcctcacatcctaatgaaaaaagtactagattcttacatttttggagggcatgggaagggggagggggttctgggggaaatgtgcagtgattagggaaccagggggatccatttgcattaataagggacggtgcccggcgaccccgcagccacatgtttacgcctttaaaacaatggcatgaatatttaaagcaacgtttagccctttccttcccgggcacatttccatggtttggtttttttttttcttccaacgagcgtggggagccggggagccggtcagcggggtgggcccggcgcgctgccccgccaaccccggacctacctccccgccggccccgcacaatggggcgcgctctccaggacgcccgcgtcggaggcggccggggaggggagcaaggaacccggggacaccttcgggctcaggctcaggctcaggccctcgccgccgcctcggaaggcccagcaggcccgggctgcgggccggcggcggggcggaggcggcagctcggggccccggccgggccatccctgttcgggccggcgggaggcggcgggagccggcgggcaccgcgcgtgcggcccaggagccggggaggacgccgggacgcacccgccccgggtcgacagggcccgcgcggagaaaaggggaggcggggaggccccggaggcaccccgcgaccccaggccggccgctcccgccgcgcgcacgggccgccgccgccgccgcgcaaaaatgtcggcgggcgaaaaaattaacccctgcgtggccgccgccgccctcccctccgctcctccccgccctccctccctccttccccggccccgcgcggcggcggcggcggcgcgggcggcgcttcttttttaaagcggccccaccaagcccggcgctgcccctctccaggcagggctggcggggccggcggcgcgcggctccccggcggtcccgggcggcccggagggggatttgcaacggccgccgcgggcctgcggacccagattcccctttaagcctgcgcctcccccccgcgccgggcccgccgcttaccggctcgctttgcgccctccgcctcctcccgaaaacgggccgcgggccgctcccacaatgcaccgggcgcggccgggctcccttaagcgtcgcctgaataaaaatgccgcgcccggcggcggcggcggcggcgggggcccgggcccgcgcctgggcgccgcgggggctcgcctgcctcggcgcggccctgcgggagccgggccgccgcgctcccgccggctgggcgcgcgggggtcctttaaggccggccacctccctttaagaggcggccctggctgctgggtggcggcgtgcggcccgggaagggggcgggggcgccgtgcagccccgagcgcggcaatgattggtctcgggggaggggtggggggttgcaaacccgaggagcggtggcatccgttgcatgatgcaaaaaaggattgatttcaaaagttgcgagttgcattggcagccgcccttggcgcccgggccacctttttcccgggccccgctgcaagggccgggaacgtttccgccacctggccgggctcgaccgcgcggcgctctgcggggcgctgtccccgctccccgagtgcgcagcggagcgtcctggaagacaatgaccatgggaacaatttgcacaggaggctaggagcccaggaaaagccgcctgggcgccaggcagaggttttttgaaaacacaaacggcgcgttagatgcttggggactcccagcatctgtccttcctattgtttagctcggctccggagttcacgggagcctcgtgaaatgtggagacgtcctgcaaagtttcttgaacacttcatgtgcgtggtaggaagtcgaggaaaaaggtttacggttccccgctggttgcattgtttgtcctgcacatgttcgagcgaacatggcagccgcaaccctggatgtgttcgaattgacatcgaggggggagcttcacgtcgtgaaataacttttttctgggctttcgagattctaaagcattgctgatgaaaataaaccaaatactttcagatatcgtttagggcttctctctaaaacagcagtgtgcaggaatgccgatcgaacttttctaggcagtaggtcagcattttccaaatgttatttgggagcagaaatgttttgggtcactggaccgtgctttacgtggcacggcaggttggcacgctacgcagatgcccttttcgttaacatttccgcttgccagttgctccgggttttaatcctgggctggatgcagaagtgatgccacctcgaagacaggctgctcctgtctttgtgtactttcttcataccctgtagtaagtttgcaaagaacgtgttagtctgcattcttttattttatatttatttatttatttattttgagacggagtcccactctgtcgccaggctggagtgcagtggcgcgatctcggctcactgcaacctccgcctcctgggttcaggtgattctcctgcctcagcctccccagtagctgggattacaggcgcctgccactggaggatggcttctcccagaggggaagacagggtcacggttctcattaagagggtattgtactagtcaagcccggagatgtacttgaactgaaagcaaggggaatgcagcccagggaagggatttggtgtgatttagcacgtaggaaggagaggaagaaggataagatgacccccaggtttccagtttgcgggggtggggggtgggggagggaatgaggagcgatgctaataatttatctaagaactgctgaaaggcaaacaagtttcggggtgagttcagctttggaaatgttaaatctgaggtctgccggatggtgtgggggtggggctcagagttgcaaatctcaggtctgccggatattccagaccaaagttaatagggaaacaggtccggaatttggtgtggggatggggctcagagatgcaaatctgggtgccatcagcatgtaaatggtgttcgaagcctccgtaagaggtgagattaaccccgaagggagagctcaggaaaaaagtgaaagagaccttggacagagctctgcagaacttggaaatcaagtggctgggcgggacagaggccgatccccgctgcgtcggtgggaggccaccatcctcagaaccgactcttcctccccgcctccacccaccacgagctcaccgggaagcagttctctgccgcagaggccgtaagccacagatgccttacttcatccagggccacactacagccttggcccagatcatctggcagagtcatgcatccttttctttgccggtgatgagagcttcttccttgggtactg

SEQ ID NO: 914060 - DNA, 4001 bp, Homo sapiens
gacacgctagtaggtctcccagttcccttctctacggtgcaagagtggaggggggatggagagtggtgggcagcggcaaccgagccagatccaagaggggtcggcctcgtctaaattggtttcccaccaatggcctcggatcagccgcggctgtgctgcgggagccctcaggacgcggctggggttggtgcgcggggccccggaaccccaaacccggctcggttcggcaaggttcagggagacaaggtagagaaggctggggtgagcgagaagtcgggcggccgatcgtcagggccacgagcctcgccttgccttcttggaatcccacccaactttaaaggcccaaagatcctgaaaattccgaaagcgaaactgcgagctggtctccagaagtttgagaacggtctcccaggctttccagcgtcgtcccgggattctcggacaccacaaacgccatcaaccacgagcaccggtgtccgtggctattgccccgaatggtccccatccgcgtccccgggaactccctcggcttttcgcgcatccaggtccccagccccagctactggtgcgccccgagcccctaggtgccagagcggtggtcggccgggctcctgcccagtctcggctcctccctcctccccaccagaaggaaaaacttgggcccttcgagaaccctgtggaatgttctttgtaatcaactgtacatccgcttccacggcacggcctcgtgcaaaatcgcgggtttcggggccttggagcaaattgcgcttgtcagcggcgacgtcaggaggacaaggggaggggttcgcggctgaaactgcagcttcgcagcacagagccattttaggctgctccccacctcgcggggcccatgggaaagccggccccgggagggcgcgcccaaacgcaggctggaggagccacggacgcgtcctggccggcgtgtcgccatcgttcagcctcgctgcccaggtgggaggggtcacctgccgcggggtctccaagccagtgccgcttgctcccggcccccacccactgacagcacggcgtccgagtgaccctgtctagcctcgttctgcgctcctgcaaaccacgttgctgcgctaactacaaacctggccaacatgtctttgtaaccctatcatttaaaaacgcttccaggcacctggccgctgccagatcaggttcgcgggcccggaggaggtcctcccacctgcccccgccagccccggggaccgtgcgcggcctccgtgtggcccccgcccacgaggtccctcgggcaggaaccgccgcgcgacctctgttcagcggccgcgtcctggccacgggcgacccctgtcgggaaccctgttcccggctaagctgcgttcccgcattccggtggctctcacccgagctcgcgtttgctggctttccctctggctcctctgcctgaccccgattttgtctccgaactccactcccagatcctccccgccctggaacgccgacctttcccccgcacttcgccgcccactcacatcccccggcgactgcccggcctccatgcccgccaagacaagaagatgcccctctccgatgcgccgagagggttcctaagccgagcaagggacaatttcttccccaaacgctgtccccatcccccaccttccctagagcgcgaaacccaaaagtaaggaaggcaacccctcgcctcgaccctacgtgcttgtctcccagagccgcgcgctcccgcccttctgccccaccccaccaccaccaccaccactttggtcttctccaagcttcggtcccggtcccccacctcccaccccagagcggcgtggaggaaagcaggagcccactattaagtgcagcgcgccccctgcacacacgaaatccggctggcgtctgcagcccgattgcacccaatacccgggacagttagtccttttaataagcacctcctcgccccacctactcggggatctacccgcgcaggatccagcacacacaaggcgagagctagctcgtctcctagaaagacaaaataaatcactccctctgccctcatgtactttacaccacgtgtccgcagtttgtcacgtcaaatcatggcagggtctggttccaagacgcacacacacattcggggtggttctctttgacacacacacccaaaaaaactgcgcacacgcaggcctgcacactaatccacaggcacacacgacagttgcgtttcggtgccctggtccgggccaggggcacttctccatccctttcccccctagcaatggacttgacacacagactctaaccacggaaaaaaaaaaccggacagcccattccttctttttttccccacttaattcgctaaagcgcttcctggggtagccaaagagagtcgaaactaaggggtggaaacttcagctgggttttttcccacctcaaaacctttattttcagtttttaaaagccaccttagcccgccatattgaaactggcacggtttctaaagactccttccccgcagttgtggcgcttccaagaaaacacgagtacggatcaggctctggatgagtgtccggccaccgagaatcagccacttcccaccctccaggatcccccagctccctccagccccttcccaccgcccctggtcaaaatcaataaatacatctcgcagttcctacagttgcattttggcggatttctgcaaaacatacacacacatacacatacccacgcacgcatattaaaaaataaactccagaaccagctcaagtcagcaattttgaaagggggtcgaataagaggagacaaccggaaagcccctaagtgacaggatattactttaaagagaaaataatgaacaaaaagaccatcctcgctggagcacgctccaaaactactactgccaattttatttcagttgctcaggcaaatgtttccaagggagcgattccgaatgtctgcacgatttttacccccatgccggtctccgattccccgtcctcaccatctttttctcccacccaaaccaaaagaaaggggagaccccagcgcggaggagacgcgggagcgcggggtaggtagcagcggcggctgcgtcgctaaaatgagtgcagaaacgaggaaggtgggcggcgggaggggacaggctgcgcccggggaaggaggacactttgcaactccggacggactcccgcacggctcggcttttccgagcccggagacgcaggcgaaggggacccgggaagcaaaaatgacaacctggagcgcacagaggagtttgaagcttcgctcaagtgcagtcgctttcttctcctgcccttctctttcgctcccctgcaccctccccagccttcccccacccgccacctccaaccccagctccctcaggcttccttcctttttttttttttccttttttttcctaggctggaaaaagcccctgaccagcgcactcaacctgcgggccgaagggctgctctccggccagcctgggcgccggggacagcagccggcgcggcgtcctacctggtgaagttcgtcctgccctcggcgtggacccaggccccggtcgccgcccgggagggcaccggcctcgctcgcttgctcgctcgcccgcccttgcccgctcgctccccgcccgccgcctccctcgcgcgcccgctccggtcctccggctcccactacagctcattccaatatggcatcctctctgtgcgcatgctcggcgctcttttttttttttttttttttttttttttaagattttgtgtgtgtgtgtatgtgtgtgcgtgcgcgtgcagcgaactccttcaacgaccttttccagcgcttgcaaaatttcttaagccaattagcctgcgggacgtgatcggctccttccccagccagctccgcgccattccctgcgcctaagcaggcgggcacccccaggaccctgggaccttccacgcccacgcggcctcctccccaccgcgctccccttcctcctttttgtgagctccctccat

SEQ ID NO: 914061 - DNA, 4001 bp, Homo sapiens
gacacacacacccaaaaaaactgcgcacacgcaggcctgcacactaatccacaggcacacacgacagttgcgtttcggtgccctggtccgggccaggggcacttctccatccctttcccccctagcaatggacttgacacacagactctaaccacggaaaaaaaaaaccggacagcccattccttctttttttccccacttaattcgctaaagcgcttcctggggtagccaaagagagtcgaaactaaggggtggaaacttcagctgggttttttcccacctcaaaacctttattttcagtttttaaaagccaccttagcccgccatattgaaactggcacggtttctaaagactccttccccgcagttgtggcgcttccaagaaaacacgagtacggatcaggctctggatgagtgtccggccaccgagaatcagccacttcccaccctccaggatcccccagctccctccagccccttcccaccgcccctggtcaaaatcaataaatacatctcgcagttcctacagttgcattttggcggatttctgcaaaacatacacacacatacacatacccacgcacgcatattaaaaaataaactccagaaccagctcaagtcagcaattttgaaagggggtcgaataagaggagacaaccggaaagcccctaagtgacaggatattactttaaagagaaaataatgaacaaaaagaccatcctcgctggagcacgctccaaaactactactgccaattttatttcagttgctcaggcaaatgtttccaagggagcgattccgaatgtctgcacgatttttacccccatgccggtctccgattccccgtcctcaccatctttttctcccacccaaaccaaaagaaaggggagaccccagcgcggaggagacgcgggagcgcggggtaggtagcagcggcggctgcgtcgctaaaatgagtgcagaaacgaggaaggtgggcggcgggaggggacaggctgcgcccggggaaggaggacactttgcaactccggacggactcccgcacggctcggcttttccgagcccggagacgcaggcgaaggggacccgggaagcaaaaatgacaacctggagcgcacagaggagtttgaagcttcgctcaagtgcagtcgctttcttctcctgcccttctctttcgctcccctgcaccctccccagccttcccccacccgccacctccaaccccagctccctcaggcttccttcctttttttttttttccttttttttcctaggctggaaaaagcccctgaccagcgcactcaacctgcgggccgaagggctgctctccggccagcctgggcgccggggacagcagccggcgcggcgtcctacctggtgaagttcgtcctgccctcggcgtggacccaggccccggtcgccgcccgggagggcaccggcctcgctcgcttgctcgctcgcccgcccttgcccgctcgctccccgcccgccgcctccctcgcgcgcccgctccggtcctccggctcccactacagctcattccaatatggcatcctctctgtgcgcatgctcggcgctcttttttttttttttttttttttttttttaagattttgtgtgtgtgtgtatgtgtgtgcgtgcgcgtgcagcgaactccttcaacgaccttttccagcgcttgcaaaatttcttaagccaattagcctgcgggacgtgatcggctccttccccagccagctccgcgccattccctgcgcctaagcaggcgggcacccccaggaccctgggaccttccacgcccacgcggcctcctccccaccgcgctccccttcctcctttttgtgagctccctccatacatgatctgcagaaagttcccatcgcgggcgtttccgcacacccctccgcaaggacaactgggcaaactcccgtttccctggctgcggttcgtgagctgggtttccaatggctcagtcgaccgtgtgcacaaacttgcgctttatccgccggggatcgctgggagcggagataaattcaatccccagggcaatcttggccccgcccgccccaccccatcctgtgcttaaatagagcctttcttgaagctgcgaacatttccaggccccttgggcagggctggaggggccgaggagagctattcgagggaaaggtgccccgaggggcaggaaattaagttggggctgcccgggcgagctgccaggtagccgtgctcgccacggcgtctcatggggcacctagctagtggcgggcctcatagggcgggaaaagaatcgtcgctcacaccccagcaaaacgtggccctcgacggtccgttggagagccccggcggccgtgagccccgggcagggctggacgtctgcggagccctcgggcactttgtcccgggcgcctggggaggaacgcggagctcccagggccttaggtgcaacggctgcgcagagcccaaacgaaatgtccccagtgcggaaaagccggtgacgccctggtagcaagaccaagagcttccgaagaacgctgcgcccttaactagggggcctcgcagagatgcctgtgtgggcctgcattgtatatttctgcgaaatagcgaatggacacgtttgctcagggtttttatggttgccaaagggggtaaaattacccagtcccccaaatctgtgtcccatgaatccctctcatagtacccctctccagggggccaagaggtcctccaggtccccgtgggttcgcagctccacccgcccttcctcgccctgcatccctaaggagaggtgtccgctctgaagggctaggggccagccatggagtgaggggaccggggctgaccacgcgcggcacagacagaggtcctcaggcgggccctctcctggacggtggggccggagctgatctagaagaaatacggagggacgtgccgagaagccgctctccttcgccgcgaccctggagagcgcctctccacccaaaggatctgccgagctgagagatccagggcgggcgtccgcagccgtgaggccccctgcgccgccagtatgggaagatcctgcctccttacaccttggagaacgctgggcgacgactaaagcgccttccgccggcctgtcactccatgtgacacaggagccacgtgagacccagaagagtccagcgactcgccgcgcggcgcactttaaactctagcctgagtctgcgacccctccagctctccagtccccagctgttggggacatcaagccggagccctgggctctctgccctgtgggtcgctgaaagcagagactcctcaaaccaaccgaaccgggcgcattaaccctctcgcctgcaccccgctgcctcccggttgagccccgaggcggctccaggtagaacctgctggactgactgcggcgtccagaaatctggagtgtgggctccagacactctccacggtttggccccgggtctcaacacccaagtcgcctcttctggctccttcaccacacagcggggcctgtggaaagggaggggccgagagacccgtcggcgcaccactgtcctcgaggggtccccaccctgtgcactgctgaagcgcagggcgcgccgcggcaggaatggccccgagtgcggatcccctgccctgagcctcccactcttggcccgcgctgcgcctacccagtggccctggccccgcagggcgacagcggctgctccctcccatttgcgtcccagaccgcgcggcctcgcttagctcccgggagccgacaggcgcttgccctggtgccagcgcagggcttcccgggggcttggggtaggggtaggggtgcgggggggaaggggagaacgtaatttccttctgcaggagtcgtggagacgtgagctgcaaccagccaccgcgctctctccaggcttgtttaccagttttaggtcatcattgtgcacgaaacattctttcatccaaataaaagcaaatgcagaagaacacctgatcccaaacagtgtatgact

SEQ ID NO: 914062 - DNA, 4001 bp, Homo sapiens
tttatgtaaaaataaaaattatgcaatggtcctgaaattcttctcacctttgatctatacattttgactagttttagcctccgaagaaggtcttctttctcctgaacctgcttcaccaatttggctttttcagcgtttaatctttgtttaggaagcttctcactcacaaactcattttggagagcactgcatgatccagaatcaagtgactgagattcacagacattgagattcttcaaagtatttttcaaatttgtattttcttcaaattcactgtctatatgtttaaaactttcttgaaattccaaacagttttcctctgtggaagatgctggtttctctgaaaaggtctgatcattttcttcactctctactttaagacgtttcaccacattgtaagaggaattaaatgaaaatcttgttttccttaatctttctctaagtgttgcactcataggctataaagagcacaaaacattaaaaatgtgaatcaagaaaaacattcttaatgtcaataaatcaccagaaataaagtccttccatttctatgctagacaccactagatggctttctgtctccacatctaaagaaggcatcacaaaatgactttaatttctggaagctccatttgttttatttcctttttacttcagcaagatcaacacctttccaaaagtgttgagaagtttatcccagtaatcaaggaacatttgttcagtaacaagcacatgcctgatagtactccaggtgcttcagaattacagagtaaggaaaagacctagactctgccactaaagaccttcataataatattgcacagatgcaaactttctccatctggagtattgtaataacctaatctgaaactaactgaaatgaattcattcaagaggaaaatatggaagggggctggtgggtgtcatatatgtcaccttagaagaaaaacaaaattatttaataaaatgtctacttatttatgctacacattatgttaattaacaaccttccgtagaatttaaaccaccactgccacaatacttagaaacacataatggatccactggaagaacaaagattttcatacttgttttcgggaactatttgtatagggagatgatggattcgcagaggcctgaggagtgctaggtaaaaccacagctgagtctgacggactttccatcttgaaagtgaaatcttggtttttctctaaaaaagaaaaattataaaataatcgaattaaccacacctctctatagtcgacttttatcaaataatatattgtattggtgtacaaagcatccacaagtaagccagatatttcttctaatttcactttgtaattcattcttgctctttttgcagttttccatttaccttcccacatagggaccactaagtttttcatgatacatcaaccagctagtatctcatagtcacaagactctccttgttttcgtttcatccaccaaaatatattcaaattctgccttggaagtagggaagaataacagctttagataatcaggaattctttattatgacagcttcataattcaagaagctatagccgaaaccttgactcaaaaacaataggacctgaatgtcacccatcctgaactctacaagctgtgactagaacccgttaccctgccggcccgaggcataagaaacacagcggagacgcatttaagcccgtctgtagccttttagtttaagcggccaacagggactgaaaaggagagtggactgaaattgcttcctccgacaaaggcattaacttttgaggggtaaactaggggcgggagtcgtcccctccttccccccgttgcagaaagcccactagttccccggagaccccaggcataaggtgaggttgagttccccagacccggaaagggagctcaactcgactccacagccgactcccggggaagcccaggtgtcagggatccccccttcccctcagcagggtacctccctccgccattcccagcgagagcaaaaaagcgcgcgcacctgcggccgtaaatcgatcctgtggcaggggcggggccgtgcggtaggcggaaaagatgcgcaattggccagattgcctgacgcgcgaggcgccgcttcactcagcgactcagagcggtgggactgcgcgcgcgcctccgccagcgggtggttggggcggggcttggcccacacgatgggaggcccagacgcatgattggcagaattaaccggtgcgcgcggctctccccgcccagcgcccgagagcagcgtgagtgcgcgcgcgcgcggccgcgatccgcagcaggtcttcggggcgggcgaggctgagcttcggaatgttaaaccaatcctgaggggggcgcgcttccgttcgcggcttctgttgccttattttcaaccgccttcccttcaggcttccttgtttttgtgcgtctgtgaagtgcgcctgaaagtgcctctccccacccccgccagcccgccgcctccattctctggctccagtcagtctcctctccctgctagtcacagtgaaggctttactcagacgtggggcggccagaagccgcacggctggctgcatgttagatttacagcttgtggactccccagaggcagagaccacaaaagaacagcgttggttgggttccagcctattccagcgtggtggttccagagaccacaaaagaacagcgttgggttccagcgttggggtccacatttcaaacatgttagaaatctatccgagagtcccggcactttagctgagctcatcgctagcttttttggctgccgcaaactcggcggtcccgtcgcgaggttttttgttgttgttgtaaacaaaaaaccgtttctgtacctcagtatgcaggctccttagcgtgacctcaaatcttttactcaaatctgagggaaaatgtagcccaaggaaatttgttgtggcgcaacacaggaagcagaacaatcactacatgagattgtgtcggtccaaaattcacgtttgagaccgacagggcccttgctggctaccgggcagcagcatcctcagtcgagaaaatcccccccccgcgccccgcttccagtatggcgaggttctgttgctacgcgacgacaaagttagctacattgggtggagcactgggtttagtgaaagagttgagtaacttctgagtcacgtggaagttgggaatttccaggggccagtgttttcagtcctcttattgaatggccattttaaacattgatatcgtctctttactattaataacatctgacagtagtggcttagaagtggccaaaagggagttacctgagtcttaagcagtcaggtataataattacagaacctgaggactacctaagggaatgattaggggcgtacacgttacagtcaaattgtctaggttcaaatcctggcaccatactttatgtgcttcttaatgaggtgattctgtgcctcagtttcttcacctcttaatatgggattggagaattaaatgagaactggtgagaggcagctggaacagagctaggtatctaggaagcactcagtagttattttatatatgcaagtgtattcaccattccctaatggatttaagggaatgtatcaccttcagtttcaccccttgatttatctcccaccccccaaaaaagcacatatattttaaaaagatgctgtgatctgtaagatcccacacaatataaaccataaatagcagaaaatgtagagcctcacatatgattaataatacatatttcactcctaaaattttttaaaattacataagttaaccccaaggaatttacaaaggggaagagagaactcatgattttgtgataaaggtgttactcacctcaccaagctgcaggtctcagtctgtacatttatttctccctttactcatccattggcatcagttaatctcaaagaaaaagcagaatgatttgtcctgacactagaagcacagtgcagactctgcatattctttatacctcccggcat

SEQ ID NO: 914063 - DNA, 4001 bp, Homo sapiens
caccaatttggctttttcagcgtttaatctttgtttaggaagcttctcactcacaaactcattttggagagcactgcatgatccagaatcaagtgactgagattcacagacattgagattcttcaaagtatttttcaaatttgtattttcttcaaattcactgtctatatgtttaaaactttcttgaaattccaaacagttttcctctgtggaagatgctggtttctctgaaaaggtctgatcattttcttcactctctactttaagacgtttcaccacattgtaagaggaattaaatgaaaatcttgttttccttaatctttctctaagtgttgcactcataggctataaagagcacaaaacattaaaaatgtgaatcaagaaaaacattcttaatgtcaataaatcaccagaaataaagtccttccatttctatgctagacaccactagatggctttctgtctccacatctaaagaaggcatcacaaaatgactttaatttctggaagctccatttgttttatttcctttttacttcagcaagatcaacacctttccaaaagtgttgagaagtttatcccagtaatcaaggaacatttgttcagtaacaagcacatgcctgatagtactccaggtgcttcagaattacagagtaaggaaaagacctagactctgccactaaagaccttcataataatattgcacagatgcaaactttctccatctggagtattgtaataacctaatctgaaactaactgaaatgaattcattcaagaggaaaatatggaagggggctggtgggtgtcatatatgtcaccttagaagaaaaacaaaattatttaataaaatgtctacttatttatgctacacattatgttaattaacaaccttccgtagaatttaaaccaccactgccacaatacttagaaacacataatggatccactggaagaacaaagattttcatacttgttttcgggaactatttgtatagggagatgatggattcgcagaggcctgaggagtgctaggtaaaaccacagctgagtctgacggactttccatcttgaaagtgaaatcttggtttttctctaaaaaagaaaaattataaaataatcgaattaaccacacctctctatagtcgacttttatcaaataatatattgtattggtgtacaaagcatccacaagtaagccagatatttcttctaatttcactttgtaattcattcttgctctttttgcagttttccatttaccttcccacatagggaccactaagtttttcatgatacatcaaccagctagtatctcatagtcacaagactctccttgttttcgtttcatccaccaaaatatattcaaattctgccttggaagtagggaagaataacagctttagataatcaggaattctttattatgacagcttcataattcaagaagctatagccgaaaccttgactcaaaaacaataggacctgaatgtcacccatcctgaactctacaagctgtgactagaacccgttaccctgccggcccgaggcataagaaacacagcggagacgcatttaagcccgtctgtagccttttagtttaagcggccaacagggactgaaaaggagagtggactgaaattgcttcctccgacaaaggcattaacttttgaggggtaaactaggggcgggagtcgtcccctccttccccccgttgcagaaagcccactagttccccggagaccccaggcataaggtgaggttgagttccccagacccggaaagggagctcaactcgactccacagccgactcccggggaagcccaggtgtcagggatccccccttcccctcagcagggtacctccctccgccattcccagcgagagcaaaaaagcgcgcgcacctgcggccgtaaatcgatcctgtggcaggggcggggccgtgcggtaggcggaaaagatgcgcaattggccagattgcctgacgcgcgaggcgccgcttcactcagcgactcagagcggtgggactgcgcgcgcgcctccgccagcgggtggttggggcggggcttggcccacacgatgggaggcccagacgcatgattggcagaattaaccggtgcgcgcggctctccccgcccagcgcccgagagcagcgtgagtgcgcgcgcgcgcggccgcgatccgcagcaggtcttcggggcgggcgaggctgagcttcggaatgttaaaccaatcctgaggggggcgcgcttccgttcgcggcttctgttgccttattttcaaccgccttcccttcaggcttccttgtttttgtgcgtctgtgaagtgcgcctgaaagtgcctctccccacccccgccagcccgccgcctccattctctggctccagtcagtctcctctccctgctagtcacagtgaaggctttactcagacgtggggcggccagaagccgcacggctggctgcatgttagatttacagcttgtggactccccagaggcagagaccacaaaagaacagcgttggttgggttccagcctattccagcgtggtggttccagagaccacaaaagaacagcgttgggttccagcgttggggtccacatttcaaacatgttagaaatctatccgagagtcccggcactttagctgagctcatcgctagcttttttggctgccgcaaactcggcggtcccgtcgcgaggttttttgttgttgttgtaaacaaaaaaccgtttctgtacctcagtatgcaggctccttagcgtgacctcaaatcttttactcaaatctgagggaaaatgtagcccaaggaaatttgttgtggcgcaacacaggaagcagaacaatcactacatgagattgtgtcggtccaaaattcacgtttgagaccgacagggcccttgctggctaccgggcagcagcatcctcagtcgagaaaatcccccccccgcgccccgcttccagtatggcgaggttctgttgctacgcgacgacaaagttagctacattgggtggagcactgggtttagtgaaagagttgagtaacttctgagtcacgtggaagttgggaatttccaggggccagtgttttcagtcctcttattgaatggccattttaaacattgatatcgtctctttactattaataacatctgacagtagtggcttagaagtggccaaaagggagttacctgagtcttaagcagtcaggtataataattacagaacctgaggactacctaagggaatgattaggggcgtacacgttacagtcaaattgtctaggttcaaatcctggcaccatactttatgtgcttcttaatgaggtgattctgtgcctcagtttcttcacctcttaatatgggattggagaattaaatgagaactggtgagaggcagctggaacagagctaggtatctaggaagcactcagtagttattttatatatgcaagtgtattcaccattccctaatggatttaagggaatgtatcaccttcagtttcaccccttgatttatctcccaccccccaaaaaagcacatatattttaaaaagatgctgtgatctgtaagatcccacacaatataaaccataaatagcagaaaatgtagagcctcacatatgattaataatacatatttcactcctaaaattttttaaaattacataagttaaccccaaggaatttacaaaggggaagagagaactcatgattttgtgataaaggtgttactcacctcaccaagctgcaggtctcagtctgtacatttatttctccctttactcatccattggcatcagttaatctcaaagaaaaagcagaatgatttgtcctgacactagaagcacagtgcagactctgcatattctttatacctcccggcataagggcgagttgtttttatgagtctctaaaatcagcagctcccaaatccttttaccgttacaacctaagcttagagctgtgtttttcctggctgcagaaaggaaaacaacatt

SEQ ID NO: 914064 - DNA, 4001 bp, Homo sapiens
agccatgatgtgcattgtcttttaaattttatctcctctcatcctcagcctatgaaatagggattcttattcctattttatttttgagatgtagtctcgctctgtcacccaggctggagtgcagtggctctctaatctcagcttactgcaacctctgcctcccaggtttaagcgattcttctgtctcagcctcccgagtagctgagattacaggcgtgtgccaccacgctcggctaatttttgtattttcagtagagacggggtttcaccatgttggccaggctggtctagaactcctgacctcaagtgattcacccaccttggcctcccaaagtgctgggattacaagtgtgaaccactgcgcccagcccttactcctattttggagaaaagggaaccgaggcccagagcggttactcaagtctgacagcagacggggaggaagggggagagggcatggagccagcctggaagagctatgtggaccagcacagaaaaggggaggctgagaccagggagaaattagggttcaggggactgaggggtgggtgggaggagggacttaggacctcataggtttcatgagcctgggatggcttcctattttatggatggggaaactgaggctcagtgaagtcaagcaacttgcctaagggcttctcttcaggggcagagcctaatctgctcttccttccgcactgagccttacccgaatgactcccagccaggggaactggggaagagggtggagatcttagggttccaggtacagaaaacggggacgcagatcatagtccagaacattcttagtccccagtctttctccacatcccttccctcacctctcctctcttcccaaggtcccaacacggagtggggatgatgcttgctttggtgcctcgggatccaggtgaaaggcattgtttaacgaccccaggcattcttgggctgagaggggtcataaggcatttatcaggacgtcccaggattggggggacggcattgggggattctcagcagcttggttggatgggtactgagaggggtgccaggggtttccagggaacgagagccagagggaaggtctggagccgccgggaggcactatgctgccactccctggggaggtgggaaggcgggaaggctgcgggggataattccggggacgctgggctgagctaggacagcgtgtgtgtgtgtgtgtgggcggagggggggagctgcacctcttggggggttcgcagagctgtgctaggggagctgcagggccgtcggagcgcgcggggacggcggcggcggcgctacctggaggcgcggtggcgggcaggtgcccgaactgcacggcgatgcagaggtcgttgtccagggggaacttgtggcagtgcagcatctcaggccaggggaagccgtaggcctccatgagcggcgcgcagccggcgcgcacggcctcgcacagcgagcggcacgggtagatgggccggtcgagacagacgggcgcaaagagcgagcacaggaagacctgcgtatccgagtggcagcgcttggccagcagcggcagccagctgctcgcctgctgcttcacttcggccaggctctcgtgctccagcaggttgggcagccgcatgcgcttgtagcccaccgtgtggcagagcggcaggtcggcagggatgtcaaggcactgcggcggcttggagtaggagcggccgtgcagcggctcggcctgccagccatagtagtcgtactcctcgcagcgcgccggcgcccagtgcagcgcccccagcagcagcgccagcgcggccgtccgcacgcccccccccgccgccgccgcccgcatggctgcgccctctccaggtgcgcgccgcgcagccccccgacgctcggtgcccggcggcccaggtgttccggcgtgcgcccccggccctgactctacccagccgccgccgccgccgccgcggaggtcgcccaggtgggtggcagcctgcgctgcgggcgccccgactgatcctggcgcctcccacctcggggctccagcccgggcctcgccgtgcgccccagccaatctccggccgcctggccccagctccaaggcggggaggcagtgggggcggccctcagcccctcccgcaccctgcccgagcgtcccgcccagcgccaggtcttgcgcccctctcccggctcggctcccctgccgcagccctggcctcgcccagcgtttctccccagggctccctgcctccctgggcattttcctcgaccctcgccttctccatccttcctccttatctctctccgccacagcctctcctgttccttttctcactcacttcacttgcttatctctctgccttggcttttctccctctgctctgttttctcttccccgacacctcggttcctcttctccctggtgggaggctcgtgccaccccacaccctggatcttctggtcctcctggcaggtcttcattgagcttggtgccaggccccatgctggctgctggggaatcaaagatggatatgacccagaacccacctccagggccaggatagtctagtgggggtgaaggtaatcatagcttctatttagtgagctcttactacctgccagggacggtgcaaggtgcaaggtgcggtgcaaggtgcggtgcaaggtacgttccaagcttatcagctattgctaatgatagccaatacttagtgggtgctaattgtgtgccaagtctgatctgagcacattgcataaactccctcagctaattctcacaataaggctagatggtgggtaggtactattattgtccccaccttacagataaagatcctgcggcagagaggttaagcacagattagagctgggatttgaacccagatagtctttttcgagagtcagagcccagaaacaaccaggaggcctggattctgagtctgtaggcctaatgaccaaggggatagggagttcagagaagtggagtaactggcccttggccacacagctcatatgtgaaggagctaggatttgaatccagatgttgggctacaaaggccagggcttaaccactctgtggtaagataacttccaacccatggtagggaacacagtgggaagagggggaattgatggtgtgtctgagcagggcacccaggcaagcatcagaggggaggggaccttcaggagccccatgcttggtgtctttctctcctgtctgagtcctgcctttcattggctctcccttgagaggaatttggactggaggcttgaagggaggggaattccttcctgagagcctagcctgacacctgacctcccagtctttggtggggagggtaccttggggaggtgtctcctaggagggcgtggggagctgggggctggctctgctggaaggcaggagtactgggcactttccccctctgctcctccccttagtcccactaatggatgtttccagggctcctgtcttcctctgggtctgtccttgcagtggtagtggagaggggtgaggggccactccttaatattcacagaaaatgcatagagtacctactatctgcaaggcatggggtagggtatgcatggggacacagaggtgcaaaagacatggctctgttccttctgatctagttgtaagaaaaagatacaaggcaggcagaggaggcaggagaagcctcatctcactgagccccaagggtgggacaagccgtgtttgatgtccaggatgacctagtggggtccaggtagagtaaactttggccttcttttcccctctccctctcccagcccccagcatgaagaggttatgcagatggccactcagaaggtgaaggactggtctctgcagggccaggcagtgcagtgtagcaatggtgcgagagcctgggctctgcagacgatggagccaggttcagatcctggccacatattagctgtatgaccttgggcaagtacttaacctcatttccttctttgtaaaatggaatttcttcagcagttactgtgagaag

SEQ ID NO: 914065 - DNA, 4001 bp, Homo sapiens
tcgaggggttctgtctgcccgcctctgtggggcaagtccctctcccgcaccctccaccaagggcaagcatgatgctctctgcactgccctgatggacttgcttaccgctctgagcttcaaagttcccctctgtctgtggggctcctgatcacaccgtctgtctggatgcctcgtccgcattcacccttcagacagcccccagggcctccatcccaggacatgcctcccctgcctcccagtgctgtccctcatcccacacctgactcagtgtgtccccatcggtggtcatgaggcacggaggacttcccacacctgcctttccctgaattgtgaccacactccccagacacctcagctttctccctcaagcttatcctctcttacttaggttgagccaaatgcccttggggaacctgtagggtttgtctgatccccatcatccccgtgtaactgacttcagggtcgctgtgcccatgtttccactgcccacctgccccaccctgctcacctggagggcccctctcgccaggctcccccttctctccacactctccagggataccaggggctccaggcagcccatcatttccaggaggacatggcatttctccaggtggacccatggggcctgcagagaaaagagacatggatgtgtaggatctgtcacccacaactggttggagctagtgagactcgatgcccattatcaccagggctggctcagctatcactctatcactccgtgggcactatgaggacagactctccaggatgcgccatcataagggccccaggaacccaccagccctgcagactgaagtcccacccagcttactatagcccccagctcactatggcccacagcctaggggcctggacagatgggcctcctgaaaaggggtctgtgtccctcagctgagggtggggtctgcagcacagtacctggagggccagggtctcctttgagaccatctctcccgtccctgcctggcaggccgtgggatccaggagtgccggggataccagggcttccaacacaaacgtccttcacttcgcacacagcaccagaggctgccatcaagatgaggttgagggccagagggcacagccacatggctctgggtccagtcgctgctcctgcaggagggatggccgtgagcccatctgccacctctgccaacatctcccccactgtgctctgtcaggactcaggaagctgggcagagcccgagaggcagggcgggcgagaccagagtgctgggaagacccgaagctcccgggaaaattcccagcatcacctggcacctggcatggcctcatgcttcaggcctccggctggaggttgtggggtctccaggctgctgaggaggaggaagagtaaggagctctggggagcccggggacctgggctccagtgcagtctcctttctttcagtgcctcactatgttaccctgggaaactggcttcacctctctgacttcagctgaatcttccgtgctctgcagaaaacctgccctgtccctcccaggctattagtcaggtcactcactcactgactcacaccatctgtcctcatccctgctgtgttactttcttttcaggctccaagaaatcagcgacctgagaatgaaaaaagatgaacggggcccgcagcctggcccccctcaaggtggtcagtcatggagtcccctttctttttggggtctgttctctcactgcccctcctgtaggccctgctgaaccctgtagggatggatctggccaaagaaaataacaaacatgaggatctttgcaggtcacctatgttgactgtgctgtgaaacacctcccagtggaaaatggggagttgccctccttcccagcctgggctttggtcaggcctgtggctgctgggctggtcctctctgcctgcgatcctcaagctggagaacacctaggggatggggctaaactcacccacacacagagcctccagctgcttgggtctctgcctccaagtcagagggtaaggtagacgcagcatttatagatgtgggggctgccaggcttcctcctcacccctgagagccctaccacaaaacctgtgctccaggcaggaaatgggcatagtgtttacacagcatgtttccccaagagcactcaggctggaggatctcaaaggacccttgaggggagcacagaacctgcgaaagaggaactccaggtctgtaagaagagaaatcccccccttggctgaggtcacccaccctgcccctagcaagctccttagcagtgaaagccgagagcccttacacaggcactaaggaagccccactgggttcctggtttagattcagacaatgaagaactcactgctccagctgagattggtcaggttgatccaggccaacttgtctgtcctgcgacctggctcagccatgagccccaggcccccccaccagcctgtgtccctggagcctgcagctgagttggtgggcacatgggcagagtggcaggcaaatatgctgcacgttccacttccctctgccctagcaggttcagctggaggagtcagggcagcacctggaaggtcacgggagagctgcagtttctgtctttggtagaacatcactttgggtgatgtctggcaacctgcaatggtgattatgctaagtgtcccagtgatatatgaagccctagttgttgaggtcctggtttgagcatctggattaggagggaatctccaactgtggaggtggtaatgatgggaaccaagacaggaaaatctcccctggcttatttggaattggtttgaaaaatcccaaaccattgaggagtctggagctcttccagggagcggaagctcagccaatggaccccactcccagaagcaggaagctgggcagtgccaatttgtagcatggagtctttcagctgccccagtgctgtctgccacaccatgtggtgggtgctgggccaggtgtggaatgggggagtcaggccagtgcagggtgggggcaggtggggcgcagctccagcaacttggctgtggggaggcagggctgttttgcaggtgatgagcaggaacagaggccaactcagatgtgcagggccttgtggttggcagggcagggcgtgactttaggggaaaggcacacctgagttttcacccagagctgtcacttattacccatgtggactcagtcaggttatgtaacattttgaggctcagtttcctttttgtttttattatcttgaaacatcaaatttacagaagaattgcaggcacggtacaaatatgtttccctgaacctatgaaagtaggttgtcagcatgaaaccccaacaccccaatactttaatgtgtttttcatgcaaaggcattttcgcattataaccataatcaagaaattaacatggatataataactccaaatagccttcaggccctatgcaaaatgtacccaatgccccaatagtgtcctttatagcaaaggatccatttctgagccatgtgccgtattcggttgtcacgcttctccagggtcctgaaacccacaaaggccctctgtcttcccttcaccttcatgacctgaacacagtgtgaagatcacaggagagttactgtgtagaatgcccctcacttttttttttttttttttaatgtattggctcatgattagattcaggttctgtaacttcagcagaaatgcgatagacatcctgctgcgctcttctcccattctaccgggcggcatgtgactttagtttgccccaagattgatgatgttcttgttgatcattgaattaaggtggtgggtgtcacgcttcactaccataaatacattctttttctggttttaatcagtgactatgttatgaggacgcactttggggctattgtaaagatcccattcctcatcacactgtctctgttgcccattgattgatttgtagcaatgtggactcgttcgtgaggcctaccactgaccaccagggggtgccgagcacccacctgcggg

SEQ ID NO: 914066 - DNA, 4001 bp, Homo sapiens
gggcaagtccctctcccgcaccctccaccaagggcaagcatgatgctctctgcactgccctgatggacttgcttaccgctctgagcttcaaagttcccctctgtctgtggggctcctgatcacaccatctgcctggatgcctcgtccgcattcacccttcagactgcccccagggcctccatcccaggacatgcctcccctgcctcccagtgctgtccctcgtcccacacctgactcagtgtgtccccatcagcggtcatgaggcacggaggacttcccacacctgcccttctctgaattgtgaccacactccccagacacctcggctttctccctcaaattcatattctcttacttaggttgagccaaatgcccttggggaacctgcagggtttgtctgacccccatcacccctgtgtaactgacttcaggtcgctgtgcccatgtttccactgcccacctgccccgccctgctcacctggagggcctctctcgccagcctcccccttctctccacgctctccagggacaccaggggctccaggcagcccattattcccaggaggacatggtgtttctccaggcggacccatggggcctgcagagaaaagagacatggatgtgtaggatctgtcacccacaactggttggagctagtgagactcgatgcccattatcaccggggctggctcagctatcactccgtgggcactatgaggacagactctccaggatgcgccatcataagggccccaggaacccaccacccctgcagactgaagtcccacccagcttactatagcccccagctcactatggcccacagcctaggggcctggacagatgggcctcctgaaaaggggtctgtgtccctcagctgagggtggggtctgcagcacagtacctggagggccagggtctcctttgacaccatctctcccgtccctgcctggcaggccgtgggatccaggagtgccggggataccagggcttccaacacaaacgtccttcacttcgcacgcagcaccagaggctgccatcaagatgagggtgagggccagagggcacagccacatggctctgggtccagtcgctgctcctgccggagggatggccgtgagcccatctgccacctctgccaacatctcccccactgtgctctgtcaggactcaggaagctgggcagagcccgagaggcagggcgggcgagaccagagtgctgggaagacccgaagcacccgggaaaattccaagcatcacctggcacctggcatggcctcatgcttcaggcctccggctggaggttgtggggtctcaagactgctgaggaggaggaagagtaaggagctctggggagcccagggacctgggctccagtgcagtctcctttctttcagtgcctcactatgttaccctgggaaactggcttcacctctctgatttcagctgaatcttccatgctctgcagaaaacctgccctgtccctcccaggctgttagaaggaaggatgaggtcactcactcactgactcactccatctgtccctcatatgcccagttaccttcttttcaggctccaagaaatcagcgacctgagaatgaaaagagatgaatagggcccacagcctggacccttcaaggtgatcatcggggggtgatgaccctctcacagtcagtgatgaggtcttccttcctcttggggtctgttctcccactccccctgcttaggccctgctgagtccctggtagggatggatctggccaaggaagatatcaaagcatgagggtctttgtaggtcatccatgttgaccatgctgtgaaacacctcccagtggaaaatggggagttgccctccttcccaacctgggccttggtcaggcctgtggctgctgggctggtcctctctgcctgcgatcctcaagctggagaacacctaggggatgtggctaaactcacccacacacagagcctccagctgcttgggtctctgcctccaagttagagcataaaggtggacaacagaatttatagcatgtgggctgccaggcttcttccccacccctgagagctctaccacaaaacctgttctccaagcaggaaataggcatagtgtttacacagcacatttccctgcagaacactcaggctgcaggaatacttaggacccttgaggggagcacagaacctggtaaagaaaaataccaggtctgtaagaagagaaatgcctcactggctaaggtcacccactctgcactcagggagctccactgggttcctggtttagtttcagacaatgaagaagtcactgcttcagctgaggttggtcaggttgatccaggccaacctgtctgccctgtaaccttgctcagctctgagccccaggacccccagccagtgtctctggagcctgcagccgagttggtgggcacatggacagagtggcaggcaaatatgctgcacgttccacttccctctgccctagcaggttcagctggaggagtcagggcagcacctggaaggtcatgggagagctgcagtttctgtctttggtagaacatcactttgggtgatgtctggcaacctgcaatggtgattatgctaagtgtcccagtgatatatgaagccctagttgttagggtcctggtttgagcatctggattaggagggaatctccaactgtggaggtggtaatgatgggaacccagacaggaaaatctcccctggcttatttggaattggtttgaaaaatcccaaaccattgaggagtttggagctcttccagggagcggaagctcagacaacggaccccactcccaggagcaggaagctgggcagtgccaatttgtagcatggagtctttcagctgccccagtgctgtctgccacaccatgtggtgggtgctgggccaggtgtggaatgggggagtcaggccagtgcaggttgggggcaggtggggcgaagctccagcaacttggctgtggggaggcagggctgttttgcaggtgatgagcaggaacagaggccaacttggatgtgcagggccttgtggttggcagggcagggcatggctttaggggaaaggcacacctgagttttgacccagagctgtcacttattaaccaggtggccttggtcagtttcatttttcattttattattctgaaacaacatcaaaattacagaaaaattgccagtatcgtacgacttttttttcccctgaacctatgagagtaggttgtcaacatgaaaccccaacaccccaatactttaatgtgtttttcacgcaaaggcatttttgcattataaccgtaatcaagaaataaacacggatacaataactccaaatagccttcaggccctatgcaaaatgtacacaatgccccaatagtgtcctttatagcaaaggatccgtttctgagccatgtgccttattcggttgtcacgcttctccagggtcctgaaacccacaaagtccctctgtcttcccttcaccttcatgacctgaacacagtgtgaagatcacaggggagttactgtgtaaaatacccctcactttgtttgtttgtttgtttgtattgccttacagttagattcaggttctgtaacttcggcagaaataccatcgacacccggctgcgctcttctcccattctacccggcagcatgtgactttagtttgccccaagactgatgatgttcgtgttgatcatttaattaaggtggtgggtgtcacaatttgccactgcaaatttattctttttctgattttaatcagtgactatgttgtggggacgcactttgggactattgtaaagatcccatccctcatcacgctctttgttgccctttgattgatttgtagcaatgtggactcgtgagtgaggcttgccaccgaccgccagggggaaccatgcactcgcctgcgtgctgcaagggacactatccgagtttgatgttgagacaggtacagtttaccagcacatggcaccagcaaatctaaa

SEQ ID NO: 914067 - DNA, 4001 bp, Homo sapiens
gcaagcctgtttcttctctcttgctgccttgcatggactagcactggtgctgatagtgctggtctgaaaatgcagccagagtcctgagtgcttagtaatgtccttcctgagcgcaggctgggagtgtggtgcacatttgcctggcaatttgccattcctcgagcaggtgctgtctctagagaaaagtcccagagggaacccaggtgaaagttttcagagacactaaactagcagtaggagaaatcctgagacacctagagttcttctaagacctgagagggtttggaaaagaagtatgtggagtctgggcacggtcgctcatgcctgtaaccccagcactttgggaggccgaggcgggcagatcacttgaagtcaggagttcgagaccagcctggccaacatggcaaaaccccatctctactaaaagtataaaaaattagccagatgtggtggtgcgtgctgtaatcccagctactcgggaggctgaggcaggagaatctcttgaacccgggaggtggagggtgcagtgagccgagatcgtgccactgcactccagcctgggcaagagagtgagactccatctcagaaaaaaaaagaagtcttatatggaaagaggacatgccaggtaggctcagtcaggcagaaagctagtgttgtgggtaagcaagagcaactacccaacagggcacccatttactatctaagatggtcaggaactgagaccaggataagagcaggacctgggacattaactgttttgggtatcttttctctcaatgagaaaccgtaaagttatgagagtgaaaagagctgatcagattcgcagaggctaggaacaaagccagagggacttgtgcaaagaaaggggtcaccaggccaactggggtggtggcaagtggggggcttcctgcccagaggagtgccttcttctttgactgctggtgattctgggctgtggatgacccctatttctcactagcctctttcaattttgaaatcaccacttccttgggtatcctggtagtctctagaaacacctgggtgagctcactgccagcagcggctaccttgttacacctgttctggcagaggctcaatcatgagcagcaagggccagacccaggccagagcaagggcattgttctgtgccccgcagctccctcacccctcaggccctgtgtctgattctggggaagaatgaaaggcaataggcattctgtctacaggctcaagatggcacagaaggcaccagcagccactgtggcttgaaggacacttggagagggcagacccgggttttcaggcccaggattcagatgaggcatcttagctggggcagcagatggagtgggcagagttgtggtccccctcaacccctgcagtgcccagtttatgctaagctttcagagtacaatttcattgaaaaggccatctcctctgaacatggattggaaaatcagagacctactccagtaagtatattttttaaagtaaagacctgaagctatgagaaaaacaggcttgccctgcttttccacaggctgttggcaccaggatgggtttagaaccccagcctgtgagtgcctgggtttgtctctcttccactgtcctttctgaagaaatcagtgcagaaaagagcctagagataaattagcattgcatttttccacctgaagcttccacactgtggcatcccaggtctagatagtgtcacacccactcttccaccctgtgcacccccagctcagaaagcaaatcctcccctgggctgaggccactgaataaggggcagaagagcaccataagacctcctgtgctccccacctcctgcgcccatgcctcctagaccagaacagctacacagaccctccacaccaataggttgaattgcccaggtcggcagagggatatttataggatgtggagaaaataaaaagaaggcaagaacagagacacttacaggtttctttttgttaggccccaggagctccaagcaaactagcctttgcttggcaggcactcactatttatgcctgccctgtaccctgagctgcccagccccaaaaactcccttcaagaagtggggcaattttcttctttattgactcactcactcttatccccacctgcgttctggaaacctgccactgatattcacaatactatgcacatccatcactatagtttgcagaacactatcaggccttgaactcatctgcacctttctcactgcagctctgtgaattaagtggcatcatcagtgtctgtattttatagatgtctagaaatcaggagtccagagaccagcaggttgcacaatgacctacagcgattgcaaaaggaactcacaactgcagatcttaagagccaagacctgctgtgtccacttctcctcttcctttgtctcaacagcactgcccagatattgggaaagagctgagagctgcttggaatacctgggcaggggtggggcaggtagagtggctgcagaggcagcagcatgtgggggcagcagctagggagctgccacctggaaagagttgctcttttgcatgctgctctaggcctcagagagcccctgccttgcttgtcttttgtgggatggatttcccttagcagacctctgccttgccttgttcaggcttgttctccctgccatcttagctggtgtttgtcttgtgcactgttcttgtaactagttaggacccctgagctgatgctacttttatccaatcttttagtctgtatgtattttttttttttttgagacagtctcactctgtcacccaggctagagtgccataatgcatttatagctcactgcagcctcaaactcctgggctcaagtgattgtcctgcctcagcctctttacaggtgagcatgatcacacctggctaatttctctttttaattttttacagagatggggtctcactctgttgcccacgctggtctcaaactcctggtctcaagcaattctcctgcctcagcctaccgaagttctgagattacaagtgtaagccatcatacccagcaccaatctgtatcttttaagtggaacatttactccatttattatcaaggttaatattgatatgtgatgttttgttcctgtcatgataattgttacccagttgctttttagtctcaattatgtaattgctttatataatctgtgagtttttcactttaatgtgcttttatgatgaggagtattgtccattcatttccatgtttagaactttaagcatttcttgtagtgctggtcttgtggtgacaaattccctttgcatttgttgtatgggaaaaactttatttctccttcatttatgcagcttagtttagcaggatacaaaattcttggctggcaggatttttgtttaagtagattaaacataagaccccaatctcttctggcttgtaaggtttctgctaagaagtccattgttagtctgttgggttttcctgtatagattagacatttctctcttgctgcttttaggatgttttccttcacattgactttggatagtctgatgacgatatgcctttatgaggtttctcttgtaaagcatcttccaggtgttctctgagcatctcctatctggatgtctaattctctagcaagaccagggaagttttcctgaattattccctcaaataggttttccaagcttttaattttttttcttctccctcaggaatgtctatatattgtatatttggtaactttatgtaattctatatttttcaaagtctttgttcatttttaaaaatttattttttctgtatttctgtctgactaggttaattcaaatgactggccttcaggctctgaaattatttcttctgcttggtctagtcttttgctaaaagtttcaactatattttatagttccttcaataaatttttatttctagaagttctatttggtttttgttttttaatctctatctcttttgtaaatttttcattaatatcctgaattatttttctgat

SEQ ID NO: 914068 - DNA, 4001 bp, Homo sapiens
aagagaaaaaaaaagtaatagactactgccacctctgacgtaatgctcatccttcccagaaagagcagattttctctggcaaatggtatcagagatcagaaaacaagcttccaaattccttctgaggtatcctcttacaagcagaagtgcacaagattactgtttgtagccccaggtagggagaaaaacgaaacatcatcgctggtactcacatcagaggaagatcaaggtagccaaagaccccagaaggtcagacacaaagaccactgagacaggcaaggattaaggtcaaggctgcctagagcaagctggaaaatgagggtaataattacaagagcaggcccaggtataggcttatgggtactcgtctgactccaaggcaagtgggctgttaggcaccagacaacttagaaagagcaacctcccttgcctttttcacaaaagggccaacagtctggagatgagtagattataggggtttgtgctcctgtatcacctccattcatcacctccttagtcaaggctctgaactgctttttctctccaaggatctgaagcaggtatgcaagcagcagatgttgatttttgttttcatttttttttttttttttgaggcagggtcttgctctttcacccaggctggagtacagtgatgtgataatagctcctgggctcaagcaatcctccagcctcaacctcccgagtagctaggactacaagtgcgccacggaacctggctaattaaaaaaaatttttttttgtagaggcagggtcctactgtgttgcccgggctggtctccaactcctgggctcaagccttcctccccttccacctctcaaagtgctgggattataggcatgagccactgcgcctggccgcaattaccaatttctaggggttgtgaaaatgaaatttggtatgaaatgtatttcattaggaaggatgtaatttccatacgggctgattttgtccactgctgtgtctccagcgtctagaacagggcctagcacgtttgtgtaaactcttcttatagtcctctgcatcgggaaagggatgggaggtagcacttcccaacccaccccagtgtcccacttgctcttccttggctaaaaatgcaggctcatttttgcctcctccaggactacagatggtacgcggtcctgtccaaagcagcttagcaaaaccggccagaggctgggcacagtggctcaccactttggaacacctgtagtctcagcactttgggaggcctaggcgggcggatggcttgaccccaggagttcgagcccagcctgggcaacatggcgaaactccgtctctacaaaaacaaaatacaaaaaattatccaggcgtggtggcgcccgcctgcaatcccagctactcgagagtctgaggcgggagaatcgcttaagcctgtgaggcaaaggctgcagtgagccgagatcgcgccaccgcactccggcccgggcgacagagcgacaccctgtgtcaaaacaaaaaccgggccgatccccaaaacgcctttcacctgtgctttcagctcacctcagggctcagggccagcccccaggctgcttcttgccctccgacagacggcctccccccatcggtactcccccatcccggacagctcgtaacgccccagccgctcggcctggcactcctaggcaatgggggtcagagcagaggggcccatctgcagccccagggcgcacttcgcgccacgtggcttctgcaggtggaagtccagcccgcgctgcagccccgcctgggcagtcaggacagcaatctcagcacccacccgagatgtggggattggaggtagacagggcgagcgccattgtcccaaggccccttacctggtcccgggacaaatgccaccagttacagcccgccttgaaaactggcccgggtgagaggaggacctgggctggggaactgcccccacgcccgccccacgcccctccttttcgaccaatcccaggccgggaggctcccgccagccacgtgggcaggctttctccactccctggtccaggcgagccggcggcggcctctgcagctcccgtagcccgcccactgcgtgggcgggcgccttagcgcacttgcgcactctggggaaagcggagctgcaccccgccccgtattgctgctcagctcctcagctgtgcgtgcgagggacgtcgggggcggcgccgcagcagttgcccctggtaacgggggaggcagcaggaggaggaggaggaggagggactcggcgggaggatggtgagtgtgggggcctgggcccccttggagccggccggttatccccctcccgtccccaggcccagggcggagcactgcgcttaaagccaaggagggaatgggacgtcgctcagcctgctatctgggttgtggactgatttcgggggtcggcggggagacccgagggtgggccctggagggaggcctgggcctggagaggaaggcggggcttgcagcgggtccgaggcttggggaaggggctggcagagtgcgcggctggccgggtgcggagcccgggctccatcattactctggggacaggggtgagggcggatcccaggaactgcggagagcagctttcgctagcaggcttagacttcccgggcaatcggtctcgcggctttgcagtaaagtggggttcgtctggagcccggccagaagcggagagaaggccggccccattggctctgaggtcgccctggcggtagcaggggagatggtagcctagctctcctccttctcgcgctgtgcgggcccctggggggtagggaagtaagtcccacgacacaaaggggtgccgcttggaagggatgcctggtggattttacgccgtcttggtgtctgcgtggcgggtgcgcttcctcagtcccgaattatttagttatttgctgagagttttgcaggatctgattgttggtgatgaccgatttttcattcaatacataatccatgttgatgaagacatattagctgctccgtctctagaatttccttcgaaaccttttgcagtctcctcttgcgtgtgaccataccaggaccaaaagatcttaatcctagcttgagttctccaaactgaaaagaacgagaagttaaaaatggagatcgaacttcaatccggggcaaggcttttctctgtcagtcccaattaaagctttcccaaattctaaattatggttgtgacagatctgaccgttgacactctgtttcttgttaatgtctgtacagttagttggagggagttaaaatggaattgagtaattttagagctatcaaagaaaaattgattttgaacacttaaagcaggttagttggctgcaaagagcctgtcatcaaacttatagtcactgctccaactctcttcctagttcctttcttgacttttagaaatgttgagccatttctgttgatttaagaagtaaaaaaaaaaacaaaaaaactagatgcccaggaaaaaaaaaaatagatgtatgtttggtcagattatccagtgagtagatttagaaaggaaaaaaaaaactcaattgattttacattgtcagattgttaaagaagtagggttatttgatctgaagttgccaatcacatttcacacttgctacacttgcagtttttttttaacctcaggctaaacagatttttacaactgtttctttttcttaatcatttatacgtgagctgtccttttaaagttaaagtttttctcaacaaatgagtacaaacataaatatttacccagaaaatagctagaattggaatgaaaagggcatgccgaaccaacagagattgagattcatcattatggatgagaagtgcatgagagttggctaacttttcccagtttgttgatcaattaagtgtactgtgtaatccatgattgtttaatttataattacaggccacagtaaattaaccactgcccatgtttccaggtgcaaattggcacagtatacaacaaatttacagtgtatataca

SEQ ID NO: 914069 - DNA, 4001 bp, Homo sapiens
ggatacaaacccccaaggctgttttggaaaatggcacaagacatcccacactccagtccctgattggaggagagcaaggccttactggccacccagggcttatctgttccagatctcaatcaggggactctgatgtcagccatgtgtgtgcatgtgggcacgcacaagtcctctctacagacccatttttctccaactcacactgaatgaccccaggctctccctggtccctggccaggcagggctggcacagacactcatccacctctctctgggccacttgcctccggataagagcaggattcagtggctgctccctccacccagcacagagaggaaagcctggtgcagccatctggctgagttgggcagaatcctacagaatgactaatcctctccagccacacttcctcccgcagaggcagagacgccctcccctcacactcacatacccacacacaaagacactatcatgcacaccctgcccagacatacagacagagtggaggtgtcctgtatacaccggccttcaaacacctttacaggcgcacactgtgcccatctgcagacacttgaatgtgtgactacacacagccccaccctgacattcctccccccaacctcccttgtgccctgtggacttggacctccacagagccgaggacattgactgcaccaggacagacagtttcaaggcaggcctccttctctgacccccattccagaaccccgcccgccggggagagcgagcacttacgctttccatcgctctctgaagctctcagaaccgccttcctctctgcctccgctgtcgccgccgggccctcccagccatcacgcgggacgtcacgcgtgacgccgaccagcagggaggggcaggagcttcccggccgcgcccacccggtgggcacggggattggcagaacctgagggcggtgggtgtcattcgaggcgatgcccccagcctgggccacctggaccaggccctaagctgcttcccagagccaatcccacctcggggatcagttctggccccctccccagccaaagggaggaggggctggagccgcgggcgctgctcccttggtttacagtcccctggcgggcctcagcagacccccagccctgcagcaagcggtctaggtgcccagagagaaagccccgggcgcaggtgggcggtgtggaggggcggtcctctgctggcgcgccgggagggactcgggttaccgcctggcttgtttacttgatggctgccttggcaatggcctttggcttgcttgtccccctgggctcctaccccagtatccacaagctcctcttgtagcagcgcggcattcgcatcacttcacagccccgttcctgtcgtgcctgtgcctcttctatgtccccagccctctccctgctccccctctgtaacccctagctccactgtgtccctggtctccttacgctcccaacccctagccctgcaccccagaccgtagccccacccctgagatgtggaggggcagacgaccccaggaacctcgcggtctgcatccgagcaagtgcatcagaaggattcttaggattcttccggtcctgggaccagctgccccaccctgcgaccattccagaactgggtagccagagacgccttctgacagaggaggaggatgcaagtgaagaaggcaccccctccgccacgcacatactcacaactcacccagccaccacacagagcacgcctgcagcaaactcaggctcacgtcccgctctgccccgtgacgtccctccacggaggcctcaagggtgcccagggaggggtggcaattccaggagccccggtagctggctcggctcagagaagaggtggttcgagccggaggggaacaagccagacccaagccctaaatttgcggaatgagctagggcgtcagaaccagaactggggtgggtaaagaactccgctgcccgggaccaggtaacgctcggctgtccctggcgcctaagggaggtgccggaatagaatgactggcggccctaccagccaatgggagcccggggcggtgcaggccagcccaattcccgcagcctccgcgcagcgtgggtggggtttgccggctgcggcagtagctctcgcctgcgggtggtttgacaaggctggcggcgccacaccagcgaccaggtgaggccgaccaggcacaaaggggtggggggcctggagggccgagttgatgttggggtgcttcattctaggtcccagagcttctctgagggaactggccctgggttttgcgcgggatgtcgtgggacccctctccagcagatcctccccaaagcttgggagaggttcatgcagcctctttagacccggagccgcagcctggagcccgcgggtgtctgggggtcttcctgggcctcagctgtctaaggtcctgaagccctatcctcgaggcccagcccgccccacgcagcccccgccccaccccgggccacctccatgcccgcatatgcatgagagaggtgatgccatgagctgtcctgacctctcttttgtctcacacctctctaagccccagggcccgcagtaatcccaactccactctcaacctctactgaggactggggacgggagtagatgactcagccccgagcaggaatgaggggtgaaaggttcccacctgccttgtataaagtcagcgagagtccaagatggtgcctggacggggcagttctctggcctagggtgagacaggaggggggcctaaggcatgggagggcaggatgcttaaaccagggggaggggtggaagttttagggggcagcaggggaaacatttacacccctccctcatccctgctctccctgcccaggcctggagctcacacttctgagaggcatcgcaagcgagggccttcacgttactgagaccccagccccgcacagaggctcatggagctcgaagcacgcagggctggcctctccagagctagcagattccttctggacctgtagggtgccgccctagcccagccgccatggcgcagggtttcgcagtgggcttcgacccactgggcctaggagacctgagctccggctctctgagctccctctcctcccgaggccacctaggcagcgactcaggctccaccgcaacgcgatacctgctaaggaagcaacaacggctgctgaacgggcccccccgcggaatccgagcctcatcgcccatgggacgcgtcatcctcatcaactcccccatcgaaggtaggggcgggacccagccactggcctgggttggggagggtgggggtaggggacaatgggaactcagcaggaggaggcagagccagtatgattgggggaattcaagagatgggagtcacagggaggtggcaggccgcctgggaacccatacactcttcctcacctgcccttggcctctcctccaggccaatcctgcaggggtccagggtcgtagaagggtcagaggagggaaagaaggccatggcagcagggacaggcatgcgtgtggtatgctagcccctggtggacaaggcaggggattgaactggcctctctcccatgggctctgcccttctccagatccattgtgtgtacttctgggggatggggcaggataaagaaggacatcctccatcaaccagtccattgtgtgacaagctctgtgctgggctgcgaggagtcagtgcccaagcgggtagacagaattcagggcttccgtgctgaaggaggggaatgaaggcagcacagcaaatgttcagaagaggagggttgagggtggagagggagctccatcagggaaggggagacctaagcttatgtagttgcttaatgccgcttcatggagcacaattctataccagccctggggaggtgttacaagggacctagagagaaatcaggctccctcttcaccttccaggaatctacagtgtagcaggacagagcaataagaacagctggtggcaggggtgagctgtcaccaacaaaggctggaa

SEQ ID NO: 914070 - DNA, 4001 bp, Homo sapiens
gcacacggtcagatgtacgcttttccttaccccttccaatctgacaagctcatttagaaggaataaacacaataatatatgtagattctgttatttcaactgcttttaaaagggacacgtgggcagggcctgaggtcgggagttcaagaccagcctgaccaacatggagaaacccccgtctctactaaaaatacaaaattagccgggcatggtggcgcatgcctgcaatcccagctactcggaaggctgaggcaggagaatcgcttgaacctgggaggtagaggttcttgtgagccgagatggtgccactgcactccatcctgggcaagaagaacgaaactccgtctcaaaaaaaaaaaaaaaaaaaaaaaagggacacacagacttcaagtttcaaaataaaatgtgaaattcattagctctgaaaacaatacttacaactgaaatgaacacatttgtaggatctaataattctgtccattgaagaaatcgtcgaataaaggacttaggagggagaaaagcaacagagaggttaatggcagcagaaaaataaagatataaatactaacagttggctttttttttttttttctgagaacctgccagggtctgtgatctgccttttactggcatcatctcctgggatcctcccaacctctccaggttctccaggtgaggaagctgaggcttagagggactcctgaatgtactcaaggcaacacagccaggaaatgattcagaagtctgtgcccttaacctctcagtatcaaattgcccttgagggttaaaatcccagactttgggggttcaaatggtcttacgttcatatctcacatacgacctcgaagcaatggcctagaatatctcaagagtctgtggcctcactctctgcttgctataaggcttcactccagtgacaaaggatggacgccccattaagggctcaatggtgcagctggggtcacactggggaaaaagaggtttgctccagcaaactctaaactttgtagtggttctggctttaagccttggctctgctggagcaacctgagctcaccgccccttctcaatttccccacctaaaaaaaaaacagggctggaccccactttaggagaggcctcaaagagaaccccctaaagccctgctctccaattcgccacatgcggctgaacccagatgtgctgtgaaggtaacagacgccggatttggaacactctgtaccaaaaaagcgagtaaaatatctcagcaatgttttttactgattacatgttgaaatgttaatattttgcacctgctaggctaaatgtactgtattgttaaaaatttcagctgtttttatcttgtttaatgtggctactagaaaatgtttaattacctgtaaggctcacatcatatttctattggacggtgctgccctagacgctgcagggagataagtcctgcttatgtcctgcccaagggtggcttcccaaagcctcgggggtctcaccgaaagtggctgagcttaccaaggtgcgagagcctgtttctccccaatctgctgctcagccacagctcaggcagtagggagcagccacctgcgcggactgggcccctccgagagggcaatctggagggtgacgttgtggtcgtgggcatctggcagcttcgatttcccctgcgtcccctgccgcgccctaaggggtgaaggccggtggtgcgcgttcccggcacaactccgagaggaggaaacggagacagggggcgcccacgtggcctggccaaggtcacccgggtcagcccgactccacgcggcccggcccgccccctccctgcccctagtcgcgccgggcccgggccgtacttggcgctcggtgatccagaagcgcacgttgggctcaatgaaggcggggacggcgtctctgcgtcctaggagccgcccaggttgcgtttcctcctcctgttccagggacattttgcgctggttagagtggccgccgccgccaggccgcgcgtggaggaggagccgggcggcgagccccgccccgggccgcgcgcacccgcagttcccgccccaggcccgcgcgcccgacgtcccgtgtcacagcgcctcggggcccttgcgcgcccactgttccggcgagcgcagctctcccacgggccacgtcctcccaaccctgcttgccctgctccgcacctttggggagccgggccgtctccaggccccaaggggtcactatcggaacccgtcatcacagtacctaatgcgaagacccggaaaggttgtgagtgaggccgtccgcaacctcaccctgcgcttctgccgcgccctacccctggtcattaccctcgaaaatccctccgatggcccacgaattccagtgtgcatggtgttgcgcagtcaggccggctgcatcatggtctcagcccagggaaaatgtcaaatgcggtgccccttattcatgttactgagaatttcaagagagtaacaccagagcatcaaaccaagtatagggccctgggcacagtgcactatccctcagcccaacaggttgtttttttttttcttccagtgttggggcaaatccagttccttttgttgactaccaaataggtaccatttgtaaagaaaaacctgccttcccttcctcctcccacctgcccttccccagcacagggccaggcgggggctgtgtgcacttaaattcacggaagccacaagtgtgcctaggtcgttcagggggcctccggagtccaggactgggggacccagcacatcatctagttgtgtgaccctcgccaagtcagtatctcgaagtctattttcccatccgcaaaatgaggataacaattgtacctatctcagggttttgtttctgatcaaaggagataaaacatccctaacacagcactgagccctcagaagtgctcagtattggccattaacctccagcgggccaattccttcccttgccctgcgcctccaggaacaggaaattggctcatggcgtccttcaggcctgtatgactctgcttctgtatttgctcagtttgcctagctcacttttcttaacctccaggggtttatctcctcttccaggaagccttccctgaccctccgagttgagtaaggtgccccctccacttctacccttatgccgcagaaatccatctaagcaccagtgcagtatgtagcgtgctgttctattctgttgtctctaccctccaggatgtcacaaagccagcccgctggcctgcttccccactttggactgctatgtcgtcttaacaaaggagccagagtgattctcttagaacaagttgatgtcactcttcttttcaaatccttcctgacattccccaccccagaacagaacctaaagtccttggcctggccaaaaggcactctgggacccccaccacagccatagtcaccggcctcctagtaaatctgcatccgctctgagcccactcttgcctcacggcctttgtgttttccctgccctctgcctagaagtctcttatccccgtaatactctcactttctacgcgttttctctccctcgatgctcatcaaaaccctgagataagtacaattattgtcctcattttacaatgagaaaattgatccagagaggctctcccttaaggccttccttgacaaccccatctagaacacctacaactccgcttcagcagtttcactccacattattttccttccaaacactctacttttactacatgtatgaggtgtttcccctctagaatgtaagagcttaaaagcaggggtttgtccgttgttcgctcttgtgcctggaaaacagcacctggtgcggggtaggcactcaaggatttactgaaacaacgagaaaatgtttccctatctgtcttgcccctaaaccgagttccttgagtgcggaaccagcatcttattctctttgtggcccctgaggtaaatgctcaataaatgtttgttgataatctgagaaggaaaggagagcccaaaataagctgatcc

SEQ ID NO: 914071 - DNA, 4001 bp, Homo sapiens
gcctccagagctaaacaggaagcaagataagacaagtgagctgccacaggcagaaggcagcacctggaggttcccccaaagctggcgcctccgacagcaggcacaggctgctgcttgcttgcttgcttgcttctttgcttggccacggcatgtcttcagagctggaaggctgccacctgctgaatcaccaaacatccctgggcttcccttggagcactgaccagacaggcacccatcccccgcagccttcgcccgtggacgtttcacaccccgaccaatgaaacgccccgccctctccccttctgcacaggccaaaacagccgccaacccctttccatctgggcagctctaggcaacacccatcgcgttcctacgtcaccagtcccactcctctccttcggcccactcagtcccccctgaatgtttcaacccccagtgccaggaagcgtggggagttcacagcacagcacatcagacattcgccacttccacatccagggagccaactagaaacatccccaaacctaaaagcaaaataacctgtccaaacagctttaaaggtccaggaagataaatgtcaagggagctaaaatagtcgacaggccccagaacatagaaaataaacttccctttcagaaagcagccttcacttggtttcgtaagcgtgtaccgctgaagtctgtactgtttgaaggtgaaaagaaacatctgagaagcacctgcctggattctcttcgctccctccggccatgacaacccttatcccgatttctacttcgcggcaccaaagaggaaagcagcattcaccagaacgctccaggctgaatccgttagctggactagggcactctatccggcccacgggaggacgccacaagcccgagttcgggttaagacggtgggagaggcagccgctgctgctgctgttttgcccttgacacgtcgctgggggatagcgcagaccccctctgtcacggaaaagcggcgtcctggagagactgtccagttctgggctgcgccgattcccctccaggccttgcccctaaacgtccccgccccgcgggggcagccctgcggggtctcagagccgcccgcgagcctggcgggctgttacgcggcctggagagaaggggagcgctcctcggggagggggggtcccacctgttttgtcgtcagggggcatcgaggggctacggtggggggatcccgaaatagtgggcgcctggccggctgcgatctggaccgaaggtaccaactgtcacaccgccacctaggctgtgggggtggagccgtgattggagtcggcccctgggtgggggtctccggaccccgggcgggctactgcccaaaggctccccgcctcccgatcgccccaatccgacaccaggcagccttccagcccgcacgcagtagctctgaaaaggtgcccactgacgcctcctccttcctccccgccccaacttagccggggagccccgccggcggcccgccccctccgagcccggatcccggccgccggacctccccgctgtgaccacccacgggagcagcagctctggaggactgcccgccaggtacgcgcgcggcaccgcgcgggctgcgctcacgccccctcgccccagagcagcccgcccgctgctccccggcataaggccgggcccgcgagacaggtgtccgatcggcccccgcaaccgtgaggccggctgtctgtccctgccccacgactcacttgcactggagtcacggcagccgccggaattccgctcgcggagcccccgccgcggaatgaaatccggggcagggcagcgtcggggctccgcaccccaatcgcgctctccgaccggctccctaggcgcgaggggagagcagtcagcccaggccggtccttctcactcccgacctgcccgccgcctgccgcccgcagccgctgccccgctggtgcgaacgctttcgacttgccaccgcgagcctcccgggctgccgagcatgcccagtccgctgcccgagccggcccggcttcccgcgcgacgcgactccgctcctccgggtgttcactgcggccgggggggcgggccggccgggcggggtccgcggggggctcctcccgggaccgagcgggaccccgaaccaagggacagtcgcagtttgggccccttgaattttactttcaagtaatgggaaactgaggaggcgggcgctttccccagcgtttttaggggcccactaagtaaggcctagcgggagccagattttacaatctgggacggtaaatcccttggggcagggccggagacgggagccgctagagctggtcacaaagcagggaacgcaaactcagcctgctggaagccaggcacgagtttgcgaactactactggattctttttcccaccaagcccaagggctgcgacacttgggattaatgcccaatggatcattcctaggaaacggccgacctgactattcggcccattttcaaacctctaaccatagactctcatctttctcccacaacagaaaaaaaaagcctctggcgacgcctgggagcgcgacggaggcgcaagagctctaaccgcgcgaggtgaaaactccgactgcgtcagagccgccccgccccgcctggggcccaccttccgccgcccctccgagctgcggcgaaaacccggagagcggctaggccggggtcggagcccgcgcatgcccagtagccccacgtggtgcaagtcgcctgaaggaaggttttcctctgctccccgagcgaagccccagcgcccaagttaggatggacagcggggagagctggccttcccgccccgatgcccgccgtccctggccggcccgcgccgcacctcggtggcctacaggcagcccgaggccgtgcctcccgcggggtcggggacttggcgagcgggggaaggggcgcggctacgggcccggcgtaccacgtgactgtccgcggcgctccgggcagccatcttccgcccggccatcgggccgcgggcgctcggaaccgacctgggagctggcgggaccgtcctcccccgccacgccctcccatcgggctttgggcgccggactctggccaccgctcggcacctgcctccgcctcgccttggggtataggagtcctgtaccgacccctggcttgcccagaggacaggttctcgcccgggccagaagcaaactgcggcgaaatcgagacaacagaactcaggtggcggagggtccccgcttttccccagaggcggaagttggcgagggagtcctcttccgttatccagcgagagcgctgctctggctgcctcccggttctaacctagtccctgcagaggagtgatgtaccggcagggacattggacagaggccgtgctcttccctgcagcgcataccccgcggcccctgctggtgggccgcttcgatggtgctgaggttcatagtgaatatttattgagcgcctgcctcgagtcccttgggtttcctgttgtctcgggacctgccgcgtcactatcaccctagaatttgttagaaatgcacgttttcggccccacctagacctacagaaccagaaactgcgggtggagtcctgcaatatgattaacaaagccctccgggtagttgtcatggacgcctctatatttcagctaagcagtccattttaataagctaggcagtgaaaatttccatagttttccccaaagcacagtgaggagtcagggattcaaaatgaggcaatctgccccaatgcaggcgttttattgcaccctccactcctggctcctctggttttttcgcccgtaagacacagtactgctcttctcaggaagattaggaaagtacatttgtcacatacgcttttcaagcacggctttaaaataacaactgaaattcagttcaactgcatgttttgagtatctactgggagcaaggctctgtgaagtatagtagccctactggttatgtttatcagtttgcacctaaaaggtgaaaggaaggcttgcttt

SEQ ID NO: 914072 - DNA, 4001 bp, Homo sapiens
tgctcagtaaaacagcacagaaagatctcaggaggagaggaaacagctctaaagcaggcatacctctctgtccaacaaaagaacttaaattcatactggttcaatccaacaagcatttgttaagcacatactatattcagagcaccatgctaggtgtttattcatctctaaacaaagaagacatgattatctgcctgtcgaggaaccataactctaatctggaagacaaacactcagataaactagtatatggcagaccctgataaaacgtaataatagaggtttcaaaactgctctggtagtacgggaagggagggattaaaactgcaagaattatgaaaaagaaagccaggagaggtgacctgtgctcctagtcctagctactccagaggctgaagcaagaggatcacttgaagtgggagttccaggctacagtgagctatgattatgcctgtaaatagccactgcactccggtctgaggaacatagcaagaccttgtctcatttaaaaaaaataataataattttgaaaaagattcttcaataatttaagttctacatatactgtattgatgtatttaattcagctatttattcatcctgatcattcatccaaaataaaaggtggttggccaggcgcggtggctcacgcctggaatcccagcacttcgggaggccaaggcgggtggatcaccacaggtcaggagttcaaggccagcctggccaacatggagaaccccgtctctactaaaaatacaaaaattagccgggcgtggtggcgtgcgcctgtaatcccagctactcaggaggctgaggcaggagaatcgcttgaacccaggaggcagaggtggcggtgagccgagatcatgccactgcaccccagtctgggcaacagagtgagactccgtctccaaaaaaacaaaacaaaacaaaacaaaataaaaggtggcaaaacgctcagctaccaaaagcaagcatcagaggtgaaatctacacactgggatcctttggactaaaaaaacggagacaaatgccttggaaccaggaggatgtctgcaaaaggctcaccaacatcagaaggtctgtgctaggcatcttcctcttccagcctcctctccgcgctcccctttttcagactctgtaaaagggaaccaggtttgtttacttctagagctttaaactgtctcgccagcccgcctagattcgccagagcagccaagttatggttctctccctcctttgaaggctcagatttcattcccagatatcacagtccacccctagcaccccagaccagcgaatcaaaatcctgctgcaactaggtttccctcccacagctgatgaaactaatccagacccagactcccacaaagcattccacccaggtggaaactaggggaaacgccccgtctgcgcgcgatcggggtggggagcccagcccaggccacctaacccgggctgaaggtgccgaggctaccagggtcctgcctcctccgcactcccttcagaatcagcacggcctcgctctcgttgtcacccctcccgtcggaggaccagcaaatcctggccgcccatgcctaccccgcggcaggcgtgggctccagacccgccccaccgcggccccgcgcccgcccgccgtccacttgcttggacctcagcggctggtgcccacgccttcagcccgcccccgcccccgccccggccgcagccgccccgccgcctctgcccgccctcggcccacccggcccctgtcctctcctcaccccgcggcgcctccgtcccgaccctcaccgccccccggagcccgcggcggcccctccacctcctcacgccggaaccagcttccagtctccttccctcgagcacccggccggctccacctcctgcgtctccctcagcacgcgacggactcgcaggccgcgagacccaggctcccctgttgccgccgccgccgccgagattggaggcccggcagccgccggcctcgcccctcccggaaatggctccgggggcaccggcccggctcccggaccctggcgtgcgcggccccgctgctaccagccgcgcgcacgcccagacccgggccccacggcctgtgcgcgccgcctaccggccaggcagcgggctgcacccagaccctccagtgaatgtctcaaccaggccgtcctggggcggctgtggtatcccgacggtcaccaacttctcttccaaactgccttggacaaaaaactttcttgtcacatttggtcacttggagcctcctgagagagtaggtctgcagggcattgtacaaactaatccaaaacagccacagagttgggtctctttcctgggccagggacttcatttttccatcgaggtcagtggtgcctgaagaaaagcaacaaggaaacttatttaatggaaatatcatcctcatcctcccctccaccactgcccccccccaccccaaaaataaaatggagagcagaggctactctgccatcactactttcatgagcagtgctgggaatcaccttatacacaagtgcaagggcccactgggatcacaaaggtcgccttcatttccagatgaaaaaactaagtctcagctgggtgtagtggcttacatcggtaatcccggcacttggggatgctgaggcgggagggttgtctgagcccaggagctctagatcagcctgagcaacatagtgagacccccaactccaaaaagaaaaagaaaaaactaagtctcacataggtttcccatgacttgtccaggttgtcataacattgctttagtggtagcagaaggcagtgcagttacatggaaccaactggtcagtgacctgcattcaagattttttttcaatagattttaaaatgacacctagatagactcttgaaatctctcaaacaaaaatgacactaatgagggtacccaattccatccccttggaaaatgttgccatgacactaaaattagggcatcatcactaccgtcattatccacatgtagtgctttcaggatgaaatgtactatcacagctgccctcctctgcataccccatcggcacttcccacttccccagccataatggttaaggccctgaaagactatgaacaggttatctttaggcctcctcacccccattccgtcagaactcccagacatttctaccatccagagcccctgactcaggcatgaacacccccatacccttagccccctcactactattccccagcagacatgcattctcagtgtttgagggtcagaaaatgttctggggcctcctgccaatgcctactcatcaagagttgctttagggtttcaggtatgccttcccattctccatctcctacccttctgctttaattcttcatcagatcccccaggaactgcacacctcctctccatctccttgttagttaccacccccacatcctttaatctagaatctgtgcacccagatgactagagggcagggtcacgtctgattcctccctacaccctaacacacagtatgcagtctgctcattcttcccagatgctcaaaccaatgcaatcatatcgactgatccttgctttgccaagaactatgctaggcacctttacatacaagccttatttatggcctgacttgcccagatcaggtgactcttatcatccctcaacctgtaaacaaggacaccaagaccaaagaaggaaatgatcctcccaaagacacacaggcaggatggggtggagtttgtgtgggagtttggaggggaagccaagggttcagaatttgtagcggggacctcgaatatcctttttggttaattagaatcaaaaaatggtagggctagaggggtctccagctattcgccagctccaccccagagaatacacaaatacacgtgaagaaactgaggtccagagagagatgcgactcctagcagttcctggcagagcccagcctagaacatgggtctgggtttgcaactctctgagccgatgaagccctgtgtgtgtgtgt

SEQ ID NO: 914073 - DNA, 4001 bp, Homo sapiens
agtgggaagagcgggagggaaagacgtctggctcccaggcaaaagcatccagaaggatgagaggcggtcacagaggaaccaatttaacagtagcagaaactgtcaatcaagataaaactgacagggccaggcacagtggctcgtgcctgtaatcccagcattttgggaggccgaggagggcggattacctgaggtcaagagttcaagaccagcctggccaacatgatgaaaccatgtctctattaaatacaaaaattagctggttgtggtggtgggcgcctgtaatcccagctacttgggaggctgagacaggagaatcgcttgaacccgggaggcagaagtagcagtgagccgagatcacaccactgcacttcagcctgagcaatagagtgagattctgtctgaaaaaaaaaaaaaaaaagatagaactgacaggtccaaacagggaagcttcctgggtcagtagtgtggacatgtgtcctcagtcctgtgtcccctggtcacacccagctctggccctgagaacctgggatgactgagtaagcagagaggagtccacagggttgtgaagttcataattcctaacacaggatgtgcattcctgtggtggccaaggagaatgaggagagaacgagcttgcacaggtcgtggccatgctagaggggtttgactgaagtcttgctgggacataatgtgataacatgccttctctgagtctcaatatactcaatatactggacaacgaactttgtcagaaacgtgatagcacaataagcatgatgttagatttaaaaaacctaccaagctgaggggtccacaccatccaccacagcatagaacatcagagggttcttgccaaagcgtaaagtgaaaacagaaaagaaatgccatgtgctcagaggagtgatgtgtccagccgtgccctcatctcctctccttcctacctttcacagtccgcctctaagctttcacccaagcttacttctgtgggttccaaatgtggatctcagaatcaagaaaacctcctaggttctgtaaacgagaatgattcacatcaccagtgtttactcgcaccctcaccaggcacaactccggggctgtgaggttctcaggcacaaggcacaccttgtcctgcctgcctgtctgtagggacatggggagtgttacttgagcccaagggatggcaaagccaggcttgccaggagcgaggaatgttcccagaaaagaggggagagggaaggctttagagcactggggacgatggcccggaggaggcccagtgtcactctaggctgaccaggactaacccacgtcatgctcagggatcccaaggggccagcaaacagctcagcagggctacagcaggtgcttccttcagaaaaaaaatgtgtagggaggggaccaggaaagaggatgcctgtcaatgagacaagaatagcactgggtggtcacaggagcatggaaaaacccaaacaacagctaaaacaagaacaagacaaagaaacaacaagataacagaaaacccaaaggaagagagtaaaaacagctgaaatcccactcagggtgacttgtccatggctcttctgggcaaacccaaagaagggagaaaggagacagtaacccagggggttccctgaaatctcctcctcttccagaacacctaataattgttccatcccctaattaaagaaacacccataaaattagaaacccagactctgctgggtgtgacacgttctcatgagcacgcccgcacttctctctcaagtgtgtactttcgcttctcactaacagtttcttgcctttcctatcattctgactcattcccgagttctttctcaagacagtttcaagagcctggacatcaactggggctggggtctcaccagcatctggagagcctcctgagtcctctggcaacatcaagggaaggaagagaagattcctccgtggagcccgtccccgcacaattcccgccctgggacacggcacggctgctttgaaccaagcctcacccttggcactcgagttggctgtgttccctatgatccatctacccaccgtctccaggacaagcactgccccattcactgaaatcagcacatagtaatgctggataagtgaatgaattggtgaatgagtgaacaagtgaatgtgtgcacagctcacttgtttaattggagttccgagtttggaagtgaatgaacagaaaaaaaatcagtcaccagaccccagatccaagtcatgagatgtagcagctggatgaccttggatgtagcgcatcacttctctgagcctcaccttccttatctgcaatgaaatcagggagcttgccctgccaccccgcagggacacgggagcagcaagggctgggtaggcacccagtcaacgtaaagctcacaagttgttgccacccttcatcacgaccccaggacatgaagcagatactgtatatcctggaccctccggccgaaagctcttccggctcctgggcagggccagcccccaggctccccagtggcatgcccagacagttccaaaaggcaggaccgaagcaaagagccaggatccaagcgggatcctgacctgggatacacacattcctcggcgtgctttcctgcttttccattctttataaatcagaaaattaattaccagaaaaaggatcttctgcaccagaaactcaaatgagtttaatgtataatttatacatgaaaatgtagatgtctatgtgtgacaaatctctgtataaatatttttgcagttaaatttttaggcatctgtctccctccaagaagagtcatcatgcaggcatcatgagtccccagggctcaggccgggtggtgctggcaaggtggcttgtcatttcaccagttagtgatgcagctgccagcgcagcccagcccggaaggccccagctttggcagcagccacctgcagccaagtcacagctctgccccaacctccccggcagggtcctgctgtgtcttgttcaaaacaaggatttaacaccatgtgccacctctgtgctgggcccaggggaggaagatagagtggaggaagccctcacacaccagtgcctttgagcccatcggagagccaggcaagcagatgaggaatgacaatgacagggtggcaaatgccagggcaggcgtgggtcctacatgccaggcagccacagaggagcaagtactgccctatgcaagagcatccctgaacactccagggcaggggggccactcctgatggagtctgtcaggtggatgaaggcagaaggacattcccaacggtgagagccactcatgtgaagaccagagacaagagcaagcatgtccagatgatgtgggtgtggcctgtggcacctggtggggactggccagcagtgagcctggcatggagaagagccagatcaccaagggagctgtgtgctcagccctgaaacaggactttgttctggattgaaaacttcaaagggtgaaggcacataagccttgcaaactgtaaagtgcatgcagcatccacagaaactacaatccctggcaggattgagtcctgtgccaagccaagcctcagcagcctgccagtttctggcccaggggtcctggatgatttccttcacccacaggtgtaccagtccataggattgactggcacatgactttgcatacaaaacacctgaaatgtaggctaggcccttgcttctcatctgcagttgctacgaccatttggggatggtcattcattgtgtgggacgttccctgatgccctctctccggatgcccagtggggctccagagacaacccacagcatcctcctgccggaggatctggagggagaggcacagtccacagaaggggccctagccaagaactggtgtgccacgcatgccaaggagaaaggaactgcatatctacaccacactctggcccagaaccaatggcaagggtcacaaatatgccgtcgttcaccctaccattgccaaccacgtcggagcacaatc
